United States Patent Application Publication US 2011/0183924 A1 - sequence listing, part 173

SEQ ID NO: 433742 - DNA, 2679 bp, Homo sapiens
gcggccgccctcccacagccccacacactgggagaccgcccaccgcaaaccgcggagacccccgtctagatttaaagcgcggctgcgcccggcttctgacgtccattgaatcgcgcgggcggccggcggcgagcgcggggctgcgccgggatcgctgcgccctccgccgctggcctctgcgacgcgcgccgctcgcccgagccacccgccgccgcgccggctccccgcgccgctgcgctcctcgccccgcgcctgcccccaggatggtccgcgcgaggcaccagccgggtgggctttgcctcctgctgctgctgctctgccagttcatggaggaccgcagtgcccaggctgggaactgctggctccgtcaagcgaagaacggccgctgccaggtcctgtacaagaccgaactgagcaaggaggagtgctgcagcaccggccggctgagcacctcgtggaccgaggaggacgtgaatgacaacacactcttcaagtggatgattttcaacgggggcgcccccaactgcatcccctgtaaagaaacgtgtgagaacgtggactgtggacctgggaaaaaatgccgaatgaacaagaagaacaaaccccgctgcgtctgcgccccggattgttccaacatcacctggaagggtccagtctgcgggctggatgggaaaacctaccgcaatgaatgtgcactcctaaaggcaagatgtaaagagcagccagaactggaagtccagtaccaaggcagatgtaaaaagacttgtcgggatgttttctgtccaggcagctccacatgtgtggtggaccagaccaataatgcctactgtgtgacctgtaatcggatttgcccagagcctgcttcctctgagcaatatctctgtgggaatgatggagtcacctactccagtgcctgccacctgagaaaggctacctgcctgctgggcagatctattggattagcctatgagggaaagtgtatcaaagcaaagtcctgtgaagatatccagtgcactggtgggaaaaaatgtttatgggatttcaaggttgggagaggccggtgttccctctgtgatgagctgtgccctgacagtaagtcggatgagcctgtctgtgccagtgacaatgccacttatgccagcgagtgtgccatgaaggaagctgcctgctcctcaggtgtgctactggaagtaaagcactccggatcttgcaactgaatctgcccgtaaaacctgagccattgattcttcagaactttctgcagtttttgacttcatagattatgctttaaaaaaatttttttaacttattgcataacagcagatgccaaaaacaaaaaaagcatctcactgcaagtcacataaaaatgcaacgctgtaatatggctgtatcagagggctttgaaaacatacactgagctgcttctgcgctgttgttgtccgtatttaaacaacagctcccctgtattcccccatctagccatttcggaagacaccgaggaagaggaggaagatgaagaccaggactacagctttcctatatcttctattctagagtggtaaactctctataagtgttcagtgttgacatagcctttgtgcaaaaaaaaaaaaaaaaaaaaagaaaaagaaaaaaagaaaaatatattgtccatactgtaaataagtgtatgcttatttatttggggggaaaactatacattaaaggacctttgtcctaaagctctctcccaggccaccttgttactcattggacacggagaggcattcattgtgaggtctactggatgaggcccatagttgagacttgtagacatttatttatactgtgtcatgttttataatttatacataaaatgtctggttgactgtataccttgtttttgaagaaatttattcgtgaaaggaagagcagttgttatttattgtgaggtctcttgcttgtaaagtaaaagctttttttccttgtaaaccatttaagtccattccttactattcactcactcatctgtctcccttcatttcactgttagactcttttccactttcaacaaacttgcatgtcagtttctgtcatgtttatttattggattctctgctgcctgatctgtacatacatgatccctcgggttttgtttacaaggaaccttgactgaccaaaaggcattataactctgactcaaatacaaggtacagaagataagcatctttgaggaaactcctacttcagttcttttgttatgatgaagacatttgtgagagaggagatgattagaattctagtaatgtacttttaagatgttacagatacaaagaaatgatgtgggtgtcaggagactaaaggatgttgaaggctacacattcaaccttttgttaggtgtttcctttaagctactcagctgtaccttttaaattagttctttttcaaccagtatatcactaaaagttatatcaaagctttatcagttcaagtttcttgcttttcataatacttttttctgatgcaattttatattttcaaacatggcaagttaaaatataaattcatttaaatatatagttttgtacttttctaccatgtaaatgtgcaatgtatataaaagttataatgtgtatttgtaaataaatgatgagtgaaaaaataaaaaaattttaaaaagccaaaaaaattcaattcctg

SEQ ID NO: 433743 - DNA, 3131 bp, Homo sapiens
gcggccgccctcccacagccccacacactgggagaccgcccaccgcaaaccgcggagacccccgtctagatttaaagcgcggctgcgcccggcttctgacgtccattgaatcgcgcgggcggccggcggcgagcgcggggctgcgccgggatcgctgcgccctccgccgctggcctctgcgacgcgcgccgctcgcccgagccacccgccgccgcgccggctccccgcgccgctgcgctcctcgccccgcgcctgcccccaggatggtccgcgcgaggcaccagccgggtgggctttgcctcctgctgctgctgctctgccagttcatggaggaccgcagtgcccaggctgggaactgctggctccgtcaagcgaagaacggccgctgccaggtcctgtacaagaccgaactgagcaaggaggagtgctgcagcaccggccggctgagcacctcgtggaccgaggaggacgtgaatgacaacacactcttcaagtggatgattttcaacgggggcgcccccaactgcatcccctgtaaagaaacgtgtgagaacgtggactgtggacctgggaaaaaatgccgaatgaacaagaagaacaaaccccgctgcgtctgcgccccggattgttccaacatcacctggaagggtccagtctgcgggctggatgggaaaacctaccgcaatgaatgtgcactcctaaaggcaagatgtaaagagcagccagaactggaagtccagtaccaaggcagatgtaaaaagacttgtcgggatgttttctgtccaggcagctccacatgtgtggtggaccagaccaataatgcctactgtgtgacctgtaatcggatttgcccagagcctgcttcctctgagcaatatctctgtgggaatgatggagtcacctactccagtgcctgccacctgagaaaggctacctgcctgctgggcagatctattggattagcctatgagggaaagtgtatcaggaaagtgtatcagtaggtattctggattgaggaaggaaaaagagaaaacaggctagttctattattaaactgtggggttaactaataagtaaagcccaaggcgtccccaaacaccatagggagaaatacgctgcaatttggggaaagtgttgtgaccacagtattcctcatggaaaccattgtcttctggaggcattgacacatatattcaaatgccagcaggaagcaaggaacagtattccgtcttagaaaacttagaacttactcaattttacacatttttttaagtgccagacttgctggaagcgaaaaataattacttagcagttccagaaatctgttgtcagattctagtaattaatggaattctttcttttgtaaaagatcccacttgtgggaaataataagatacatatttaacttgagaatattgtaaaatcctgttcttaaaaaaatacccttttaatgcactaatgtagtatgtaagaaactgcaggggttttgtgcgtgtgtatgtgtgtgtgcatttgagtttcagttttattatccagcatttttgcataatatctccattacccccattagtaataggctattactattatgtttatataaaataaattatgtttatatttattgatagaggactagagaaagggagaaaagggggatatggggaaatcagtttactcatcacagatgtattatatcctagaagcaaagtcctgtgaagatatccagtgcactggtgggaaaaaatgtttatgggatttcaaggttgggagaggccggtgttccctctgtgatgagctgtgccctgacagtaagtcggatgagcctgtctgtgccagtgacaatgccacttatgccagcgagtgtgccatgaaggaagctgcctgctcctcaggtgtgctactggaagtaaagcactccggatcttgcaactccatttcggaagacaccgaggaagaggaggaagatgaagaccaggactacagctttcctatatcttctattctagagtggtaaactctctataagtgttcagtgttgacatagcctttgtgcaaaaaaaaaaaaaaaaaaaaagaaaaagaaaaaaagaaaaatatattgtccatactgtaaataagtgtatgcttatttatttggggggaaaactatacattaaaggacctttgtcctaaagctctctcccaggccaccttgttactcattggacacggagaggcattcattgtgaggtctactggatgaggcccatagttgagacttgtagacatttatttatactgtgtcatgttttataatttatacataaaatgtctggttgactgtataccttgtttttgaagaaatttattcgtgaaaggaagagcagttgttatttattgtgaggtctcttgcttgtaaagtaaaagctttttttccttgtaaaccatttaagtccattccttactattcactcactcatctgtctcccttcatttcactgttagactcttttccactttcaacaaacttgcatgtcagtttctgtcatgtttatttattggattctctgctgcctgatctgtacatacatgatccctcgggttttgtttacaaggaaccttgactgaccaaaaggcattataactctgactcaaatacaaggtacagaagataagcatctttgaggaaactcctacttcagttcttttgttatgatgaagacatttgtgagagaggagatgattagaattctagtaatgtacttttaagatgttacagatacaaagaaatgatgtgggtgtcaggagactaaaggatgttgaaggctacacattcaaccttttgttaggtgtttcctttaagctactcagctgtaccttttaaattagttctttttcaaccagtatatcactaaaagttatatcaaagctttatcagttcaagtttcttgcttttcataatacttttttctgatgcaattttatattttcaaacatggcaagttaaaatataaattcatttaaatatatagttttgtacttttctaccatgtaaatgtgcaatgtatataaaagttataatgtgtatttgtaaataaatgatgagtgaaaaaataaaaaaattttaaaaagccaaaaaaattcaattcctg

SEQ ID NO: 433744 - DNA, 1932 bp, Homo sapiens
ggcacgaggcagcactcctccttgctcagttcggtcttgtacaggacctggcagcggccgttcttcgcttgacggagccagcagttcccagcctgggcactgcggtcctccatgaactggcagagcagcagcagcaggaggcaaagcccacccggctggtgcctcgcgcggaccatcctgggggcaggcgcggggcgaggagcgcagcggcgcggggagccggctgagcacctcgtggaccgaggaggacgtgaatgacaacacactcttcaagtggatgattttcaacgggggcgcccccaactgcatcccctgtaaagaaacgtgtgagaacgtggactgtggacctgggaaaaaatgccgaatgaacaagaagaacaaaccccgctgcgtctgcgccccggattgttccaacatcacctggaagggtccagtctgcgggctggatgggaaagtgtatcagtaggtattctggattgaggaaggaaaaagagaaaacagaagcaaagtcctgtgaagatatccagtgcactggtgggaaaaaatgtttatgggatttcaaggttgggagaggccggtgttccctctgtgatgagctgtgccctgacagtaagtcggatgagcctgtctgtgccagtgacaatgccacttatgccagcgagtgtgccatgaaggaagctgcctgctcctcaggtgtgctactggaagtaaagcactccggatcttgcaactccatttcggaagacaccgaggaagaggaggaagatgaagaccaggactacagctttcctatatcttctattctagagtggtaaactctctataagtgttcagtgttgacatagcctttgtgcaaaaaaaaaaaaaaaaaaaaagaaaaagaaaaaaagaaaaatatattgtccatactgtaaataagtgtatgcttatttatttggggggaaaactatacattaaaggacctttgtcctaaagctctctcccaggccaccttgttactcattggacacggagaggcattcattgtgaggtctactggatgaggcccatagttgagacttgtagacatttatttatactgtgtcatgttttataatttatacataaaatgtctggttgactgtataccttgtttttgaagaaatttattcgtgaaaggaagagcagttgttatttattgtgaggtctcttgcttgtaaagtaaaagctttttttccttgtaaaccatttaagtccattccttactattcactcactcatctgtctcccttcatttcactgttagactcttttccactttcaacaaacttgcatgtcagtttctgtcatgtttatttattggattctctgctgcctgatctgtacatacatgatccctcgggttttgtttacaaggaaccttgactgaccaaaaggcattataactctgactcaaatacaaggtacagaagataagcatctttgaggaaactcctacttcagttcttttgttatgatgaagacatttgtgagagaggagatgattagaattctagtaatgtacttttaagatgttacagatacaaagaaatgatgtgggtgtcaggagactaaaggatgttgaaggctacacattcaaccttttgttaggtgtttcctttaagctactcagctgtaccttttaaattagttctttttcaaccagtatatcactaaaagttatatcaaagctttatcagttcaagtttcttgcttttcataatacttttttctgatgcaattttatattttcaaacatggcaagttaaaatataaattcatttaaatatatagttttgtacttttctaccatgtaaatgtgcaatgtatataaaagttataatgtgtatttgtaaataaatgatgagtgaaaaaataaaaaaattttaaaaagccaaaaaaattcaattcctg

SEQ ID NO: 433745 - DNA, 406 bp, Homo sapiens
cgctttttatctaatttcaggaatctgcccgtaaaacctgagccattgattcttcagaactttctgcagtttttgacttcatagattatgctttaaaaaaatttttttaacttattgcataacagcagatgccaaaaacaaaaaaagcatctcactgcaagtcacataaaaatgcaacgctgtaatatggctgtatcagagggctttgaaaacatacactgagctgcttctgcgctgttgttgtccgtatttaaacaacagctcccctgtattcccccatctagccatttcggaagacaccgaggaagaggaggaagatgaagaccaggactacagctttcctatatcttctattctagagtggtaaactctctataagtgttcagtgttgacatagcctttgtgc

SEQ ID NO: 433746 - DNA, 2152 bp, Homo sapiens
gcggccgccctcccacagccccacacactgggagaccgcccaccgcaaaccgcggagacccccgtctagatttaaagcgcggctgcgcccggcttctgacgtccattgaatcgcgcgggcggccggcggcgagcgcggggctgcgccgggatcgctgcgccctccgccgctggcctctgcgacgcgcgccgctcgcccgagccacccgccgccgcgccggctccccgcgccgctgcgctcctcgccccgcgcctgcccccaggatggtccgcgcgaggcaccagccgggtgggctttgcctcctgctgctgctgctctgccagttcatggaggaccgcagtgcccaggctgggaactgctggctccgtcaagcgaagaacggccgctgccaggtcctgtacaagaccgaactgagcaaggaggagtgctgcagcaccggccggctgagcacctcgtggaccgaggaggacgtgaatgacaacacactcttcaagtggatgattttcaacgggggcgcccccaactgcatcccctgtaaagaaacgtgtgagaacgtggactgtggacctgggaaaaaatgccgaatgaacaagaagaacaaaccccgctgcgtctgcgccccggattgttccaacatcacctggaagggtccagtctgcgggctggatgggaaagtgtatcagtaggtattctggattgaggaaggaaaaagagaaaacagaagcaaagtcctgtgaagatatccagtgcactggtgggaaaaaatgtttatgggatttcaaggttgggagaggccggtgttccctctgtgatgagctgtgccctgacagtaagtcggatgagcctgtctgtgccagtgacaatgccacttatgccagcgagtgtgccatgaaggaagctgcctgctcctcaggtgtgctactggaagtaaagcactccggatcttgcaactccatttcggaagacaccgaggaagaggaggaagatgaagaccaggactacagctttcctatatcttctattctagagtggtaaactctctataagtgttcagtgttgacatagcctttgtgcaaaaaaaaaaaaaaaaaaaaagaaaaagaaaaaaagaaaaatatattgtccatactgtaaataagtgtatgcttatttatttggggggaaaactatacattaaaggacctttgtcctaaagctctctcccaggccaccttgttactcattggacacggagaggcattcattgtgaggtctactggatgaggcccatagttgagacttgtagacatttatttatactgtgtcatgttttataatttatacataaaatgtctggttgactgtataccttgtttttgaagaaatttattcgtgaaaggaagagcagttgttatttattgtgaggtctcttgcttgtaaagtaaaagctttttttccttgtaaaccatttaagtccattccttactattcactcactcatctgtctcccttcatttcactgttagactcttttccactttcaacaaacttgcatgtcagtttctgtcatgtttatttattggattctctgctgcctgatctgtacatacatgatccctcgggttttgtttacaaggaaccttgactgaccaaaaggcattataactctgactcaaatacaaggtacagaagataagcatctttgaggaaactcctacttcagttcttttgttatgatgaagacatttgtgagagaggagatgattagaattctagtaatgtacttttaagatgttacagatacaaagaaatgatgtgggtgtcaggagactaaaggatgttgaaggctacacattcaaccttttgttaggtgtttcctttaagctactcagctgtaccttttaaattagttctttttcaaccagtatatcactaaaagttatatcaaagctttatcagttcaagtttcttgcttttcataatacttttttctgatgcaattttatattttcaaacatggcaagttaaaatataaattcatttaaatatatagttttgtacttttctaccatgtaaatgtgcaatgtatataaaagttataatgtgtatttgtaaataaatgatgagtgaaaaaataaaaaaattttaaaaagccaaaaaaattcaattcctg

SEQ ID NO: 433747 - DNA, 1599 bp, Homo sapiens
gcggccgccctcccacagccccacacactgggagaccgcccaccgcaaaccgcggagacccccgtctagatttaaagcgcggctgcgcccggcttctgacgtccattgaatcgcgcgggcggccggcggcgagcgcggggctgcgccgggatcgctgcgccctccgccgctggcctctgcgacgcgcgccgctcgcccgagccacccgccgccgcgccggctccccgcgccgctgcgctcctcgccccgcgcctgcccccaggatggtccgcgcgaggcaccagccgggtgggctttgcctcctgctgctgctgctctgccagttcatggaggaccgcagtgcccaggctgggaactgctggctccgtcaagcgaagaacggccgctgccaggtcctgtacaagaccgaactgagcaaggaggagtgctgcagcaccggccggctgagcacctcgtggaccgaggaggacgtgaatgacaacacactcttcaagtggatgattttcaacgggggcgcccccaactgcatcccctgtaaagaaacgtgtgagaacgtggactgtggacctgggaaaaaatgccgaatgaacaagaagaacaaaccccgctgcgtctgcgccccggattgttccaacatcacctggaagggtccagtctgcgggctggatgggaaaacctaccgcaatgaatgtgcactcctaaaggcaagatgtaaagagcagccagaactggaagtccagtaccaaggcagatgtaaaaagacttgtcgggatgttttctgtccaggcagctccacatgtgtggtggaccagaccaataatgcctactgtgtgacctgtaatcggatttgcccagagcctgcttcctctgagcaatatctctgtgggaatgatggagtcacctactccagtgcctgccacctgagaaaggctacctgcctgctgggcagatctattggattagcctatgagggaaagtgtatcaaagcaaagtcctgtgaagatatccagtgcactggtgggaaaaaatgtttatgggatttcaaggttgggagaggccggtgttccctctgtgatgagctgtgccctgacagtaagtcggatgagcctgtctgtgccagtgacaatgccacttatgccagcgagtgtgccatgaaggaagctgcctgctcctcaggtgtgctactggaagtaaagcactccggatcttgcaactgaatctgcccgtaaaacctgagccattgattcttcagaactttctgcagtttttgacttcatagattatgctttaaaaaaatttttttaacttattgcataacagcagatgccaaaaacaaaaaaagcatctcactgcaagtcacataaaaatgcaacgctgtaatatggctgtatcagagggctttgaaaacatacactgagctgcttctgcgctgttgttgtccgtatttaaacaacagctcccctgtattcccccatctagtggtcttcatcttcctcctcttcctcggtgtcttccgaaatggagttgcaagatccggagtgctatacttcacagtagcacacctgaggagcaggcagctcccttcatggcacactcgct

SEQ ID NO: 433748 - DNA, 2779 bp, Homo sapiens
tctgttttcttttagaggtcactggagagcccggtggggtgtaagtacactgcgcttataaaactctagcaggaagctagcagctgtctccaaacccagagaaggggaaacaggaatcgattaggaataaaggattataatccactttccttctgaggaaaagctgggaaccttctcattttgccttatgaaaactaagctgaatcgactgctgccaaacatctattaggcaaaattggcctcttgcccatgatttgactttccagcacagccagttctttttctcctctgcagctgattggctctggagtgtggccagaagcctctctcctgcaattaaaggagtcgggtctctaactgttgatctgtttttttcccttctgagcaatggagcttaccatctttatcctgagactggccatttacatcctgacatttcccttgtacctgctgaactttctgggcttgtggagctggatatgcaaaaaatggttcccctacttcttggtgaggttcactgtgatatacaacgaacagatggcaagcaagaagcgggagctcttcagtaacctgcaggagtttgcgggcccctccgggaaactctccctgctggaagtgggctgtggcacgggggccaacttcaagttctacccacctgggtgcagggtgacctgtattgaccccaaccccaactttgagaagtttttgatcaagagcattgcagagaaccgacacctgcagtttgagcgctttgtggtagctgccggggagaacatgcaccaggtggctgatggctctgtggatgtggtggtctgcaccctggtgctgtgctctgtgaagaaccaggagcggattctccgcgaggtgtgcagagtgctgagaccgggaggggctttctatttcatggagcatgtggcagctgagtgttcgacttggaattacttctggcaacaagtcctggatcctgcctggcaccttctgtttgatgggtgcaacctgaccagagagagctggaaggccctggagcgggccagcttctctaagctgaagctgcagcacatccaggccccactgtcctgggagttggtgcgccctcatatctatggatatgctgtgaaatagtgtgagctggcagttaagagctgaatggctcaaagaatttaaagcttcagttttacatttaaaatgctaagtgggagaagagaaaccttttttttggggggcggtttttttggtttgttgttggttttttttttttttttggcgggaagaaagagttttgctcttgttgcccaggctggagtgcaatgacgtgatctccgctcactgcaacctccacctcgcgggtttaagcgattcttctgcctcagcctccctagtagctgggattacaggtgcccaccaccatgcccagctaatttgtatttttagttgagacagggtttcactacgttggccaggctggtcttgaactcctgatctcaggcaatccacccacctcagcctcccaaagtgctgggatgacaggcgtgagcaaccgcacccagcttaaggtttttttgttttgttttgagacggagttttcgctcttgttgcccaggctggagtgcaatgctgtgatctcagcttaccacaacctccacctcccgggttcaagtgattcacctgcctcagcctcctgagtagctggtattacaggcatgcgtcaccacgccggctaattttgtacttttagtagagatggtgtttccccacgttggtcagtctggccaacatggcaaaaccctactaaagatacaaaaaaaaaaaaaaaattagccaggcgtggtggtgggtgcctgtaatcccaggtacttggaaggctgaggcaggagaatctcttgaacccagaaggcgaaggttgcagtgaaccgagatcatgccattgtactctagcctgggtgacaagagcaagactccgtctcaaaaaaaaaaaaaaaaaaaaaaagaagtagagacagggagacagggtctcactgtgttgcctaggccggtcttgaactcctgggctcaagtgattctcccaccttgacctcctaaattgttgggattacaggtgtgagacagtgcacctggccgaaatagctcaagtttctgaaaaacaaatctgaatctatttgttattcttagcgtcactggtctggctttcagaattaacatacaaggttgccacacctagttctgcccagctttatgtcttttattccagtattccaccaaagtttgttttcctgcattccagttctcaagtcttaagataaagattgtacttgacagtttagtatatccataaaactatttgaggtggttaaggttcttgggttcattttccttaatactttgctgaatattgtagattgtaggcaatgaaaaagtctactaaattaggaaaaccttgaataattaggtatcctaggtaagagcccctaaacatcaagcaatctgtgagtctgtaaagaaataaatattttttggattattcttatctaattccacccctgttggaagatgatttctttgttctttgcaactatggaagctgtgaaaatcatcacaagtgcctctgaaagcgagtgttaggttggttagagggtttaatattttctgcaatggtttgtaggaattttaataaatgtagtatattttctgagatgattttgtaaaagtactattttaaatatcaaatcaaccaataaattcacatttgtgttaggaacagaaaaaaaaattaaatctttgc

SEQ ID NO: 433749 - DNA, 778 bp, Homo sapiens
gaaaaaaaaaaaaaaaaaaaaaaaaaaaaaactcgaggtcgcggtatcgataagcctgaatcgattccggcacgagaaattgttgggattacaggtgtgagacagtgcacctggccgaaatagctcaagtttctgaaaaacaaatctgaatctatttgttattcttagcgtcactggtctggctttcagaattaacatacaaggttgccacacctagttctgcccagctttatgtcttttattccagtattccaccaaagtttgttttcctgcattccagttctcaagtcttaagataaagattgtacttgacagtttagtatatccataaaactatttgaggtggttaaggttcttgggttcattttccttaatactttgctgaatattgtagattgtaggcaatgaaaaagtctactaaattaggaaaaccttgaataattaggtatcctaggtaagagcccctaaacatcaagcaatctgtgagtctgtaaagaaataaatattttttggattattcttatctaattccacccctgttggaagatgatttctttgttctttgcaactatggaagctgtgaaaatcatcacaagtgcctctgaaagcgagtgttaggttggttagagggtttaatattttctgcaatggtttgtaggaattttaataaatgtagtatattttctgagatgattttgtaaaagtactattttaaatatcaaatcaaccaataaattcacatttgtgttaggaacagaaaaaaaaattaaatctttgc

SEQ ID NO: 433750 - DNA, 360 bp, Homo sapiens
tactctagagcatccactctccctactgtatcctaggtaagagcccctaaacatcaagcaatctgtgagtctgtaaagaaataaatattttttggattattcttatctaattccacccctgttggaagatgatttctttgttctttgcaactatggaagctgtgaaaatcatcacaagtgcctctgaaagcgagtgttaggttggttagagggtttaatattttctgcaatggtttgtaggaattttaataaatgtagtatattttctgagatgattttgtaaaagtactattttaaatatcaaatcaaccaataaattcacatttgtgttaggaacagaaaaaaaaattaaatctttgc

SEQ ID NO: 433751 - DNA, 281 bp, Homo sapiens
agagagagagagagagagagagagagagagagagagagagagagagagagagagagagaggttctttgcaactatggaagctgtgaaaatcatcacaagtgcctctgaaagcgagtgttaggttggttagagggtttaatattttctgcaatggtttgtaggaattttaataaatgtagtatattttctgagatgattttgtaaaagtactattttaaatatcaaatcaaccaataaattcacatttgtgttaggaacagaaaaaaaaattaaatctttgc

SEQ ID NO: 433752 - DNA, 3500 bp, Homo sapiens
tctgttttcttttagaggtcactggagagcccggtggggtgtaagtacactgcgcttataaaactctagcaggaagctagcagctgtctccaaacccagagaaggggaaacaggaatcgattaggaataaaggattataatccactttccttctgaggaaaagctgggaaccttctcattttgccttatgaaaactaagctgaatcgactgctgccaaacatctattaggcaaaattggcctcttgcccatgatttgactttccagcacagccagttctttttctcctctgcagctgattggctctggagtgtggccagaagcctctctcctgcaattaaaggagtcgggtctctaactgttgatctgtttttttcccttctgagcaatggagcttaccatctttatcctgagactggccatttacatcctgacatttcccttgtacctgctgaactttctgggcttgtggagctggatatgcaaaaaatggttcccctacttcttggtgaggttcactgtgatatacaacgaacagatggcaagcaagaagcgggagctcttcagtaacctgcaggagtttgcgggcccctccgggaaactctccctgctggaagtgggctgtggcacgggggccaacttcaagttctacccacctgggtgcagggtgacctgtattgaccccaaccccaactttgagaagtttttgatcaagagcattgcagagaaccgacacctgcagtttgagcgctttgtggtagctgccggggagaacatgcaccaggtggctgatggctctgtggatgtggtggtctgcaccctggtgctgtgctctgtgaagaaccaggagcggattctccgcgaggtgtgcagagtgctgagaccgggaggggctttctatttcatggagcatgtggcagctgagtgttcgacttggaattacttctggcaacaagtcctggatcctgcctggcaccttctgtttgatgggtgcaacctgaccagagagagctggaaggccctggagcgggccagcttctctaagctgaagctgcagcacatccaggccccactgtcctgggagttggtgcgccctcatatctatggatatgctgtgaaatagtgtgagctggcagttaagagctgaatggctcaaagaatttaaagcttcagttttacatttaaaatgctaagtgggagaagagaaaccttttttttggggggcggtttttttggtttgttgttggttttttttttttttttggcgggaagaaagagttttgctcttgttgcccaggctggagtgcaatgacgtgatctccgctcactgcaacctccacctcgcgggtttaagcgattcttctgcctcagcctccctagtagctgggattacaggtgcccaccaccatgcccagctaatttgtatttttagttgagacagggtttcactacgttggccaggctggtcttgaactcctgatctcaggcaatccacccacctcagcctcccaaagtgctgggatgacaggcgtgagcaaccgcacccagcttaaggtttttttgttttgttttgagacggagttttcgctcttgttgcccaggctggagtgcaatgctgtgatctcagcttaccacaacctccacctcccgggttcaagtgattcacctgcctcagcctcctgagtagctggtattacaggcatgcgtcaccacgccggctaattttgtacttttagtagagatggtgtttccccacgttggtcagtctggtctcaaattcctgacctcaggtgatctgcctgcctcggcctcccaaagtgctgtgattacagacgtcagccaccatgcctggcctgaaaccttttttaggtaaagttgaattccatccttaaaagtttctgttatatcctatttagccattttctattgtctcccaaagaattcacatcaaaaaaacagctttgaactcccccttcaaaggaaacagtcgactttcataattagcatctaccattatccccaaatcttattttattcattgacttgaaattttttccaattgctttttttttttttttttttaaggttaagagcagaggtttactaggccaaagaaagagaatagctctctgttgcagagaggggtcctggagaaatgggttaccccagttgtcttatttaaatggttacccatcagattttaattttatcttctctttgagagcttggtaataagaagcacttaaatcactccaaagaagactttaaaaagggagcagtgaaaaggtcttaataatttattgattgaattaagaaatactagctaattaagaatctgagtctaaacagcacagattttttctttctgcttttaaattgtgttttaaaaaaagagacagggggctgggcgtggtggctcacgcctgtaatcctagcactttgggaggccgaggcgggtggatcacgaggtaggagttaaagaccagcctggccaacatggcaaaaccctactaaagatacaaaaaaaaaaaaaaaattagccaggcgtggtggtgggtgcctgtaatcccaggtacttggaaggctgaggcaggagaatctcttgaacccagaaggcgaaggttgcagtgaaccgagatcatgccattgtactctagcctgggtgacaagagcaagactccgtctcaaaaaaaaaaaaaaaaaaaaaaagaagtagagacagggagacagggtctcactgtgttgcctaggccggtcttgaactcctgggctcaagtgattctcccaccttgacctcctaaattgttgggattacaggtgtgagacagtgcacctggccgaaatagctcaagtttctgaaaaacaaatctgaatctatttgttattcttagcgtcactggtctggctttcagaattaacatacaaggttgccacacctagttctgcccagctttatgtcttttattccagtattccaccaaagtttgttttcctgcattccagttctcaagtcttaagataaagattgtacttgacagtttagtatatccataaaactatttgaggtggttaaggttcttgggttcattttccttaatactttgctgaatattgtagattgtaggcaatgaaaaagtctactaaattaggaaaaccttgaataattaggtatcctaggtaagagcccctaaacatcaagcaatctgtgagtctgtaaagaaataaatattttttggattattcttatctaattccacccctgttggaagatgatttctttgttctttgcaactatggaagctgtgaaaatcatcacaagtgcctctgaaagcgagtgttaggttggttagagggtttaatattttctgcaatggtttgtaggaattttaataaatgtagtatattttctgagatgattttgtaaaagtactattttaaatatcaaatcaaccaataaattcacatttgtgttaggaacagaaaaaaaaattaaatctttgc

SEQ ID NO: 433753 - DNA, 3065 bp, Homo sapiens
tctgttttcttttagaggtcactggagagcccggtggggtgtaagtacactgcgcttataaaactctagcaggaagctagcagctgtctccaaacccagagaaggggaaacaggaatcgattaggaataaaggattataatccactttccttctgaggaaaagctgggaaccttctcattttgccttatgaaaactaagctgaatcgactgctgccaaacatctattaggcaaaattggcctcttgcccatgatttgactttccagcacagccagttctttttctcctctgcagctgattggctctggagtgtggccagaagcctctctcctgcaattaaaggagtcgggtctctaactgttgatctgtttttttcccttctgagcaatggagcttaccatctttatcctgagactggccatttacatcctgacatttcccttgtacctgctgaactttctgggcttgtggagctggatatgcaaaaaatggttcccctacttcttggtgaggttcactgtgatatacaacgaacagatggcaagcaagaagcgggagctcttcagtaacctgcaggagtttgcgggcccctccgggaaactctccctgctggaagtgggctgtggcacgggggccaacttcaagttctacccacctgggtgcagggtgacctgtattgaccccaaccccaactttgagaagtttttgatcaagagcattgcagagaaccgacacctgcagtttgagcgctttgtggtagctgccggggagaacatgcaccaggtggctgatggctctgtggatgtggtggtctgcaccctggtgctgtgctctgtgaagaaccaggagcggattctccgcgaggtgtgcagagtgctgagaccgggaggggctttctatttcatggagcatgtggcagctgagtgttcgacttggaattacttctggcaacaagtcctggatcctgcctggcaccttctgtttgatgggtgcaacctgaccagagagagctggaaggccctggagcgggccagcttctctaagctgaagctgcagcacatccaggccccactgtcctgggagttggtgcgccctcatatctatggatatgctgtgaaatagtgtgagctggcagttaagagctgaatggctcaaagaatttaaagcttcagttttacatttaaaatgctaagtgggagaagagaaaccttttttttggggggcggtttttttggtttgttgttggttttttttttttttttggcgggaagaaagagttttgctcttgttgcccaggctggagtgcaatgacgtgatctccgctcactgcaacctccacctcgcgggtttaagcgattcttctgcctctcggcctcccaaagtgctgtgattacagacgtcagccaccatgcctggcctgaaaccttttttaggtaaagttgaattccatccttaaaagtttctgttatatcctatttagccattttctattgtctcccaaagaattcacatcaaaaaaacagctttgaactcccccttcaaaggaaacagtcgactttcataattagcatctaccattatccccaaatcttattttattcattgacttgaaattttttccaattgctttttttttttttttttttaaggttaagagcagaggtttactaggccaaagaaagagaatagctctctgttgcagagaggggtcctggagaaatgggttaccccagttgtcttatttaaatggttacccatcagattttaattttatcttctctttgagagcttggtaataagaagcacttaaatcactccaaagaagactttaaaaagggagcagtgaaaaggtcttaataatttattgattgaattaagaaatactagctaattaagaatctgagtctaaacagcacagattttttctttctgcttttaaattgtgttttaaaaaaagagacagggggctgggcgtggtggctcacgcctgtaatcctagcactttgggaggccgaggcgggtggatcacgaggtaggagttaaagaccagcctggccaacatggcaaaaccctactaaagatacaaaaaaaaaaaaaaaattagccaggcgtggtggtgggtgcctgtaatcccaggtacttggaaggctgaggcaggagaatctcttgaacccagaaggcgaaggttgcagtgaaccgagatcatgccattgtactctagcctgggtgacaagagcaagactccgtctcaaaaaaaaaaaaaaaaaaaaaaagaagtagagacagggagacagggtctcactgtgttgcctaggccggtcttgaactcctgggctcaagtgattctcccaccttgacctcctaaattgttgggattacaggtgtgagacagtgcacctggccgaaatagctcaagtttctgaaaaacaaatctgaatctatttgttattcttagcgtcactggtctggctttcagaattaacatacaaggttgccacacctagttctgcccagctttatgtcttttattccagtattccaccaaagtttgttttcctgcattccagttctcaagtcttaagataaagattgtacttgacagtttagtatatccataaaactatttgaggtggttaaggttcttgggttcattttccttaatactttgctgaatattgtagattgtaggcaatgaaaaagtctactaaattaggaaaaccttgaataattaggtatcctaggtaagagcccctaaacatcaagcaatctgtgagtctgtaaagaaataaatattttttggattattcttatctaattccacccctgttggaagatgatttctttgttctttgcaactatggaagctgtgaaaatcatcacaagtgcctctgaaagcgagtgttaggttggttagagggtttaatattttctgcaatggtttgtaggaattttaataaatgtagtatattttctgagatgattttgtaaaagtactattttaaatatcaaatcaaccaataaattcacatttgtgttaggaacagaaaaaaaaattaaatctttgc

SEQ ID NO: 433754 - DNA, 3451 bp, Homo sapiens
tctgttttcttttagaggtcactggagagcccggtggggtgtaagtacactgcgcttataaaactctagcaggaagctagcagctgtctccaaacccagagaaggggaaacaggaatcgattaggaataaaggattataatccactttccttctgaggaaaagctgggaaccttctcattttgccttatgaaaactaagctgaatcgactgctgccaaacatctattaggcaaaattggcctcttgcccatgatttgactttccagcacagccagttctttttctcctctgcagctgattggctctggagtgtggccagaagcctctctcctgcaattaaaggagtcgggtctctaactgttgatctgtttttttcccttctgagcaatggagcttaccatctttatcctgagactggccatttacatcctgacatttcccttgtacctgctgaactttctgggcttgtggagctggatatgcaaaaaatggttcccctacttcttggtgaggttcactgtgatatacaacgaacagatggcaagcaagaagcgggagctcttcagtaacctgcaggagtttgcgggcccctccgggaaactctccctgctggaagtgggctgtggcacgggggccaacttcaagttctacccacctgggtgcagggtgacctgtattgaccccaaccccaactttgagaagtttttgatcaagagcattgcagagaaccgacacctgcagtttgagcgctttgtggtagctgccggggagaacatgcaccaggtggctgatggctctgtggatgtggtggtctgcaccctggtgctgtgctctgtgaagaaccaggagcggattctccgcgaggtgtgcagagtgctgagaccgggaggggctttctatttcatggagcatgtggcagctgagtgttcgacttggaattacttctggcaacaagtcctggatcctgcctggcaccttctgtttgatgggtgcaacctgaccagagagagctggaaggccctggagcgggccagcttctctaagctgaagctgcagcacatccaggccccactgtcctgggagttggtgcgccctcatatctatggatatgctgtgaaatagtgtgagctggcagttaagagctgaatggctcaaagaatttaaagcttcagttttacatttaaaatttgttgttggttttttttttttttttggcgggaagaaagagttttgctcttgttgcccaggctggagtgcaatgacgtgatctccgctcactgcaacctccacctcgcgggtttaagcgattcttctgcctcagcctccctagtagctgggattacaggtgcccaccaccatgcccagctaatttgtatttttagttgagacagggtttcactacgttggccaggctggtcttgaactcctgatctcaggcaatccacccacctcagcctcccaaagtgctgggatgacaggcgtgagcaaccgcacccagcttaaggtttttttgttttgttttgagacggagttttcgctcttgttgcccaggctggagtgcaatgctgtgatctcagcttaccacaacctccacctcccgggttcaagtgattcacctgcctcagcctcctgagtagctggtattacaggcatgcgtcaccacgccggctaattttgtacttttagtagagatggtgtttccccacgttggtcagtctggtctcaaattcctgacctcaggtgatctgcctgcctcggcctcccaaagtgctgtgattacagacgtcagccaccatgcctggcctgaaaccttttttaggtaaagttgaattccatccttaaaagtttctgttatatcctatttagccattttctattgtctcccaaagaattcacatcaaaaaaacagctttgaactcccccttcaaaggaaacagtcgactttcataattagcatctaccattatccccaaatcttattttattcattgacttgaaattttttccaattgctttttttttttttttttttaaggttaagagcagaggtttactaggccaaagaaagagaatagctctctgttgcagagaggggtcctggagaaatgggttaccccagttgtcttatttaaatggttacccatcagattttaattttatcttctctttgagagcttggtaataagaagcacttaaatcactccaaagaagactttaaaaagggagcagtgaaaaggtcttaataatttattgattgaattaagaaatactagctaattaagaatctgagtctaaacagcacagattttttctttctgcttttaaattgtgttttaaaaaaagagacagggggctgggcgtggtggctcacgcctgtaatcctagcactttgggaggccgaggcgggtggatcacgaggtaggagttaaagaccagcctggccaacatggcaaaaccctactaaagatacaaaaaaaaaaaaaaaattagccaggcgtggtggtgggtgcctgtaatcccaggtacttggaaggctgaggcaggagaatctcttgaacccagaaggcgaaggttgcagtgaaccgagatcatgccattgtactctagcctgggtgacaagagcaagactccgtctcaaaaaaaaaaaaaaaaaaaaaaagaagtagagacagggagacagggtctcactgtgttgcctaggccggtcttgaactcctgggctcaagtgattctcccaccttgacctcctaaattgttgggattacaggtgtgagacagtgcacctggccgaaatagctcaagtttctgaaaaacaaatctgaatctatttgttattcttagcgtcactggtctggctttcagaattaacatacaaggttgccacacctagttctgcccagctttatgtcttttattccagtattccaccaaagtttgttttcctgcattccagttctcaagtcttaagataaagattgtacttgacagtttagtatatccataaaactatttgaggtggttaaggttcttgggttcattttccttaatactttgctgaatattgtagattgtaggcaatgaaaaagtctactaaattaggaaaaccttgaataattaggtatcctaggtaagagcccctaaacatcaagcaatctgtgagtctgtaaagaaataaatattttttggattattcttatctaattccacccctgttggaagatgatttctttgttctttgcaactatggaagctgtgaaaatcatcacaagtgcctctgaaagcgagtgttaggttggttagagggtttaatattttctgcaatggtttgtaggaattttaataaatgtagtatattttctgagatgattttgtaaaagtactattttaaatatcaaatcaaccaataaattcacatttgtgttaggaacagaaaaaaaaattaaatctttgc

SEQ ID NO: 433755 - DNA, 3183 bp, Homo sapiens
tctgttttcttttagaggtcactggagagcccggtggggtgtaagtacactgcgcttataaaactctagcaggaagctagcagctgtctccaaacccagagaaggggaaacaggaatcgattaggaataaaggattataatccactttccttctgaggaaaagctgggaaccttctcattttgccttatgaaaactaagctgaatcgactgctgccaaacatctattaggcaaaattggcctcttgcccatgatttgactttccagcacagccagttctttttctcctctgcagctgattggctctggagtgtggccagaagcctctctcctgcaattaaaggagtcgggtctctaactgttgatctgtttttttcccttctgagcaatggagcttaccatctttatcctgagactggccatttacatcctgacatttcccttgtacctgctgaactttctgggcttgtggagctggatatgcaaaaaatggttcccctacttcttggtgaggttcactgtgatatacaacgaacagatggcaagcaagaagcgggagctcttcagtaacctgcaggagtttgcgggcccctccgggaaactctccctgctggaagtgggctgtggcacgggggccaacttcaagttctacccacctgggtgcagggtgacctgtattgaccccaaccccaactttgagaagtttttgatcaagagcattgcagagaaccgacacctgcagtttgagcgctttgtggtagctgccggggagaacatgcaccaggtggctgatggctctgtggatgtggtggtctgcaccctggtgctgtgctctgtgaagaaccaggagcggattctccgcgaggtgtgcagagtgctgagaccgggaggggctttctatttcatggagcatgtggcagctgagtgttcgacttggaattacttctggcaacaagtcctggatcctgcctggcaccttctgtttgatgggtgcaacctgaccagagagagctggaaggccctggagcgggccagcttctctaagctgaagctgcagcacatccaggccccactgtcctgggagttggtgcgccctcatatctatggatatgctgtgaaatagtgtgagctggcagttaagagctgaatggctcaaagaatttaaagcttcagttttacatttaaaatgctaagtgggagaagagaaaccttttttttggggggcggtttttttggtttgttgttggttttttttttttttttggcgggaagaaagagttttgctcttgttgcccaggctggagtgcaatgacgtgatctccgctcactgcaacctccacctcgcgggtttaagcgattcttctgcctcagcctccctagtagctgggattacaggtgcccaccaccatgcccagctaatttgtatttttagttgagacagggtttcactacgttggccaggctggtcttgaactcctgatctcaggcaatccacccacctcagcctcccaaagtgctgggatgacaggcgtgagcaaccgcacccagcttaaggtttttttgttttgttttgagacggagttttcgctcttgttgcccaggctggagtgcaatgctgtgatctcagcttaccacaacctccacctcccgggttcaagtgattcacctgcctcagcctcctgagtagctggtattacaggcatgcgtcaccacgccggctaattttgtacttttagtagagatggtgtttccccacgttggtcagtctggtctcaaattcctgacctcaggtgatctgcctgcctcggcctcccaaagtgctgtgattacagacgtcagccaccatgcctggcctgaaaccttttttaggtaaagttgaattccatccttaaaagtttctgttatatcctatttagccattttctattgtctcccaaagaattcacatcaaaaaaacagctttgaactcccccttcaaaggaaacagtcgactttcataattagcatctaccattatccccaaatcttattttattcattgacttgaaattttttccaattgctttttttttttttttttttaaggttaagagcagaggtttactaggccaaagaaagagaatagctctctgttgcagagaggggtcctggagaaatgggttaccccagttgtcttatttaaatggttacccatcagattttaattttatcttctctttgagagcttggtaataagaagcacttaaatcactccaaagaagactttaaaaagggagcagtgaaaaggtcttaataatttattgattgaattaagaaatactagctaattaagaatctgagtctaaacagcacagattttttctttctgcttttaaattgtgttttaaaaaaagaagtagagacagggagacagggtctcactgtgttgcctaggccggtcttgaactcctgggctcaagtgattctcccaccttgacctcctaaattgttgggattacaggtgtgagacagtgcacctggccgaaatagctcaagtttctgaaaaacaaatctgaatctatttgttattcttagcgtcactggtctggctttcagaattaacatacaaggttgccacacctagttctgcccagctttatgtcttttattccagtattccaccaaagtttgttttcctgcattccagttctcaagtcttaagataaagattgtacttgacagtttagtatatccataaaactatttgaggtggttaaggttcttgggttcattttccttaatactttgctgaatattgtagattgtaggcaatgaaaaagtctactaaattaggaaaaccttgaataattaggtatcctaggtaagagcccctaaacatcaagcaatctgtgagtctgtaaagaaataaatattttttggattattcttatctaattccacccctgttggaagatgatttctttgttctttgcaactatggaagctgtgaaaatcatcacaagtgcctctgaaagcgagtgttaggttggttagagggtttaatattttctgcaatggtttgtaggaattttaataaatgtagtatattttctgagatgattttgtaaaagtactattttaaatatcaaatcaaccaataaattcacatttgtgttaggaacagaaaaaaaaattaaatctttgc

SEQ ID NO: 433756 - DNA, 3104 bp, Homo sapiens
agagagagagagagagagagagagagagagagagagagagagagagagagagagagagagtttctgggcttgtggagctggatatgcaaaaaatggttcccctacttcttggtgaggttcactgtgatatacaacgaacagatggcaagcaagaagcgggagctcttcagtaacctgcaggagtttgcgggcccctccgggaaactctccctgctggaagtgggctgtggcacgggggccaacttcaagttctacccacctgggtgcagggtgacctgtattgaccccaaccccaactttgagaagtttttgatcaagagcattgcagagaaccgacacctgcagtttgagcgctttgtggtagctgccggggagaacatgcaccaggtggctgatggctctgtggatgtggtggtctgcaccctggtgctgtgctctgtgaagaaccaggagcggattctccgcgaggtgtgcagagtgctgagaccgggaggggctttctatttcatggagcatgtggcagctgagtgttcgacttggaattacttctggcaacaagtcctggatcctgcctggcaccttctgtttgatgggtgcaacctgaccagagagagctggaaggccctggagcgggccagcttctctaagctgaagctgcagcacatccaggccccactgtcctgggagttggtgcgccctcatatctatggatatgctgtgaaatagtgtgagctggcagttaagagctgaatggctcaaagaatttaaagcttcagttttacatttaaaatgctaagtgggagaagagaaaccttttttttggggggcggtttttttggtttgttgttggttttttttttttttttggcgggaagaaagagttttgctcttgttgcccaggctggagtgcaatgacgtgatctccgctcactgcaacctccacctcgcgggtttaagcgattcttctgcctcagcctccctagtagctgggattacaggtgcccaccaccatgcccagctaatttgtatttttagttgagacagggtttcactacgttggccaggctggtcttgaactcctgatctcaggcaatccacccacctcagcctcccaaagtgctgggatgacaggcgtgagcaaccgcacccagcttaaggtttttttgttttgttttgagacggagttttcgctcttgttgcccaggctggagtgcaatgctgtgatctcagcttaccacaacctccacctcccgggttcaagtgattcacctgcctcagcctcctgagtagctggtattacaggcatgcgtcaccacgccggctaattttgtacttttagtagagatggtgtttccccacgttggtcagtctggtctcaaattcctgacctcaggtgatctgcctgcctcggcctcccaaagtgctgtgattacagacgtcagccaccatgcctggcctgaaaccttttttaggtaaagttgaattccatccttaaaagtttctgttatatcctatttagccattttctattgtctcccaaagaattcacatcaaaaaaacagctttgaactcccccttcaaaggaaacagtcgactttcataattagcatctaccattatccccaaatcttattttattcattgacttgaaattttttccaattgctttttttttttttttttttaaggttaagagcagaggtttactaggccaaagaaagagaatagctctctgttgcagagaggggtcctggagaaatgggttaccccagttgtcttatttaaatggttacccatcagattttaattttatcttctctttgagagcttggtaataagaagcacttaaatcactccaaagaagactttaaaaagggagcagtgaaaaggtcttaataatttattgattgaattaagaaatactagctaattaagaatctgagtctaaacagcacagattttttctttctgcttttaaattgtgttttaaaaaaagagacagggggctgggcgtggtggctcacgcctgtaatcctagcactttgggaggccgaggcgggtggatcacgaggtaggagttaaagaccagcctggccaacatggcaaaaccctactaaagatacaaaaaaaaaaaaaaaattagccaggcgtggtggtgggtgcctgtaatcccaggtacttggaaggctgaggcaggagaatctcttgaacccagaaggcgaaggttgcagtgaaccgagatcatgccattgtactctagcctgggtgacaagagcaagactccgtctcaaaaaaaaaaaaaaaaaaaaaaagaagtagagacagggagacagggtctcactgtgttgcctaggccggtcttgaactcctgggctcaagtgattctcccaccttgacctcctaaattgttgggattacaggtgtgagacagtgcacctggccgaaatagctcaagtttctgaaaaacaaatctgaatctatttgttattcttagcgtcactggtctggctttcagaattaacatacaaggttgccacacctagttctgcccagctttatgtcttttattccagtattccaccaaagtttgttttcctgcattccagttctcaagtcttaagataaagattgtacttgacagtttagtatatccataaaactatttgaggtggttaaggttcttgggttcattttccttaatactttgctgaatattgtagattgtaggcaatgaaaaagtctactaaattaggaaaaccttgaataattaggtatcctaggtaagagcccctaaacatcaagcaatctgtgagtctgtaaagaaataaatattttttggattattcttatctaattccacccctgttggaagatgatttctttgttctttgcaactatggaagctgtgaaaatcatcacaagtgcctctgaaagcgagtgttaggttggttagagggtttaatattttctgcaatggtttgtaggaattttaataaatgtagtatattttctgagatgattttgtaaaagtactattttaaatatcaaatcaaccaataaattcacatttgtgttaggaacagaaaaaaaaattaaatctttgc

SEQ ID NO: 433757 - DNA, 2276 bp, Homo sapiens
cagaggtttactaggccaaagaaagagaatagctctctgttgcagagaggggtcctggagaaatgggttaccccagttgtcttatttaaatggttacccatcagattttaattttatcttctctttgagagcttggtaataagaagcacttaaatcactccaaagaagactttaaaaagggagcagtgaaaaggtcttaataatttattgattgaattaagaaatactagctaattaagaatctgagtctaaacagcacagattttttctttctgcttttaaattgtgttttaaaaaaagagacagggggcaaccgcacccagcttaaggtttttttgttttgttttgagacggagttttcgctcttgttgcccaggctggagtgcaatgctgtgatctcagcttaccacaacctccacctcccgggttcaagtgattcacctgcctcagcctcctgagtagctggtattacaggcatgcgtcaccacgccggctaattttgtacttttagtagagatggtgtttccccacgttggtcagtctggtctcaaattcctgacctcaggtgatctgcctgcctcggcctcccaaagtgctgtgattacagacgtcagccaccatgcctggcctgaaaccttttttaggtaaagttgaattccatccttaaaagtttctgttatatcctatttagccattttctattgtctcccaaagaattcacatcaaaaaaacagctttgaactcccccttcaaaggaaacagtcgactttcataattagcatctaccattatccccaaatcttattttattcattgacttgaaattttttccaattgctttttttttttttttttttaaggttaagagcagaggtttactaggccaaagaaagagaatagctctctgttgcagagaggggtcctggagaaatgggttaccccagttgtcttatttaaatggttacccatcagattttaattttatcttctctttgagagcttggtaataagaagcacttaaatcactccaaagaagactttaaaaagggagcagtgaaaaggtcttaataatttattgattgaattaagaaatactagctaattaagaatctgagtctaaacagcacagattttttctttctgcttttaaattgtgttttaaaaaaagagacagggggctgggcgtggtggctcacgcctgtaatcctagcactttgggaggccgaggcgggtggatcacgaggtaggagttaaagaccagcctggccaacatggcaaaaccctactaaagatacaaaaaaaaaaaaaaaattagccaggcgtggtggtgggtgcctgtaatcccaggtacttggaaggctgaggcaggagaatctcttgaacccagaaggcgaaggttgcagtgaaccgagatcatgccattgtactctagcctgggtgacaagagcaagactccgtctcaaaaaaaaaaaaaaaaaaaaaaagaagtagagacagggagacagggtctcactgtgttgcctaggccggtcttgaactcctgggctcaagtgattctcccaccttgacctcctaaattgttgggattacaggtgtgagacagtgcacctggccgaaatagctcaagtttctgaaaaacaaatctgaatctatttgttattcttagcgtcactggtctggctttcagaattaacatacaaggttgccacacctagttctgcccagctttatgtcttttattccagtattccaccaaagtttgttttcctgcattccagttctcaagtcttaagataaagattgtacttgacagtttagtatatccataaaactatttgaggtggttaaggttcttgggttcattttccttaatactttgctgaatattgtagattgtaggcaatgaaaaagtctactaaattaggaaaaccttgaataattaggtatcctaggtaagagcccctaaacatcaagcaatctgtgagtctgtaaagaaataaatattttttggattattcttatctaattccacccctgttggaagatgatttctttgttctttgcaactatggaagctgtgaaaatcatcacaagtgcctctgaaagcgagtgttaggttggttagagggtttaatattttctgcaatggtttgtaggaattttaataaatgtagtatattttctgagatgattttgtaaaagtactattttaaatatcaaatcaaccaataaattcacatttgtgttaggaacagaaaaaaaaattaaatctttgc

SEQ ID NO: 433758 - DNA, 2033 bp, Homo sapiens
  misc_feature (332)..(332): n is a, c, g, or t
cagaggtttactaggccaaagaaagagaatagctctctgttgcagagaggggtcctggagaaatgggttaccccagttgtcttatttaaatggttacccatcagattttaattttatcttctctttgagagcttggtaataagaagcacttaaatcactccaaagaagactttaaaaagggagcagtgaaaaggtcttaataatttattgattgaattaagaaatactagctaattaagaatctgagtctaaacagcacagattttttctttctgcttttaaattgtgttttaaaaaaagagacagggggctgggcgtggtggctcacgctngtaatcggcctcccaaagtgctgtgattacagacgtcagccaccatgcctggcctgaaaccttttttaggtaaagttgaattccatccttaaaagtttctgttatatcctatttagccattttctattgtctcccaaagaattcacatcaaaaaaacagctttgaactcccccttcaaaggaaacagtcgactttcataattagcatctaccattatccccaaatcttattttattcattgacttgaaattttttccaattgctttttttttttttttttttaaggttaagagcagaggtttactaggccaaagaaagagaatagctctctgttgcagagaggggtcctggagaaatgggttaccccagttgtcttatttaaatggttacccatcagattttaattttatcttctctttgagagcttggtaataagaagcacttaaatcactccaaagaagactttaaaaagggagcagtgaaaaggtcttaataatttattgattgaattaagaaatactagctaattaagaatctgagtctaaacagcacagattttttctttctgcttttaaattgtgttttaaaaaaagagacagggggctgggcgtggtggctcacgcctgtaatcctagcactttgggaggccgaggcgggtggatcacgaggtaggagttaaagaccagcctggccaacatggcaaaaccctactaaagatacaaaaaaaaaaaaaaaattagccaggcgtggtggtgggtgcctgtaatcccaggtacttggaaggctgaggcaggagaatctcttgaacccagaaggcgaaggttgcagtgaaccgagatcatgccattgtactctagcctgggtgacaagagcaagactccgtctcaaaaaaaaaaaaaaaaaaaaaaagaagtagagacagggagacagggtctcactgtgttgcctaggccggtcttgaactcctgggctcaagtgattctcccaccttgacctcctaaattgttgggattacaggtgtgagacagtgcacctggccgaaatagctcaagtttctgaaaaacaaatctgaatctatttgttattcttagcgtcactggtctggctttcagaattaacatacaaggttgccacacctagttctgcccagctttatgtcttttattccagtattccaccaaagtttgttttcctgcattccagttctcaagtcttaagataaagattgtacttgacagtttagtatatccataaaactatttgaggtggttaaggttcttgggttcattttccttaatactttgctgaatattgtagattgtaggcaatgaaaaagtctactaaattaggaaaaccttgaataattaggtatcctaggtaagagcccctaaacatcaagcaatctgtgagtctgtaaagaaataaatattttttggattattcttatctaattccacccctgttggaagatgatttctttgttctttgcaactatggaagctgtgaaaatcatcacaagtgcctctgaaagcgagtgttaggttggttagagggtttaatattttctgcaatggtttgtaggaattttaataaatgtagtatattttctgagatgattttgtaaaagtactattttaaatatcaaatcaaccaataaattcacatttgtgttaggaacagaaaaaaaaattaaatctttgc

SEQ ID NO: 433759 - DNA, 3052 bp, Homo sapiens
cacgcgtccgcggacgcgtgggtgagcaatggagcttaccatctttatcctgagactggccatttacatcctgacatttcccttgtacctgctgaactttctgggcttgtggagctggatatgcaaaaaatggttcccctacttcttggtgaggttcactgtgatatacaacgaacagatggcaagcaagaagcgggagctcttcagtaacctgcaggagtttgcgggcccctccgggaaactctccctgctggaagtgggctgtggcacgggggccaacttcaagttctacccacctgggtgcagggtgacctgtattgaccccaaccccaactttgagaagtttttgatcaagagcattgcagagaaccgacacctgcagtttgagcgctttgtggtagctgccggggagaacatgcaccaggtggctgatggctctgtggatgtggtggtctgcaccctggtgctgtgctctgtgaagaaccaggagcggattctccgcgaggtgtgcagagtgctgagaccgggaggggctttctatttcatggagcatgtggcagctgagtgttcgacttggaattacttctggcaacaagtcctggatcctgcctggcaccttctgtttgatgggtgcaacctgaccagagagagctggaaggccctggagcgggccagcttctctaagctgaagctgcagcacatccaggccccactgtcctgggagttggtgcgccctcatatctatggatatgctgtgaaatagtgtgagctggcagttaagagctgaatggctcaaagaatttaaagcttcagttttacatttaaaatgctaagtgggagaagagaaaccttttttttggggggcggtttttttggtttgttgttggttttttttttttttttggcgggaagaaagagttttgctcttgttgcccaggctggagtgcaatgacgtgatctccgctcactgcaacctccacctcgcgggtttaagcgattcttctgcctcagcctccctagtagctgggattacaggtgcccaccaccatgcccagctaatttgtatttttagttgagacagggtttcactacgttggccaggctggtcttgaactcctgatctcaggcaatccacccacctcagcctcccaaagtgctgggatgacaggcgtgagcaaccgcacccagcttaaggtttttttgttttgttttgagacggagttttcgctcttgttgcccaggctggagtgcaatgctgtgatctcagcttaccacaacctccacctcccgggttcaagtgattcacctgcctcagcctcctgagtagctggtattacaggcatgcgtcaccacgccggctaattttgtacttttagtagagatggtgtttccccacgttggtcagtctggtctcaaattcctgacctcaggtgatctgcctgcctcggcctcccaaagtgctgtgattacagacgtcagccaccatgcctggcctgaaaccttttttaggtaaagttgaattccatccttaaaagtttctgttatatcctatttagccattttctattgtctcccaaagaattcacatcaaaaaaacagctttgaactcccccttcaaaggaaacagtcgactttcataattagcatctaccattatccccaaatcttattttattcattgacttgaaattttttccaattgctttttttttttttttttttaaggttaagagcagaggtttactaggccaaagaaagagaatagctctctgttgcagagaggggtcctggagaaatgggttaccccagttgtcttatttaaatggttacccatcagattttaattttatcttctctttgagagcttggtaataagaagcacttaaatcactccaaagaagactttaaaaagggagcagtgaaaaggtcttaataatttattgattgaattaagaaatactagctaattaagaatctgagtctaaacagcacagattttttctttctgcttttaaattgtgttttaaaaaaagagacagggggctgggcgtggtggctcacgcctgtaatcctagcactttgggaggccgaggcgggtggatcacgaggtaggagttaaagaccagcctggccaacatggcaaaaccctactaaagatacaaaaaaaaaaaaaaaattagccaggcgtggtggtgggtgcctgtaatcccaggtacttggaaggctgaggcaggagaatctcttgaacccagaaggcgaaggttgcagtgaaccgagatcatgccattgtactctagcctgggtgacaagagcaagactccgtctcaaaaaaaaaaaaaaaaaaaaaaagaagtagagacagggagacagggtctcactgtgttgcctaggccggtcttgaactcctgggctcaagtgattctcccaccttgacctcctaaattgttgggattacaggtgtgagacagtgcacctggccgaaatagctcaagtttctgaaaaacaaatctgaatctatttgttattcttagcgtcactggtctggctttcagaattaacatacaaggttgccacacctagttctgcccagctttatgtcttttattccagtattccaccaaagtttgttttcctgcattccagttctcaagtcttaagataaagattgtacttgacagtttagtatatccataaaactatttgaggtggttaaggttcttgggttcattttccttaatactttgctgaatattgtagattgtaggcaatgaaaaagtctactaaattaggaaaaccttgaataattaggtatcctaggtaagagcccctaaacatcaagcaatctgtgagtctgtaaagaaataaatattttttggattattcttatctaattccacccctgttggaagatgatttctttgttctttgcaactatggaagctgtgaaaatcatcacaagtgcctctgaaagcgagtgttaggttggttagagggtttaatattttctgcaatggtttgtaggaattttaataaatgtagtatattttctgag

SEQ ID NO: 433760 - DNA, 1463 bp, Homo sapiens
tctgttttcttttagaggtcactggagagcccggtggggtgtaagtacactgcgcttataaaactctagcaggaagctagcagctgtctccaaacccagagaaggggaaacaggaatcgattaggaataaaggattataatccactttccttctgaggaaaagctgggaaccttctcattttgccttatgaaaactaagctgaatcgactgctgccaaacatctattaggcaaaattggcctcttgcccatgatttgactttccagcacagccagttctttttctcctctgcagctgattggctctggagtgtggccagaagcctctctcctgcaattaaaggagtcgggtctctaactgttgatctgtttttttcccttctgagcaatggagcttaccatctttatcctgagactggccatttacatcctgacatttcccttgtacctgctgaactttctgggcttgtggagctggatatgcaaaaaatggttcccctacttcttggtgaggttcactgtgatatacaacgaacagatggcaagcaagaagcaggagaatctcttgaacccagaaggcgaaggttgcagtgaaccgagatcatgccattgtactctagcctgggtgacaagagcaagactccgtctcaaaaaaaaaaaaaaaaaaaaaaagaagtagagacagggagacagggtctcactgtgttgcctaggccggtcttgaactcctgggctcaagtgattctcccaccttgacctcctaaattgttgggattacaggtgtgagacagtgcacctggccgaaatagctcaagtttctgaaaaacaaatctgaatctatttgttattcttagcgtcactggtctggctttcagaattaacatacaaggttgccacacctagttctgcccagctttatgtcttttattccagtattccaccaaagtttgttttcctgcattccagttctcaagtcttaagataaagattgtacttgacagtttagtatatccataaaactatttgaggtggttaaggttcttgggttcattttccttaatactttgctgaatattgtagattgtaggcaatgaaaaagtctactaaattaggaaaaccttgaataattaggtatcctaggtaagagcccctaaacatcaagcaatctgtgagtctgtaaagaaataaatattttttggattattcttatctaattccacccctgttggaagatgatttctttgttctttgcaactatggaagctgtgaaaatcatcacaagtgcctctgaaagcgagtgttaggttggttagagggtttaatattttctgcaatggtttgtaggaattttaataaatgtagtatattttctgagatgattttgtaaaagtactattttaaatatcaaatcaaccaataaattcacatttgtgttaggaacagaaaaaaaaattaaatctttgc

SEQ ID NO: 433761 - DNA, 886 bp, Homo sapiens
cctgtttccgaatttgactccggtacccccccccaacctggaaaaaggcccaaagagcaagactccgtctcaaaaaaaaaaaaaaaaaaaaaaagaagtagagacagggagacagggtctcactgtgttgcctaggccggtcttgaactcctgggctcaagtgattctcccaccttgacctcctaaattgttgggattacaggtgtgagacagtgcacctggccgaaatagctcaagtttctgaaaaacaaatctgaatctatttgttattcttagcgtcactggtctggctttcagaattaacatacaaggttgccacacctagttctgcccagctttatgtcttttattccagtattccaccaaagtttgttttcctgcattccagttctcaagtcttaagataaagattgtacttgacagtttagtatatccataaaactatttgaggtggttaaggttcttgggttcattttccttaatactttgctgaatattgtagattgtaggcaatgaaaaagtctactaaattaggaaaaccttgaataattaggtatcctaggtaagagcccctaaacatcaagcaatctgtgagtctgtaaagaaataaatattttttggattattcttatctaattccacccctgttggaagatgatttctttgttctttgcaactatggaagctgtgaaaatcatcacaagtgcctctgaaagcgagtgttaggttggttagagggtttaatattttctgcaatggtttgtaggaattttaataaatgtagtatattttctgagatgattttgtaaaagtactattttaaatatcaaatcaaccaataaattcacatttgtgttaggaacagaaaaaaaaattaaatctttgc

SEQ ID NO: 433762 - DNA, 2223 bp, Homo sapiens
tctgttttcttttagaggtcactggagagcccggtggggtgtaagtacactgcgcttataaaactctagcaggaagctagcagctgtctccaaacccagagaaggggaaacaggaatcgattaggaataaaggattataatccactttccttctgaggaaaagctgggaaccttctcattttgccttatgaaaactaagctgaatcgactgctgccaaacatctattaggcaaaattggcctcttgcccatgatttgactttccagcacagccagttctttttctcctctgcagctgattggctctggagtgtggccagaagcctctctcctgcaattaaaggagtcgggtctctaactgttgatctgtttttttcccttctgagcaatggagcttaccatctttatcctgagactggccatttacatcctgacatttcccttgtacctgctgaactttctgggcttgtggagctggatatgcaaaaaatggttcccctacttcttggtgaggttcactgtgatatacaacgaacagatggcaagcaagaagcgggagctcttcagtaacctgcaggagtttgcgggcccctccgggaaactctccctgctggaagtgggctgtggcacgggggccaacttcaagttctacccacctgggtgcagggtgacctgtattgaccccaaccccaactttgagaagtttttgatcaagagcattgcagagaaccgacacctgcagtttgagcgctttgtggtagctgccggggagaacatgcaccaggtggctgatggctctgtggatgtggtggtctgcaccctggtgctgtgctctgtgaagaaccaggagcggattctccgcgaggtgtgcagagtgctgagaccgggaggggctttctatttcatggagcatgtggcagctgagtgttcgacttggaattacttctggcaacaagtcctggatcctgcctggcaccttctgtttgatgggtgcaacctgaccagagagagctggaaggccctggagcgggccagcttctctaagctgaagctgcagcacatccaggccccactgtcctgggagttggtgcgccctcatatctatggatatgctgtgaaatagtgtgagctggcagttaagagctgaatggctcaaagaatttaaagcttcagttttacatttaaaatgctaagtgggagaagagaaaccttttttttggggggcggtttttttggtttgttgttggttttttttttttttttggcgggaagaaagagttttgctcttgttgcccaggctggagtgcaatgacgtgatctccgctcactgcaacctccacctcgcgggtttaagcgattcttctgcctctgcctgtaatcccaggtacttggaaggctgaggcaggagaatctcttgaacccagaaggcgaaggttgcagtgaaccgagatcatgccattgtactctagcctgggtgacaagagcaagactccgtctcaaaaaaaaaaaaaaaaaaaaaaagaagtagagacagggagacagggtctcactgtgttgcctaggccggtcttgaactcctgggctcaagtgattctcccaccttgacctcctaaattgttgggattacaggtgtgagacagtgcacctggccgaaatagctcaagtttctgaaaaacaaatctgaatctatttgttattcttagcgtcactggtctggctttcagaattaacatacaaggttgccacacctagttctgcccagctttatgtcttttattccagtattccaccaaagtttgttttcctgcattccagttctcaagtcttaagataaagattgtacttgacagtttagtatatccataaaactatttgaggtggttaaggttcttgggttcattttccttaatactttgctgaatattgtagattgtaggcaatgaaaaagtctactaaattaggaaaaccttgaataattaggtatcctaggtaagagcccctaaacatcaagcaatctgtgagtctgtaaagaaataaatattttttggattattcttatctaattccacccctgttggaagatgatttctttgttctttgcaactatggaagctgtgaaaatcatcacaagtgcctctgaaagcgagtgttaggttggttagagggtttaatattttctgcaatggtttgtaggaattttaataaatgtagtatattttctgag

SEQ ID NO: 433763 - DNA, 3141 bp, Homo sapiens
cacgcgtccgcggacgcgtgggtgagcaatggagcttaccatctttatcctgagactggccatttacatcctgacatttcccttgtacctgctgaactttctgggcttgtggagctggatatgcaaaaaatggttcccctacttcttggtgaggttcactgtgatatacaacgaacagatggcaagcaagaagcgggagctcttcagtaacctgcaggagtttgcgggcccctccgggaaactctccctgctggaagtgggctgtggcacgggggccaacttcaagttctacccacctgggtgcagggtgacctgtattgaccccaaccccaactttgagaagtttttgatcaagagcattgcagagaaccgacacctgcagtttgagcgctttgtggtagctgccggggagaacatgcaccaggtggctgatggctctgtggatgtggtggtctgcaccctggtgctgtgctctgtgaagaaccaggagcggattctccgcgaggtgtgcagagtgctgagaccgggaggggctttctatttcatggagcatgtggcagctgagtgttcgacttggaattacttctggcaacaagtcctggatcctgcctggcaccttctgtttgatgggtgcaacctgaccagagagagctggaaggccctggagcgggccagcttctctaagctgaagctgcagcacatccaggccccactgtcctgggagttggtgcgccctcatatctatggatatgctgtgaaatagtgtgagctggcagttaagagctgaatggctcaaagaatttaaagcttcagttttacatttaaaatgctaagtgggagaagagaaaccttttttttggggggcggtttttttggtttgttgttggttttttttttttttttggcgggaagaaagagttttgctcttgttgcccaggctggagtgcaatgacgtgatctccgctcactgcaacctccacctcgcgggtttaagcgattcttctgcctcagcctccctagtagctgggattacaggtgcccaccaccatgcccagctaatttgtatttttagttgagacagggtttcactacgttggccaggctggtcttgaactcctgatctcaggcaatccacccacctcagcctcccaaagtgctgggatgacaggcgtgagcaaccgcacccagcttaaggtttttttgttttgttttgagacggagttttcgctcttgttgcccaggctggagtgcaatgctgtgatctcagcttaccacaacctccacctcccgggttcaagtgattcacctgcctcagcctcctgagtagctggtattacaggcatgcgtcaccacgccggctaattttgtacttttagtagagatggtgtttccccacgttggtcagtctggtctcaaattcctgacctcaggtgatctgcctgcctcggcctcccaaagtgctgtgattacagacgtcagccaccatgcctggcctgaaaccttttttaggtaaagttgaattccatccttaaaagtttctgttatatcctatttagccattttctattgtctcccaaagaattcacatcaaaaaaacagctttgaactcccccttcaaaggaaacagtcgactttcataattagcatctaccattatccccaaatcttattttattcattgacttgaaattttttccaattgctttttttttttttttttttaaggttaagagcagaggtttactaggccaaagaaagagaatagctctctgttgcagagaggggtcctggagaaatgggttaccccagttgtcttatttaaatggttacccatcagattttaattttatcttctctttgagagcttggtaataagaagcacttaaatcactccaaagaagactttaaaaagggagcagtgaaaaggtcttaataatttattgattgaattaagaaatactagctaattaagaatctgagtctaaacagcacagattttttctttctgcttttaaattgtgttttaaaaaaagagacagggggctgggcgtggtggctcacgcctgtaatcctagcactttgggaggccgaggcgggtggatcacgaggtaggagttaaagaccagcctggccaacatggcaaaaccctactaaagatacaaaaaaaaaaaaaaaattagccaggcgtggtggtgggtgcctgtaatcccaggtacttggaaggctgaggcaggagaatctcttgaacccagaaggcgaaggttgcagtgaaccgagatcatgccattgtactctagcctgggtgacaagagcaagactccgtctcaaaaaaaaaaaaaaaaaaaaaaagaagtagagacagggagacagggtctcactgtgttgcctaggccggtcttgaactcctgggctcaagtgattctcccaccttgacctcctaaattgttgggattacaggtgtgagacagtgcacctggccgaaatagctcaagtttctgaaaaacaaatctgaatctatttgttattcttagcgtcactggtctggctttcagaattaacatacaaggttgccacacctagttctgcccagctttatgtcttttattccagtattccaccaaagtttgttttcctgcattccagttctcaagtcttaagataaagattgtacttgacagtttagtatatccataaaactatttgaggtggttaaggttcttgggttcattttccttaatactttgctgaatattgtagattgtaggcaatgaaaaagtctactaaattaggaaaaccttgaataattaggtatcctaggtaagagcccctaaacatcaagcaatctgtgagtctgtaaagaaataaatattttttggattattcttatctaattccacccctgttggaagatgatttctttgttctttgcaactatggaagctgtgaaaatcatcacaagtgcctctgaaagcgagtgttaggttggttagagggtttaatattttctgcaatggtttgtaggaattttaataaatgtagtatattttctgagatgattttgtaaaagtactattttaaatatcaaatcaaccaataaattcacatttgtgttaggaacagaaaaaaaaattaaatctttgc

SEQ ID NO: 433764 - DNA, 2095 bp, Homo sapiens
tctgttttcttttagaggtcactggagagcccggtggggtgtaagtacactgcgcttataaaactctagcaggaagctagcagctgtctccaaacccagagaaggggaaacaggaatcgattaggaataaaggattataatccactttccttctgaggaaaagctgggaaccttctcattttgccttatgaaaactaagctgaatcgactgctgccaaacatctattaggcaaaattggcctcttgcccatgatttgactttccagcacagccagttctttttctcctctgcagctgattggctctggagtgtggccagaagcctctctcctgcaattaaaggagtcgggtctctaactgttgatctgtttttttcccttctgagcaatggagcttaccatctttatcctgagactggccatttacatcctgacatttcccttgtacctgctgaactttctgggcttgtggagctggatatgcaaaaaatggttcccctacttcttggtgaggttcactgtgatatacaacgaacagatggcaagcaagaagcgggagctcttcagtaacctgcaggagtttgcgggcccctccgggaaactctccctgctggaagtgggctgtggcacgggggccaacttcaagttctacccacctgggtgcagggtgacctgtattgaccccaaccccaactttgagaagtttttgatcaagagcattgcagagaaccgacacctgcagtttgagcgctttgtggtagctgccggggagaacatgcaccaggtggctgatggctctgtggatgtggtggtctgcaccctggtgctgtgctctgtgaagaaccaggagcggattctccgcgaggtgtgcagagtgctgagaccgggaggggctttctatttcatggagcatgtggcagctgagtgttcgacttggaattacttctggcaacaagtcctggatcctgcctggcaccttctgtttgatgggtgcaacctgaccagagagagctggaaggccctggagcgggccagcttctctaagctgaagctgcagcacatccaggccccactgtcctgggagttggtgcgccctcatatctatggatatgctgtgaaatagtgtgagctggcagttaagagctgaatggctcaaagaatttaaagcttcagttttacatttaaaatgctaagtgggagaagagaaaccttttttttggggggcggtttttttggtttgttgttggttttttttttttttttggagcaagactccgtctcaaaaaaaaaaaaaaaaaaaaaaagaagtagagacagggagacagggtctcactgtgttgcctaggccggtcttgaactcctgggctcaagtgattctcccaccttgacctcctaaattgttgggattacaggtgtgagacagtgcacctggccgaaatagctcaagtttctgaaaaacaaatctgaatctatttgttattcttagcgtcactggtctggctttcagaattaacatacaaggttgccacacctagttctgcccagctttatgtcttttattccagtattccaccaaagtttgttttcctgcattccagttctcaagtcttaagataaagattgtacttgacagtttagtatatccataaaactatttgaggtggttaaggttcttgggttcattttccttaatactttgctgaatattgtagattgtaggcaatgaaaaagtctactaaattaggaaaaccttgaataattaggtatcctaggtaagagcccctaaacatcaagcaatctgtgagtctgtaaagaaataaatattttttggattattcttatctaattccacccctgttggaagatgatttctttgttctttgcaactatggaagctgtgaaaatcatcacaagtgcctctgaaagcgagtgttaggttggttagagggtttaatattttctgcaatggtttgtaggaattttaataaatgtagtatattttctgagatgattttgtaaaagtactattttaaatatcaaatcaaccaataaattcacatttgtgttaggaacagaaaaaaaaattaaatctttgc

SEQ ID NO: 433765 - DNA, 2312 bp, Homo sapiens
tctgttttcttttagaggtcactggagagcccggtggggtgtaagtacactgcgcttataaaactctagcaggaagctagcagctgtctccaaacccagagaaggggaaacaggaatcgattaggaataaaggattataatccactttccttctgaggaaaagctgggaaccttctcattttgccttatgaaaactaagctgaatcgactgctgccaaacatctattaggcaaaattggcctcttgcccatgatttgactttccagcacagccagttctttttctcctctgcagctgattggctctggagtgtggccagaagcctctctcctgcaattaaaggagtcgggtctctaactgttgatctgtttttttcccttctgagcaatggagcttaccatctttatcctgagactggccatttacatcctgacatttcccttgtacctgctgaactttctgggcttgtggagctggatatgcaaaaaatggttcccctacttcttggtgaggttcactgtgatatacaacgaacagatggcaagcaagaagcgggagctcttcagtaacctgcaggagtttgcgggcccctccgggaaactctccctgctggaagtgggctgtggcacgggggccaacttcaagttctacccacctgggtgcagggtgacctgtattgaccccaaccccaactttgagaagtttttgatcaagagcattgcagagaaccgacacctgcagtttgagcgctttgtggtagctgccggggagaacatgcaccaggtggctgatggctctgtggatgtggtggtctgcaccctggtgctgtgctctgtgaagaaccaggagcggattctccgcgaggtgtgcagagtgctgagaccgggaggggctttctatttcatggagcatgtggcagctgagtgttcgacttggaattacttctggcaacaagtcctggatcctgcctggcaccttctgtttgatgggtgcaacctgaccagagagagctggaaggccctggagcgggccagcttctctaagctgaagctgcagcacatccaggccccactgtcctgggagttggtgcgccctcatatctatggatatgctgtgaaatagtgtgagctggcagttaagagctgaatggctcaaagaatttaaagcttcagttttacatttaaaatgctaagtgggagaagagaaaccttttttttggggggcggtttttttggtttgttgttggttttttttttttttttggcgggaagaaagagttttgctcttgttgcccaggctggagtgcaatgacgtgatctccgctcactgcaacctccacctcgcgggtttaagcgattcttctgcctctgcctgtaatcccaggtacttggaaggctgaggcaggagaatctcttgaacccagaaggcgaaggttgcagtgaaccgagatcatgccattgtactctagcctgggtgacaagagcaagactccgtctcaaaaaaaaaaaaaaaaaaaaaaagaagtagagacagggagacagggtctcactgtgttgcctaggccggtcttgaactcctgggctcaagtgattctcccaccttgacctcctaaattgttgggattacaggtgtgagacagtgcacctggccgaaatagctcaagtttctgaaaaacaaatctgaatctatttgttattcttagcgtcactggtctggctttcagaattaacatacaaggttgccacacctagttctgcccagctttatgtcttttattccagtattccaccaaagtttgttttcctgcattccagttctcaagtcttaagataaagattgtacttgacagtttagtatatccataaaactatttgaggtggttaaggttcttgggttcattttccttaatactttgctgaatattgtagattgtaggcaatgaaaaagtctactaaattaggaaaaccttgaataattaggtatcctaggtaagagcccctaaacatcaagcaatctgtgagtctgtaaagaaataaatattttttggattattcttatctaattccacccctgttggaagatgatttctttgttctttgcaactatggaagctgtgaaaatcatcacaagtgcctctgaaagcgagtgttaggttggttagagggtttaatattttctgcaatggtttgtaggaattttaataaatgtagtatattttctgagatgattttgtaaaagtactattttaaatatcaaatcaaccaataaattcacatttgtgttaggaacagaaaaaaaaattaaatctttgc

SEQ ID NO: 433766 - DNA, 2175 bp, Homo sapiens
tctgttttcttttagaggtcactggagagcccggtggggtgtaagtacactgcgcttataaaactctagcaggaagctagcagctgtctccaaacccagagaaggggaaacaggaatcgattaggaataaaggattataatccactttccttctgaggaaaagctgggaaccttctcattttgccttatgaaaactaagctgaatcgactgctgccaaacatctattaggcaaaattggcctcttgcccatgatttgactttccagcacagccagttctttttctcctctgcagctgattggctctggagtgtggccagaagcctctctcctgcaattaaaggagtcgggtctctaactgttgatctgtttttttcccttctgagcaatggagcttaccatctttatcctgagactggccatttacatcctgacatttcccttgtacctgctgaactttctgggcttgtggagctggatatgcaaaaaatggttcccctacttcttggtgaggttcactgtgatatacaacgaacagatggcaagcaagaagcgggagctcttcagtaacctgcaggagtttgcgggcccctccgggaaactctccctgctggaagtgggctgtggcacgggggccaacttcaagttctacccacctgggtgcagggtgacctgtattgaccccaaccccaactttgagaagtttttgatcaagagcattgcagagaaccgacacctgcagtttgagcgctttgtggtagctgccggggagaacatgcaccaggtggctgatggctctgtggatgtggtggtctgcaccctggtgctgtgctctgtgaagaaccaggagcggattctccgcgaggtgtgcagagtgctgagaccgggaggggctttctatttcatggagcatgtggcagctgagtgttcgacttggaattacttctggcaacaagtcctggatcctgcctggcaccttctgtttgatgggtgcaacctgaccagagagagctggaaggccctggagcgggccagcttctctaagctgaagctgcagcacatccaggccccactgtcctgggagttggtgcgccctcatatctatggatatgctgtgaaatagtgtgagctggcagttaagagctgaatggctcaaagaatttaaagcttcagttttacatttaaaatgctaagtgggagaagagaaaccttttttttggggggcggtttttttggtttgttgttggttttttttttttttttggcaggagaatctcttgaacccagaaggcgaaggttgcagtgaaccgagatcatgccattgtactctagcctgggtgacaagagcaagactccgtctcaaaaaaaaaaaaaaaaaaaaaaagaagtagagacagggagacagggtctcactgtgttgcctaggccggtcttgaactcctgggctcaagtgattctcccaccttgacctcctaaattgttgggattacaggtgtgagacagtgcacctggccgaaatagctcaagtttctgaaaaacaaatctgaatctatttgttattcttagcgtcactggtctggctttcagaattaacatacaaggttgccacacctagttctgcccagctttatgtcttttattccagtattccaccaaagtttgttttcctgcattccagttctcaagtcttaagataaagattgtacttgacagtttagtatatccataaaactatttgaggtggttaaggttcttgggttcattttccttaatactttgctgaatattgtagattgtaggcaatgaaaaagtctactaaattaggaaaaccttgaataattaggtatcctaggtaagagcccctaaacatcaagcaatctgtgagtctgtaaagaaataaatattttttggattattcttatctaattccacccctgttggaagatgatttctttgttctttgcaactatggaagctgtgaaaatcatcacaagtgcctctgaaagcgagtgttaggttggttagagggtttaatattttctgcaatggtttgtaggaattttaataaatgtagtatattttctgagatgattttgtaaaagtactattttaaatatcaaatcaaccaataaattcacatttgtgttaggaacagaaaaaaaaattaaatctttgc

SEQ ID NO: 433767 - DNA, 2018 bp, Homo sapiens
tctgttttcttttagaggtcactggagagcccggtggggtgtaagtacactgcgcttataaaactctagcaggaagctagcagctgtctccaaacccagagaaggggaaacaggaatcgattaggaataaaggattataatccactttccttctgaggaaaagctgggaaccttctcattttgccttatgaaaactaagctgaatcgactgctgccaaacatctattaggcaaaattggcctcttgcccatgatttgactttccagcacagccagttctttttctcctctgcagctgattggctctggagtgtggccagaagcctctctcctgcaattaaaggagtcgggtctctaactgttgatctgtttttttcccttctgagcaatggagcttaccatctttatcctgagactggccatttacatcctgacatttcccttgtacctgctgaactttctgggcttgtggagctggatatgcaaaaaatggttcccctacttcttggtgaggttcactgtgatatacaacgaacagatggcaagcaagaagcgggagctcttcagtaacctgcaggagtttgcgggcccctccgggaaactctccctgctggaagtgggctgtggcacgggggccaacttcaagttctacccacctgggtgcagggtgacctgtattgaccccaaccccaactttgagaagtttttgatcaagagcattgcagagaaccgacacctgcagtttgagcgctttgtggtagctgccggggagaacatgcaccaggtggctgatggctctgtggatgtggtggtctgcaccctggtgctgtgctctgtgaagaaccaggagcggattctccgcgaggtgtgcagagtgctgagaccgggaggggctttctatttcatggagcatgtggcagctgagtgttcgacttggaattacttctggcaacaagtcctggatcctgcctggcaccttctgtttgatgggtgcaacctgaccagagagagctggaaggccctggagcgggccagcttctctaagctgaagctgcagcacatccaggccccactgtcctgggagttggtgcgccctcatatctatggatatgctgtgaaatagtgtgagctggcagttaagagctgaatggctcaaagaatttaaagcttcagttttacatttaaaagagcaagactccgtctcaaaaaaaaaaaaaaaaaaaaaaagaagtagagacagggagacagggtctcactgtgttgcctaggccggtcttgaactcctgggctcaagtgattctcccaccttgacctcctaaattgttgggattacaggtgtgagacagtgcacctggccgaaatagctcaagtttctgaaaaacaaatctgaatctatttgttattcttagcgtcactggtctggctttcagaattaacatacaaggttgccacacctagttctgcccagctttatgtcttttattccagtattccaccaaagtttgttttcctgcattccagttctcaagtcttaagataaagattgtacttgacagtttagtatatccataaaactatttgaggtggttaaggttcttgggttcattttccttaatactttgctgaatattgtagattgtaggcaatgaaaaagtctactaaattaggaaaaccttgaataattaggtatcctaggtaagagcccctaaacatcaagcaatctgtgagtctgtaaagaaataaatattttttggattattcttatctaattccacccctgttggaagatgatttctttgttctttgcaactatggaagctgtgaaaatcatcacaagtgcctctgaaagcgagtgttaggttggttagagggtttaatattttctgcaatggtttgtaggaattttaataaatgtagtatattttctgagatgattttgtaaaagtactattttaaatatcaaatcaaccaataaattcacatttgtgttaggaacagaaaaaaaaattaaatctttgc

SEQ ID NO: 433768 - DNA, 2420 bp, Homo sapiens
cacgcgtccgcggacgcgtgggtgagcaatggagcttaccatctttatcctgagactggccatttacatcctgacatttcccttgtacctgctgaactttctgggcttgtggagctggatatgcaaaaaatggttcccctacttcttggtgaggttcactgtgatatacaacgaacagatggcaagcaagaagcgggagctcttcagtaacctgcaggagtttgcgggcccctccgggaaactctccctgctggaagtgggctgtggcacgggggccaacttcaagttctacccacctgggtgcagggtgacctgtattgaccccaaccccaactttgagaagtttttgatcaagagcattgcagagaaccgacacctgcagtttgagcgctttgtggtagctgccggggagaacatgcaccaggtggctgatggctctgtggatgtggtggtctgcaccctggtgctgtgctctgtgaagaaccaggagcggattctccgcgaggtgtgcagagtgctgagaccgggaggggctttctatttcatggagcatgtggcagctgagtgttcgacttggaattacttctggcaacaagtcctggatcctgcctggcaccttctgtttgatgggtgcaacctgaccagagagagctggaaggccctggagcgggccagcttctctaagctgaagctgcagcacatccaggccccactgtcctgggagttggtgcgccctcatatctatggatatgctgtgaaatagtgtgagctggcagttaagagctgaatggctcaaagaatttaaagcttcagttttacatttaaaatgctaagtgggagaagagaaaccttttttttggggggcggtttttttggtttgttgttggttttttttttttttttggcgggaagaaagagttttgctcttgttgcccaggctggagtgcaatgacgtgatctccgctcactgcaacctccacctcgcgggtttaagcgattcttctgcctcagcctccctagtagctgggattacaggtgcccaccaccatgcccagctaatttgtatttttagttgagacagggtttcactacgttggccaggctggtcttgaactcctgatctcaggcaatccacccacctcagcctcccaaagtgctgggatgacaggcgtgagcaaccgcacccagcttaaggtttttttgttttgttttgagacggagttttcgctcttgttgcccaggctggagtgcaatgctgtgatctcagcttaccacaacctccacctcccgggttcaagtgattcacctgcctcagcctcctgagtagctggtattacaggcatgcgtcaccacgccggctaattttgtacttttagtagagatggtgtttccccacgttggtcagtctggtctcaaattcctgacctcaggtgatctgcctgcctcggcctcccaaagtgctgtgattacagacgtcagccaccatgcctggcctgaaaccttttttaggtaaagttgaattccatccttaaaagtttctgttatatcctatttagccattttctattgtctcccaaagaattcacatcaaaaaaacagctttgaactcccccttcaaaggaaacagtcgactttcataattagcatctaccattatccccaaatcttattttattcattgacttgaaattttttccaattgctttttttttttttttttttaaggttaagagcagaggtttactaggccaaagaaagagaatagctctctgttgcagagaggggtcctggagaaatgggttaccccagttgtcttatttaaatggttacccatcagattttaattttatcttctctttgagagcttggtaataagaagcacttaaatcactccaaagaagactttaaaaagggagcagtgaaaaggtcttaataatttattgattgaattaagaaatactagctaattaagaatctgagtctaaacagcacagattttttctttctgcttttaaattgtgttttaaaaaaagagacagggggctgggcgtggtggctcacgcctgtaatcctagcactttgggaggccgaggcgggtggatcacgaggtaggagttaaagaccagcctggccaacatggcaaaaccctactaaagatacaaaaaaaaaaaaaaaaaaaaaaaaaagtatatacacctaacaagagagccccaaaatgtatgaagcaaaaactgacagaactgaagggacaaatagacaattcaatagtaatatttggagacttcaatatcccactttcaataatgaataggacaactaagcaaaagattaacaagaacactgaagacctgaaaagcactataaacaaaactataagctaactagacagaacacacatctacagaacaaaaactccaacc

SEQ ID NO: 433769 - DNA, 456 bp, Homo sapiens
actagtccacggtttggcttatattttttaaaaatcaaaagccaatgaacaacaggatatatagacgataaatatttaggctgaatagtattttaacacttgtcttcaacttgatttgtctgtttaattgaaaagaattataagagttactgttgcattttctgacctactatttttaaaattcctgttgagtttctttgtgtttacaaggaaaggactgaactttttctcatcaaaactagccaaccgggactagttatagctgcgaactggtgttgcaagctgggctttccccaggttttaatttccagtgtacatctcagtcccctcccctaaccctcaacacagcctggggaaagcccagcttgcaacaccagttctcagcccagactgacagccagatagatcttggccctgagtttgccaattaaagatgccgtgattattacctagagg

SEQ ID NO: 433770 - DNA, 3434 bp, Homo sapiens
aattgcgcaggggcaaaggtcgaggggtcgcgctgccgccgttttatttgaagacatcgtccagttctgaccatggactcgcagccatcggcccttagtttccatcccctctagtgggccttcgggggctctactgacgtccctccttcccttggtaccgggccggggaagtgttctcgggcgcgggaggttccgcatgcccaggcctggccaggggagatgaccgatccgtcgctggggctgacagtccccatggcgccgcctctggccccgctccctccccgggacccaaacggggcgggatccgagtggagaaagcccggggccgtgagcttcgccgacgtggccgtgtacttctcccgggaggagtggggctgcctgcggcccgcgcagagggccctgtaccgggacgtgatgcgggagacctacggccacctgggcgcgctcggtgagagccccacctgcttgcctgggccctgcgcctccacaggccctgccgcgcctctgggagctgcgtgtggagttgggggccccggggccgggcaggcggcctcctcgcagcgtggggtttgcgttcttctcccccaggagtcggaggcagcaagccggcgctcatctcctgggtggaggagaaggccgaactgtgggatccggctgcccaggatccggaggtggcgaagtgtccgacagaagcggacccagcagattccagaaacaaggaagaggaaagacaaagggaagggacgggagccctggagaagcccgaccctgtggccgccgggtctcctgggctgaaggctccccaagccccctttgccgggttggagcagctgtccaaggcccggcgccggagtcgcccccgcttttttgcccacccccctgtcccccgagctgaccagcgtcacggctgctacgtgtgcgggaagagcttcgcctggcgctccacactggtggagcacatttacagccacaggggcgagaagcccttccactgcgcagactgcggcaagggcttcggccacgcttcctccctgagcaaacaccgggccatccatcgtggggagcggccccaccgctgtcccgagtgtggtcgggccttcatgcgccgcacggcgctgacttctcacctgcgcgttcacactggcgagaagccctaccgctgcccgcagtgtggccgctgcttcggcctgaagaccggcatggccaagcaccaatgggtccatcggcccgggggcgaggggcgtaggggccggcgccctggggggctgtctgtgaccctgactcctgtccgcggggacctggacccgcctgtgggcttccagctgtatccagagatattccaggaatgtgggtgacggcctaaaaagtgaccatctagacattgtgggcggcccgagatgggctcaggggcccgaacctctgcagcggcctgcagggaggtcccagaatccaccgcaagagctggcctggggtgcggacagtctgatcttgggctctcagcagcctcttctgccagcaccttgctccccgctgccctgggctctccaaggccccctttgctgaggcagggctgaggtgagaaccccccagacctccatacagggaagcaaaagctgtttctcctcccagagatgctaagaggattgaggtagagaagaaccttgttttctctgttgtctttttctttttacttttttaattttttgagacggagttttgctcttgttgcccaggctggagtgcaatggtgcgatctcgactcactgcaacttccacctcctggagtcaagcgattctcctgcctcagccacccaagtagctggaattacaggcacctgccactatgcccggctaactttttgtatttttagtagagatggggtttcaccatgttggctaggctggtctcgaactcctgccctcaggtgatccacccacctctgcctcccaaagtgctgggattacaggcgtgagccacctcacctggccttttcttttttattctttgaccttcccacaagacaatacccattgtctgttttttttgtttatttatttacttattaagacagcatcttgctcctcacccaggctggaatgcagtggtgtgaactgggctcactgcagcctagacctgctgggctcaaggaatcctcctgccccagcctctcagatggctgtgactacaggtgggcaacactatgcctggctaatttttaaatttttttgcagagatggggttcccactatgttgatcaggctggtctcaaactcctcggttcaagcaattcgcccaccttggcctcccaaagtgctgggattacaggggagccactgcactggccttcattgtctttttgctgcacaacctaaaaaaccagtgaccctgtattggatctcgcctgcagttgctgtattgatttgggcccaggcagtgtttttaagtgataagaattagtgatgaagatctaaagggatattttgcaccaaaatccaggtttctggcatctcttgaaaaatccaaagatttcgcaagttcacctaggctctcagaaagtcgcagttgttgggagttgggccggagccagaactcccaacttactgtggtccggccactcatcccatcagctcctgaccaagcatgagtagccattcatcatggcttgcttttagtgtttttggtgtttatcttaaagtacagcaaagaagaaagggaagtatttcttgaacccatgtctgtgtcatatgtgccatcatgggcagagggggctaggccaggaacacctggtgttagatttgtagccagtggcaaccgtacccatctgtatccccaagttctacacggaatccctccagcacttcacgactccattatccagctaccactaattcctttgtgggcagagtccagccacgggcagcccctgccctgcctctggtcaggacaacacctgcccaaggagagcaagggcctgtgacctctgctggcctgtgcgccctcacctgtcacccagctcagccctgtgtctggcctacccagggaggaaggaaccagatttatcagcctgaaaggaggtagaagttttggagaaaagacactgttcgggtgtcaagtaatgaactgactttattcgaacctcatctccaatccaatcccaccgtggtctctctctccctcagcttttctggggcgggttgactcgtgtgtcactttatcacaggggcacatggggtgagaagaggaaccttggcagtaggagatacctttgtaccaggttttaatttccagtgtacatctcagtcccctcccctaaccctcaacacagcctggggaaagcccagcttgcaacaccagttctcagcccagactgacagccagatagatcttggccctgagtttgccaattaaagatgccgtgattattacctagagg

SEQ ID NO: 433771 - DNA, 2795 bp, Homo sapiens
aattgcgcaggggcaaaggtcgaggggtcgcgctgccgccgttttatttgaagacatcgtccagttctgaccatggactcgcagccatcggcccttagtttccatcccctctagtgggccttcgggggctctactgacgtccctccttcccttggtaccgggccggggaagtgttctcgggcgcgggaggttccgcatgcccaggcctggccaggggagatgaccgatccgtcgctggggctgacagtccccatggcgccgcctctggccccgctccctccccgggacccaaacggggcgggatccgagtggagaaagcccggggccgtgagcttcgccgacgtggccgtgtacttctcccgggaggagtggggctgcctgcggcccgcgcagagggccctgtaccgggacgtgatgcgggagacctacggccacctgggcgcgctcggtgagagccccacctgcttgcctgggccctgcgcctccacaggccctgccgcgcctctgggagctgcgtgtggagttgggggccccggggccgggcaggcggcctcctcgcagcgtggggtttgcgttcttctcccccaggagtcggaggcagcaagccggcgctcatctcctgggtggaggagaaggccgaactgtgggatccggctgcccaggatccggaggtggcgaagtgtccgacagaagcggacccagcagattccagaaacaaggaagaggaaagacaaagggaagggacgggagccctggagaagcccgaccctgtggccgccgggtctcctgggctgaaggctccccaagccccctttgccgggttggagcagctgtccaaggcccggcgccggagtcgcccccgcttttttgcccacccccctgtcccccgagctgaccagcgtcacggctgctacgtgtgcgggaagagcttcgcctggcgctccacactggtggagcacatttacagccacaggggcgagaagcccttccactgcgcagactgcggcaagggcttcggccacgcttcctccctgagcaaacaccgggccatccatcgtggggagcggccccaccgctgtcccgagtgtggtcgggccttcatgcgccgcacggcgctgacttctcacctgcgcgttcacactggcgagaagccctaccgctgcccgcagtgtggccgctgcttcggcctgaagaccggcatggccaagcaccaatgggtccatcggcccgggggcgaggggcgtaggggccggcgccctggggggctgtctgtgaccctgactcctgtccgcggggacctggacccgcctgtgggcttccagctgtatccagagatattccaggaatgtgggtgacggcctaaaaagtgaccatctagacattgtgggcggcccgagatgggctcaggggcccgaacctctgcagcggcctgcagggaggtcccagaatccaccgcaagagctggcctggggtgcggacagtctgatcttgggctctcagcagcctcttctgccagcaccttgctccccgctgccctgggctctccaaggccccctttgctgaggcagggctgaggtgagaaccccccagacctccatacagggaagcaaaagctgtttctcctcccagagatgctaagaggattgaggtagagaagaaccttgttttctctgttgtctttttctttttacttttttaattttttgagacggagttttgctcttgttgcccaggctggagtgcaatggtgcgatctcgactcactgcaacttccacctcctggagtcaagcgattctcctgcctcagccacccaagtagctggaattacaggcacctgccactatgcccggctaactttttgtatttttagtagagatggggtttcaccatgttggctaggctggtctcgaactcctgccctcaggtgatccacccacctctgcctcccaaagtgctgggattacaggcgtgagccacctcacctggccttttcttttttattctttgaccttcccacaagacaatacccattgtctgttttttttgtttatttatttacttattaagacagcatcttgctcctcacccaggctggaatgcagtggtgtgaactgggctcactgcagcctagacctgctgggctcaaggaatcctcctgccccagcctctcagatggctgtgactacaggtgggcaacactatgcctggctaatttttaaatttttttgcagagatggggttcccactatgttgatcaggctggtctcaaactcctcggttcaagcaattcgcccaccttggcctcccaaagtgctgggattacaggggagccactgcactggccttcattgtctttttgctgcacaacctaaaaaaccagtgaccctgtattggatctcgcctgcagttgctgtattgatttgggcccaggcagtgtttttaagtgataagaattagtgatgaagatctaaagggatattttgcaccaaaatccaggtttctggcatctcttgaaaaatccaaagatttcgcaagttcacctaggctctcagaaagtcgcagttgttgggagttgggccggagccagaactcccaacttactgtggtccggccactcatcccatcagctcctgaccaagcatgagtagccattcatcatggcttgcttttagtgtttttggtgtttatcttaaagtacagcaaagaagaaagggaagtatttcttgaacccatgtctgtgtcaaaaccaggggggggggcccggtacccaaattccccctttggcgggacgttt

SEQ ID NO: 433772 - DNA, 3381 bp, Homo sapiens
aattgcgcaggggcaaaggtcgaggggtcgcgctgccgccgttttatttgaagacatcgtccagttctgaccatggactcgcagccatcggcccttagtttccatcccctctagtgggccttcgggggctctactgacgtccctccttcccttggtaccgggccggggaagtgttctcgggcgcgggaggttccgcatgcccaggcctggccaggggagatgaccgatccgtcgctggggctgacagtccccatggcgccgcctctggccccgctccctccccgggacccaaacggggcgggatccgagtggagaaagcccggggccgtgagcttcgccgacgtggccgtgtacttctcccgggaggagtggggctgcctgcggcccgcgcagagggccctgtaccgggacgtgatgcgggagacctacggccacctgggcgcgctcggtgagagccccacctgcttgcctgggccctgcgcctccacaggccctgccgcgcctctgggagctgcgtgtggagttgggggccccggggccgggcaggcggcctcctcgcagcgtggggtttgcgttcttctcccccaggagtcggaggcagcaagccggcgctcatctcctgggtggaggagaaggccgaactgtgggatccggctgcccaggatccggaggtggcgaagtgtccgacagaagcggacccagcagattccagaaacaaggaagaggaaagacaaagggaagggacgggagccctggagaagcccgaccctgtggccgccgggtctcctgggctgaaggctccccaagccccctttgccgggttggagcagctgtccaaggcccggcgccggagtcgcccccgcttttttgcccacccccctgtcccccgagctgaccagcgtcacggctgctacgtgtgcgggaagagcttcgcctggcgctccacactggtggagcacatttacagccacaggggcgagaagcccttccactgcgcagactgcggcaagggcttcggccacgcttcctccctgagcaaacaccgggccatccatcgtggggagcggccccaccgctgtcccgagtgtggtcgggccttcatgcgccgcacggcgctgacttctcacctgcgcgttcacactggcgagaagccctaccgctgcccgcagtgtggccgctgcttcggcctgaagaccggcatggccaagcaccaatgggtccatcggcccgggggcgaggggcgtaggggccggcgccctggggggctgtctgtgaccctgactcctgtccgcggggacctggacccgcctgtgggcttccagctgtatccagagatattccaggaatgtgggtgacggcctaaaaagtgaccatctagacattgtgggcggcccgagatgggctcaggggcccgaacctctgcagcggcctgcagggaggtcccagaatccaccgcaagagctggcctggggtgcggacagtctgatcttgggctctcagcagcctcttctgccagcaccttgctccccgctgccctgggctctccaaggccccctttgctgaggcagggctgaggtgagaaccccccagacctccatacagggaagcttgttttctctgttgtctttttctttttacttttttaattttttgagacggagttttgctcttgttgcccaggctggagtgcaatggtgcgatctcgactcactgcaacttccacctcctggagtcaagcgattctcctgcctcagccacccaagtagctggaattacaggcacctgccactatgcccggctaactttttgtatttttagtagagatggggtttcaccatgttggctaggctggtctcgaactcctgccctcaggtgatccacccacctctgcctcccaaagtgctgggattacaggcgtgagccacctcacctggccttttcttttttattctttgaccttcccacaagacaatacccattgtctgttttttttgtttatttatttacttattaagacagcatcttgctcctcacccaggctggaatgcagtggtgtgaactgggctcactgcagcctagacctgctgggctcaaggaatcctcctgccccagcctctcagatggctgtgactacaggtgggcaacactatgcctggctaatttttaaatttttttgcagagatggggttcccactatgttgatcaggctggtctcaaactcctcggttcaagcaattcgcccaccttggcctcccaaagtgctgggattacaggggagccactgcactggccttcattgtctttttgctgcacaacctaaaaaaccagtgaccctgtattggatctcgcctgcagttgctgtattgatttgggcccaggcagtgtttttaagtgataagaattagtgatgaagatctaaagggatattttgcaccaaaatccaggtttctggcatctcttgaaaaatccaaagatttcgcaagttcacctaggctctcagaaagtcgcagttgttgggagttgggccggagccagaactcccaacttactgtggtccggccactcatcccatcagctcctgaccaagcatgagtagccattcatcatggcttgcttttagtgtttttggtgtttatcttaaagtacagcaaagaagaaagggaagtatttcttgaacccatgtctgtgtcatatgtgccatcatgggcagagggggctaggccaggaacacctggtgttagatttgtagccagtggcaaccgtacccatctgtatccccaagttctacacggaatccctccagcacttcacgactccattatccagctaccactaattcctttgtgggcagagtccagccacgggcagcccctgccctgcctctggtcaggacaacacctgcccaaggagagcaagggcctgtgacctctgctggcctgtgcgccctcacctgtcacccagctcagccctgtgtctggcctacccagggaggaaggaaccagatttatcagcctgaaaggaggtagaagttttggagaaaagacactgttcgggtgtcaagtaatgaactgactttattcgaacctcatctccaatccaatcccaccgtggtctctctctccctcagcttttctggggcgggttgactcgtgtgtcactttatcacaggggcacatggggtgagaagaggaaccttggcagtaggagatacctttgtaccaggttttaatttccagtgtacatctcagtcccctcccctaaccctcaacacagcctggggaaagcccagcttgcaacaccagttctcagcccagactgacagccagatagatcttggccctgagtttgccaattaaagatgccgtgattattacctagagg

SEQ ID NO: 433773 - DNA, 904 bp, Homo sapiens
ggagccactgcactggccttcattgtctttttgctgcacaacctaaaaaaccagtgaccctgtattggatctcgcctgcagttgctgtattgatttgggcccaggcagtgtttttaagtgataagaattagtgatgaagatctaaagggatattttgcaccaaaatccaggtttctggcatctcttgaaaaatccaaagatttcgcaagttcacctaggctctcagaaagtcgcagttgttgggagttgggccggagccagaactcccaacttactgtggtccggccactcatcccatcagctcctgaccaagcatgagtagccattcatcatggcttgcttttagtgtttttggtgtttatcttaaagtacagcaaagaagaaagggaagtatttcttgaacccatgtctgtgtcaaaacagtccttgcatctttcctgtctttaggtacgcaccatctttgctgtctttaagtatgtgccatcatgggcagagggggctaggccaggaacacctggtgttagatttgtagccagtggcaaccgtacccatctgtatccccaagttctacacggaatccctccagcacttcacgactccattatccagctaccactaattcctttgtgggcagagtccagccacgggcagcccctgccctgcctctggtcaggacaacacctgcccaaggagagcaagggcctgtgacctctgctggcctgtgcgccctcacctgtcacccagctcagccctgtgtctggcctacccagggaggaaggaaccagatttatcagcctgaaaggaggtagaagttttggagaaaagacactgttcgggtgtcaagtaatgaactgactttattcgaacctcatctccaatccaatcccaccgtggtctctctctc

SEQ ID NO: 433774 - DNA, 3380 bp, Homo sapiens
aattgcgcaggggcaaaggtcgaggggtcgcgctgccgccgttttatttgaagacatcgtccagttctgaccatggactcgcagccatcggcccttagtttccatcccctctagtgggccttcgggggctctactgacgtccctccttcccttggtaccgggccggggaagtgttctcgggcgcgggaggttccgcatgcccaggcctggccaggggagatgaccgatccgtcgctggggctgacagtccccatggcgccgcctctggccccgctccctccccgggacccaaacggggcgggatccgagtggagaaagcccggggccgtgagcttcgccgacgtggccgtgtacttctcccgggaggagtggggctgcctgcggcccgcgcagagggccctgtaccgggacgtgatgcgggagacctacggccacctgggcgcgctcggtgagagccccacctgcttgcctgggccctgcgcctccacaggccctgccgcgcctctgggagctgcgtgtggagttgggggccccggggccgggcaggcggcctcctcgcagcgtggggtttgcgttcttctcccccaggagtcggaggcagcaagccggcgctcatctcctgggtggaggagaaggccgaactgtgggatccggctgcccaggatccggaggtggcgaagtgtccgacagaagcggacccagcagattccagaaacaaggaagaggaaagacaaagggaagggacgggagccctggagaagcccgaccctgtggccgccgggtctcctgggctgaaggctccccaagccccctttgccgggttggagcagctgtccaaggcccggcgccggagtcgcccccgcttttttgcccacccccctgtcccccgagctgaccagcgtcacggctgctacgtgtgcgggaagagcttcgcctggcgctccacactggtggagcacatttacagccacaggggcgagaagcccttccactgcgcagactgcggcaagggcttcggccacgcttcctccctgagcaaacaccgggccatccatcgtggggagcggccccaccgctgtcccgagtgtggtcgggccttcatgcgccgcacggcgctgacttctcacctgcgcgttcacactggcgagaagccctaccgctgcccgcagtgtggccgctgcttcggcctgaagaccggcatggccaagcaccaatgggtccatcggcccgggggcgaggggcgtaggggccggcgccctggggggctgtctgtgaccctgactcctgtccgcggggacctggacccgcctgtgggcttccagctgtatccagagatattccaggaatgtgggtgacggcctaaaaagtgaccatctagacattgtgggcggcccgagatgggctcaggggcccgaacctctgcagcggcctgcagggaggtcccagaatccaccgcaagagctggcctggggtgcggacagtctgatcttgggctctcagcagcctcttctgccagcaccttgctccccgctgccctgggctctccaaggccccctttgctgaggcagggctgaggtgagaaccccccagacctccatacagggaagcaaaagctgtttctcctcccagagatgctaagaggattgaggtagagaagaaccttgttttctctgttgtctttttctttttacttttttaattttttgagacggagttttgctcttgttgcccaggctggagtgcaatggtgcgatctcgactcactgcaacttccacctcctggagtcaagcgattctcctgcctcagccacccaagtagctggaattacaggcacctgccactatgcccggctaactttttgtatttttagtagagatggggtttcaccatgttggctaggctggtctcgaactcctgccctcaggtgatccacccacctctgcctcccaaagtgctgggattacaggcgtgagccacctcacctggccttttcttttttattctttgaccttcccacaagacaatacccattgtctgttttttttgtttatttatttacttattaagacagcatcttgctcctcacccaggctggaatgcagtggtgtgaactgggctcactgcagcctagacctgctgggctcaaggaatcctcctgccccagcctctcagatggctgtgactacaggtgggcaacactatgcctggctaatttttaaatttttttgcagagatggggttcccactatgttgatcaggctggtctcaaactcctcggttcaagcaattcgcccaccttggcctcccaaagtgctgggattacaggggagccactgcactggccttcattgtctttttgctgcacaacctaaaaaaccagtgaccctgtattggatctcgcctgcagttgctgtattgatttgggcccaggcagtgtttttaagtgataagaattagtgatgaagatctaaagggatattttgcaccaaaatccaggtttctggcatctcttgaggagttgggccggagccagaactcccaacttactgtggtccggccactcatcccatcagctcctgaccaagcatgagtagccattcatcatggcttgcttttagtgtttttggtgtttatcttaaagtacagcaaagaagaaagggaagtatttcttgaacccatgtctgtgtcatatgtgccatcatgggcagagggggctaggccaggaacacctggtgttagatttgtagccagtggcaaccgtacccatctgtatccccaagttctacacggaatccctccagcacttcacgactccattatccagctaccactaattcctttgtgggcagagtccagccacgggcagcccctgccctgcctctggtcaggacaacacctgcccaaggagagcaagggcctgtgacctctgctggcctgtgcgccctcacctgtcacccagctcagccctgtgtctggcctacccagggaggaaggaaccagatttatcagcctgaaaggaggtagaagttttggagaaaagacactgttcgggtgtcaagtaatgaactgactttattcgaacctcatctccaatccaatcccaccgtggtctctctctccctcagcttttctggggcgggttgactcgtgtgtcactttatcacaggggcacatggggtgagaagaggaaccttggcagtaggagatacctttgtaccaggttttaatttccagtgtacatctcagtcccctcccctaaccctcaacacagcctggggaaagcccagcttgcaacaccagttctcagcccagactgacagccagatagatcttggccctgagtttgccaattaaagatgccgtgattattacctagagg

SEQ ID NO: 433775 - DNA, 801 bp, Homo sapiens
tgtggtgacgcacttatccggcgcgatgacgtcactgcaaggcgccgggggacacgttggctgcgttttcggcgggcttcccgggtacaaaaatggctgtggctagcgatttctacctgcgctactacgtagggcacaagggcaagtttgggcacgagtttctggagttcgaatttcggccggacggaaagcttagatatgccaacaacagcaattacaaaaatgatgtgatgatcagaaaagaggcttatgtgcacaagagtgtaatggaagaactgaagagaattattgatgacagtgaaattacaaaagaagatgatgctttgtggcctccccctgatagggttggccgacaggagcttgaaattgtaattggagatgagcacatatcttttaccacatcaaaaataggttctcttattgatgtaaatcagtcaaaggatcctgaaggccttcgagtattttactatttggtacaagacttgaaatgtttagttttcagtcttattggattacacttcaagattaaaccaatttaaattgtatgttttcaggctgtttgtatatttaattaagggatgggaggggttatttgtcatttacagtattggggtttttatgaatgtgaagcaaacaaaaaaaatttgtatgtaaactgaaaataagaaaatacattagcaagcttaatggttatccttacttgagtccacatgggttggacagtccccacacacattaaattctgtaaatgaaagccaccttttgttaaaaatttgctctaataaaacataccaaatcctg

SEQ ID NO: 433776 - DNA, 147 bp, Homo sapiens
gcggccgcctactactactactgctcgaattcaagcttctaacgatgtacggggacatgggttggacagtccccacacacattaaattctgtaaatgaaagccaccttttgttaaaaatttgctctaataaaacataccaaatcctg

SEQ ID NO: 433777 - DNA, 2770 bp, Homo sapiens
  misc_feature (1514)..(1514): n is a, c, g, or t
  misc_feature (2006)..(2006): n is a, c, g, or t
  misc_feature (2558)..(2558): n is a, c, g, or t
tgtggtgacgcacttatccggcgcgatgacgtcactgcaaggcgccgggggacacgttggctgcgttttcggcgggcttcccgggtacaaaaatggctgtggctagcgatttctacctgcgctactacgtagggcacaagggcaagtttgggcacgagtttctggagttcgaatttcggccggacggaaagcttagatatgccaacaacagcaattacaaaaatgatgtgatgatcagaaaagaggcttatgtgcacaagagtgtaatggaagaactgaagagaattattgatgacagtgaaattacaaaagaagatgatgctttgtggcctccccctgatagggttggccgacaggagcttgaaattgtaattggagatgagcacatatcttttaccacatcaaaaataggttctcttattgatgtaaatcagtcaaaggatcctgaaggccttcgagtattttactatttggtacaagacttgaaatgtttagttttcagtcttattggattacacttcaagattaaaccaatttaaattgtatgttttcaggctgtttgtatatttaattaagggatgggaggggttatttgtcatttacagtattggggtttttatgaatgtgaagcaaacaaaaaaaatttgtatgtaaactgaaaataagaaaatacattagcaagcttaatggttatccttacttgagtccacatgggttggacagtccccacacacattaaattctgtaaatgaaagccaccttttgttaaaaatttgctctaataaaacataccaaatcctggttgcagagtagttttttgttttttccaggaggctatgtctctaattcactttagagataataagaaattgttctggtagatatatcctgtgacagaagatactttaggtggaactatgtagccagattcccatccatgaaaggcaagtgtagattgtcccttatttccttcatacatgattggatttaattttggggggcttatacaaggtctagtttttttttacagttatgacaaacccctcagggattattcacatttaaatattttcagttacaagcagtgaggtcctaaagtgttacaagagtacagtctaccccatgttaggcatatctttgattatgtctttattccttatttcacaatgtatttggtgtgtaggggaggggggagaactaaatgagttttcagctttataaattgttaaacatttagacaaacatatatgtatgtatgaatgtacataaatatttttaactcctattgaccacgagtctcacttcagtttcccagttcctttcaacctctttctgatagatttcctctttcattacttttagtaaccatgttccttgtttccttttattcttccatctgaagccccactcttaaaaagttgcactgttccagtagttataatccacttgccctaggaacaagttagcactgaattttgggtggaataattagtttctgaaggcttgccaggacncctgagcaggtaggctctagagtcgggcagtccaataacttttttgcaataatggaaacgttctatgtgcagtccaatagggtagcaactggccaaatgaggcctactgattacttgaggtgtgccttgtataactgaatttatggtgctatttaaacaatttttttctaacgtgaaaaggataaaacataaaaaactcttgagaactataaagtgaacacctatatgcctacccctacctagattctatacttaacatcttttttactgtaatatctctattataataaatcttggtttttcacttaactggtgtaattggtgccaataaactactttttttgtagtgctatttaattttgattaaatttagatagccacgtgtctagcggctaccgtttggacagtatagctctagagcatggcttggtaacctgtttgccatggagcactagatggtccttttcactcctcaaaatgcatgcccattgncttcaggtttgccatggaaagtcaaatgatttccacttcattatgcaagtacgctatcatcttcaggtcttttgtatgtaaaatgtttctgttccagttgtagaccttgatgattgtgcagtatgaaatcgtattgtaattttcttgcatttagatgtcaacctcagaaacaggaacaatcgtcttttgaacttccagtaggcccacagttgttggttgttcctcaaaacaggttgtggctcctgttgaataagatgatccattaaaaactgaacaaggttgaggagaaatagtgcttacgttgaaaaatctttaagtctttgtccccgttctctaacttccttacgttttcgtttatttagctctatccccactatctactagaatttctcatatttaaaccaagatgggagactaggtcattaggaaaatattaccgtctacaattttcttatactttgatctgtcttttatttgattgtaagttgctgatggacagtgatcattagaaactgaattttgtataatactagttttatatgaaactagatntttattgcgctcaggttatgttccttttacctccttccttaataaagagaccacttgaaataatcagactttttccaagtactgtctgcacctcatcccacctcttccccattcatgagatagtgcagaaccctagcacagtcttttccatatagtaggtgttttttaagtttgttgaattggttgctgtcttgctctgtccttagattatt

SEQ ID NO: 433778 - DNA, 3395 bp, Homo sapiens
  misc_feature (2139)..(2139): n is a, c, g, or t
  misc_feature (2631)..(2631): n is a, c, g, or t
  misc_feature (3183)..(3183): n is a, c, g, or t
tgtggtgacgcacttatccggcgcgatgacgtcactgcaaggcgccgggggacacgttggctgcgttttcggcgggcttcccgggtacaaaaatggctgtggctagcgatttctacctgcgctactacgtagggcacaagggcaagtttgggcacgagtttctggagttcgaatttcggccggacggacgcatgaagagtaccaagcaagaggggagaggtaaagttccacaggagggagtcaggaagatcttcttagaggacggcactcttgagatgagtctcgaaatgagagacttggcctttgagagaaaaaaacagacttccagagcagtatgagcagaggatgaggtgaaactgctacccaagtagtgtgcaacagtgtgttttctgacagcgctatccttagagaatgttacattgatcttgcctacctgcaacaagaaagttcatttggatatatattttttgggtttttttgaatgcacgttttgtgctggacaacaagcaaatacaaaattttaaggaaagcttagatatgccaacaacagcaattacaaaaatgatgtgatgatcagaaaagaggcttatgtgcacaagagtgtaatggaagaactgaagagaattattgatgacagtgaaattacaaaagaagatgatgctttgtggcctccccctgatagggttggccgacagaataaatgatgtttctcaggcttctgaagaactctgaaggcctaatttcactctgtaaaaaagaaagtttggtttctgaattgggtcttttcaactcttggagaaattccttcaacaacccctggaaggaagaaacatttaatttcacttttgtatatccctgaggattgtactttgtatcaccttctttgaatagaagaaaatgtggagaaatctaacacatgctgacactctgtaggagtaacttaagtcttctgcttaaagaagcattatttagaaaagcaaggagcttgaaattgtaattggagatgagcacatatcttttaccacatcaaaaataggttctcttattgatgtaaatcagtcaaaggatcctgaaggccttcgagtattttactatttggtacaagacttgaaatgtttagttttcagtcttattggattacacttcaagattaaaccaatttaaattgtatgttttcaggctgtttgtatatttaattaagggatgggaggggttatttgtcatttacagtattggggtttttatgaatgtgaagcaaacaaaaaaaatttgtatgtaaactgaaaataagaaaatacattagcaagcttaatggttatccttacttgagtccacatgggttggacagtccccacacacattaaattctgtaaatgaaagccaccttttgttaaaaatttgctctaataaaacataccaaatcctggttgcagagtagttttttgttttttccaggaggctatgtctctaattcactttagagataataagaaattgttctggtagatatatcctgtgacagaagatactttaggtggaactatgtagccagattcccatccatgaaaggcaagtgtagattgtcccttatttccttcatacatgattggatttaattttggggggcttatacaaggtctagtttttttttacagttatgacaaacccctcagggattattcacatttaaatattttcagttacaagcagtgaggtcctaaagtgttacaagagtacagtctaccccatgttaggcatatctttgattatgtctttattccttatttcacaatgtatttggtgtgtaggggaggggggagaactaaatgagttttcagctttataaattgttaaacatttagacaaacatatatgtatgtatgaatgtacataaatatttttaactcctattgaccacgagtctcacttcagtttcccagttcctttcaacctctttctgatagatttcctctttcattacttttagtaaccatgttccttgtttccttttattcttccatctgaagccccactcttaaaaagttgcactgttccagtagttataatccacttgccctaggaacaagttagcactgaattttgggtggaataattagtttctgaaggcttgccaggacncctgagcaggtaggctctagagtcgggcagtccaataacttttttgcaataatggaaacgttctatgtgcagtccaatagggtagcaactggccaaatgaggcctactgattacttgaggtgtgccttgtataactgaatttatggtgctatttaaacaatttttttctaacgtgaaaaggataaaacataaaaaactcttgagaactataaagtgaacacctatatgcctacccctacctagattctatacttaacatcttttttactgtaatatctctattataataaatcttggtttttcacttaactggtgtaattggtgccaataaactactttttttgtagtgctatttaattttgattaaatttagatagccacgtgtctagcggctaccgtttggacagtatagctctagagcatggcttggtaacctgtttgccatggagcactagatggtccttttcactcctcaaaatgcatgcccattgncttcaggtttgccatggaaagtcaaatgatttccacttcattatgcaagtacgctatcatcttcaggtcttttgtatgtaaaatgtttctgttccagttgtagaccttgatgattgtgcagtatgaaatcgtattgtaattttcttgcatttagatgtcaacctcagaaacaggaacaatcgtcttttgaacttccagtaggcccacagttgttggttgttcctcaaaacaggttgtggctcctgttgaataagatgatccattaaaaactgaacaaggttgaggagaaatagtgcttacgttgaaaaatctttaagtctttgtccccgttctctaacttccttacgttttcgtttatttagctctatccccactatctactagaatttctcatatttaaaccaagatgggagactaggtcattaggaaaatattaccgtctacaattttcttatactttgatctgtcttttatttgattgtaagttgctgatggacagtgatcattagaaactgaattttgtataatactagttttatatgaaactagatntttattgcgctcaggttatgttccttttacctccttccttaataaagagaccacttgaaataatcagactttttccaagtactgtctgcacctcatcccacctcttccccattcatgagatagtgcagaaccctagcacagtcttttccatatagtaggtgttttttaagtttgttgaattggttgctgtcttgctctgtccttagattatt

SEQ ID NO: 433779 - DNA, 3056 bp, Homo sapiens
  misc_feature (1800)..(1800): n is a, c, g, or t
  misc_feature (2292)..(2292): n is a, c, g, or t
  misc_feature (2844)..(2844): n is a, c, g, or t
tgtggtgacgcacttatccggcgcgatgacgtcactgcaaggcgccgggggacacgttggctgcgttttcggcgggcttcccgggtacaaaaatggctgtggctagcgatttctacctgcgctactacgtagggcacaagggcaagtttgggcacgagtttctggagttcgaatttcggccggacggaaagcttagatatgccaacaacagcaattacaaaaatgatgtgatgatcagaaaagaggcttatgtgcacaagagtgtaatggaagaactgaagagaattattgatgacagtgaaattacaaaagaagatgatgctttgtggcctccccctgatagggttggccgacagaataaatgatgtttctcaggcttctgaagaactctgaaggcctaatttcactctgtaaaaaagaaagtttggtttctgaattgggtcttttcaactcttggagaaattccttcaacaacccctggaaggaagaaacatttaatttcacttttgtatatccctgaggattgtactttgtatcaccttctttgaatagaagaaaatgtggagaaatctaacacatgctgacactctgtaggagtaacttaagtcttctgcttaaagaagcattatttagaaaagcaaggagcttgaaattgtaattggagatgagcacatatcttttaccacatcaaaaataggttctcttattgatgtaaatcagtcaaaggatcctgaaggccttcgagtattttactatttggtacaagacttgaaatgtttagttttcagtcttattggattacacttcaagattaaaccaatttaaattgtatgttttcaggctgtttgtatatttaattaagggatgggaggggttatttgtcatttacagtattggggtttttatgaatgtgaagcaaacaaaaaaaatttgtatgtaaactgaaaataagaaaatacattagcaagcttaatggttatccttacttgagtccacatgggttggacagtccccacacacattaaattctgtaaatgaaagccaccttttgttaaaaatttgctctaataaaacataccaaatcctggttgcagagtagttttttgttttttccaggaggctatgtctctaattcactttagagataataagaaattgttctggtagatatatcctgtgacagaagatactttaggtggaactatgtagccagattcccatccatgaaaggcaagtgtagattgtcccttatttccttcatacatgattggatttaattttggggggcttatacaaggtctagtttttttttacagttatgacaaacccctcagggattattcacatttaaatattttcagttacaagcagtgaggtcctaaagtgttacaagagtacagtctaccccatgttaggcatatctttgattatgtctttattccttatttcacaatgtatttggtgtgtaggggaggggggagaactaaatgagttttcagctttataaattgttaaacatttagacaaacatatatgtatgtatgaatgtacataaatatttttaactcctattgaccacgagtctcacttcagtttcccagttcctttcaacctctttctgatagatttcctctttcattacttttagtaaccatgttccttgtttccttttattcttccatctgaagccccactcttaaaaagttgcactgttccagtagttataatccacttgccctaggaacaagttagcactgaattttgggtggaataattagtttctgaaggcttgccaggacncctgagcaggtaggctctagagtcgggcagtccaataacttttttgcaataatggaaacgttctatgtgcagtccaatagggtagcaactggccaaatgaggcctactgattacttgaggtgtgccttgtataactgaatttatggtgctatttaaacaatttttttctaacgtgaaaaggataaaacataaaaaactcttgagaactataaagtgaacacctatatgcctacccctacctagattctatacttaacatcttttttactgtaatatctctattataataaatcttggtttttcacttaactggtgtaattggtgccaataaactactttttttgtagtgctatttaattttgattaaatttagatagccacgtgtctagcggctaccgtttggacagtatagctctagagcatggcttggtaacctgtttgccatggagcactagatggtccttttcactcctcaaaatgcatgcccattgncttcaggtttgccatggaaagtcaaatgatttccacttcattatgcaagtacgctatcatcttcaggtcttttgtatgtaaaatgtttctgttccagttgtagaccttgatgattgtgcagtatgaaatcgtattgtaattttcttgcatttagatgtcaacctcagaaacaggaacaatcgtcttttgaacttccagtaggcccacagttgttggttgttcctcaaaacaggttgtggctcctgttgaataagatgatccattaaaaactgaacaaggttgaggagaaatagtgcttacgttgaaaaatctttaagtctttgtccccgttctctaacttccttacgttttcgtttatttagctctatccccactatctactagaatttctcatatttaaaccaagatgggagactaggtcattaggaaaatattaccgtctacaattttcttatactttgatctgtcttttatttgattgtaagttgctgatggacagtgatcattagaaactgaattttgtataatactagttttatatgaaactagatntttattgcgctcaggttatgttccttttacctccttccttaataaagagaccacttgaaataatcagactttttccaagtactgtctgcacctcatcccacctcttccccattcatgagatagtgcagaaccctagcacagtcttttccatatagtaggtgttttttaagtttgttgaattggttgctgtcttgctctgtccttagattatt

SEQ ID NO: 433780 - DNA, 2954 bp, Homo sapiens
  misc_feature (1698)..(1698): n is a, c, g, or t
  misc_feature (2190)..(2190): n is a, c, g, or t
  misc_feature (2742)..(2742): n is a, c, g, or t
tgtggtgacgcacttatccggcgcgatgacgtcactgcaaggcgccgggggacacgttggctgcgttttcggcgggcttcccgggaaagcttagatatgccaacaacagcaattacaaaaatgatgtgatgatcagaaaagaggcttatgtgcacaagagtgtaatggaagaactgaagagaattattgatgacagtgaaattacaaaagaagatgatgctttgtggcctccccctgatagggttggccgacagaataaatgatgtttctcaggcttctgaagaactctgaaggcctaatttcactctgtaaaaaagaaagtttggtttctgaattgggtcttttcaactcttggagaaattccttcaacaacccctggaaggaagaaacatttaatttcacttttgtatatccctgaggattgtactttgtatcaccttctttgaatagaagaaaatgtggagaaatctaacacatgctgacactctgtaggagtaacttaagtcttctgcttaaagaagcattatttagaaaagcaaggagcttgaaattgtaattggagatgagcacatatcttttaccacatcaaaaataggttctcttattgatgtaaatcagtcaaaggatcctgaaggccttcgagtattttactatttggtacaagacttgaaatgtttagttttcagtcttattggattacacttcaagattaaaccaatttaaattgtatgttttcaggctgtttgtatatttaattaagggatgggaggggttatttgtcatttacagtattggggtttttatgaatgtgaagcaaacaaaaaaaatttgtatgtaaactgaaaataagaaaatacattagcaagcttaatggttatccttacttgagtccacatgggttggacagtccccacacacattaaattctgtaaatgaaagccaccttttgttaaaaatttgctctaataaaacataccaaatcctggttgcagagtagttttttgttttttccaggaggctatgtctctaattcactttagagataataagaaattgttctggtagatatatcctgtgacagaagatactttaggtggaactatgtagccagattcccatccatgaaaggcaagtgtagattgtcccttatttccttcatacatgattggatttaattttggggggcttatacaaggtctagtttttttttacagttatgacaaacccctcagggattattcacatttaaatattttcagttacaagcagtgaggtcctaaagtgttacaagagtacagtctaccccatgttaggcatatctttgattatgtctttattccttatttcacaatgtatttggtgtgtaggggaggggggagaactaaatgagttttcagctttataaattgttaaacatttagacaaacatatatgtatgtatgaatgtacataaatatttttaactcctattgaccacgagtctcacttcagtttcccagttcctttcaacctctttctgatagatttcctctttcattacttttagtaaccatgttccttgtttccttttattcttccatctgaagccccactcttaaaaagttgcactgttccagtagttataatccacttgccctaggaacaagttagcactgaattttgggtggaataattagtttctgaaggcttgccaggacncctgagcaggtaggctctagagtcgggcagtccaataacttttttgcaataatggaaacgttctatgtgcagtccaatagggtagcaactggccaaatgaggcctactgattacttgaggtgtgccttgtataactgaatttatggtgctatttaaacaatttttttctaacgtgaaaaggataaaacataaaaaactcttgagaactataaagtgaacacctatatgcctacccctacctagattctatacttaacatcttttttactgtaatatctctattataataaatcttggtttttcacttaactggtgtaattggtgccaataaactactttttttgtagtgctatttaattttgattaaatttagatagccacgtgtctagcggctaccgtttggacagtatagctctagagcatggcttggtaacctgtttgccatggagcactagatggtccttttcactcctcaaaatgcatgcccattgncttcaggtttgccatggaaagtcaaatgatttccacttcattatgcaagtacgctatcatcttcaggtcttttgtatgtaaaatgtttctgttccagttgtagaccttgatgattgtgcagtatgaaatcgtattgtaattttcttgcatttagatgtcaacctcagaaacaggaacaatcgtcttttgaacttccagtaggcccacagttgttggttgttcctcaaaacaggttgtggctcctgttgaataagatgatccattaaaaactgaacaaggttgaggagaaatagtgcttacgttgaaaaatctttaagtctttgtccccgttctctaacttccttacgttttcgtttatttagctctatccccactatctactagaatttctcatatttaaaccaagatgggagactaggtcattaggaaaatattaccgtctacaattttcttatactttgatctgtcttttatttgattgtaagttgctgatggacagtgatcattagaaactgaattttgtataatactagttttatatgaaactagatntttattgcgctcaggttatgttccttttacctccttccttaataaagagaccacttgaaataatcagactttttccaagtactgtctgcacctcatcccacctcttccccattcatgagatagtgcagaaccctagcacagtcttttccatatagtaggtgttttttaagtttgttgaattggttgctgtcttgctctgtccttagattatt

SEQ ID NO: 433781 - DNA, 2716 bp, Homo sapiens
  misc_feature (1460)..(1460): n is a, c, g, or t
  misc_feature (1952)..(1952): n is a, c, g, or t
  misc_feature (2504)..(2504): n is a, c, g, or t
tgtggtgacgcacttatccggcgcgatgacgtcactgcaaggcgccgggggacacgttggctgcgttttcggcgggcttcccgggtacaaaaatggctgtggctagcgatttctacctgcgctactacgtagggcacaagggcaagtttgggcacgagtttctggagttcgaatttcggccggacggaaagcttagatatgccaacaacagcaattacaaaaatgatgtgatgatcagaaaagaggcttatgtgcacaagagtgtaatggaagaactgaagagaattattgatgacagtgaaattacaaaagaagatgatgctttgtggcctccccctgatagggttggccgacaggagcttgaaattgtaattggagatgagcacatatcttttaccacatcaatattttactatttggtacaagacttgaaatgtttagttttcagtcttattggattacacttcaagattaaaccaatttaaattgtatgttttcaggctgtttgtatatttaattaagggatgggaggggttatttgtcatttacagtattggggtttttatgaatgtgaagcaaacaaaaaaaatttgtatgtaaactgaaaataagaaaatacattagcaagcttaatggttatccttacttgagtccacatgggttggacagtccccacacacattaaattctgtaaatgaaagccaccttttgttaaaaatttgctctaataaaacataccaaatcctggttgcagagtagttttttgttttttccaggaggctatgtctctaattcactttagagataataagaaattgttctggtagatatatcctgtgacagaagatactttaggtggaactatgtagccagattcccatccatgaaaggcaagtgtagattgtcccttatttccttcatacatgattggatttaattttggggggcttatacaaggtctagtttttttttacagttatgacaaacccctcagggattattcacatttaaatattttcagttacaagcagtgaggtcctaaagtgttacaagagtacagtctaccccatgttaggcatatctttgattatgtctttattccttatttcacaatgtatttggtgtgtaggggaggggggagaactaaatgagttttcagctttataaattgttaaacatttagacaaacatatatgtatgtatgaatgtacataaatatttttaactcctattgaccacgagtctcacttcagtttcccagttcctttcaacctctttctgatagatttcctctttcattacttttagtaaccatgttccttgtttccttttattcttccatctgaagccccactcttaaaaagttgcactgttccagtagttataatccacttgccctaggaacaagttagcactgaattttgggtggaataattagtttctgaaggcttgccaggacncctgagcaggtaggctctagagtcgggcagtccaataacttttttgcaataatggaaacgttctatgtgcagtccaatagggtagcaactggccaaatgaggcctactgattacttgaggtgtgccttgtataactgaatttatggtgctatttaaacaatttttttctaacgtgaaaaggataaaacataaaaaactcttgagaactataaagtgaacacctatatgcctacccctacctagattctatacttaacatcttttttactgtaatatctctattataataaatcttggtttttcacttaactggtgtaattggtgccaataaactactttttttgtagtgctatttaattttgattaaatttagatagccacgtgtctagcggctaccgtttggacagtatagctctagagcatggcttggtaacctgtttgccatggagcactagatggtccttttcactcctcaaaatgcatgcccattgncttcaggtttgccatggaaagtcaaatgatttccacttcattatgcaagtacgctatcatcttcaggtcttttgtatgtaaaatgtttctgttccagttgtagaccttgatgattgtgcagtatgaaatcgtattgtaattttcttgcatttagatgtcaacctcagaaacaggaacaatcgtcttttgaacttccagtaggcccacagttgttggttgttcctcaaaacaggttgtggctcctgttgaataagatgatccattaaaaactgaacaaggttgaggagaaatagtgcttacgttgaaaaatctttaagtctttgtccccgttctctaacttccttacgttttcgtttatttagctctatccccactatctactagaatttctcatatttaaaccaagatgggagactaggtcattaggaaaatattaccgtctacaattttcttatactttgatctgtcttttatttgattgtaagttgctgatggacagtgatcattagaaactgaattttgtataatactagttttatatgaaactagatntttattgcgctcaggttatgttccttttacctccttccttaataaagagaccacttgaaataatcagactttttccaagtactgtctgcacctcatcccacctcttccccattcatgagatagtgcagaaccctagcacagtcttttccatatagtaggtgttttttaagtttgttgaattggttgctgtcttgctctgtccttagattatt

SEQ ID NO: 433782 - DNA, 911 bp, Homo sapiens
  misc_feature (911)..(911): n is a, c, g, or t
tgtggtgacgcacttatccggcgcgatgacgtcactgcaaggcgccgggggacacgttggctgcgttttcggcgggcttcccgggtacaaaaatggctgtggctagcgatttctacctgcgctactacgtagggcacaagggcaagtttgggcacgagtttctggagttcgaatttcggccggacggaaagcttagatatgccaacaacagcaattacaaaaatgatgtgatgatcagaaaagaggcttatgtgcacaagagtgtaatggaagaactgaagagaattattgatgacagtgaaattacaaaagaagatgatgctttgtggcctccccctgatagggttggccgacagaataaatgatgtttctcaggcttctgaagaactctgaaggcctaatttcactctgtaaaaaagaaagtttggtttctgaattgggtcttttcaactcttggagaaattccttcaacaacccctggaaggaagaaacatttaatttcacttttgtatatccctgaggattgtactttgtatcaccttctttgaatagaagaaaatgtggagaaatctaacacatgctgacactctgtaggagtaacttaagtcttctgcttaaagaagcattatttagaaaagcaaggagcttgaaattgtaattggagatgagcacatatcttttaccacatcaaaaataggttctcttattgatgtaaatcagtcaaagatctgaggctcgagtatttaccatggtcacgatgaagtaggtagtttggtaactcagattaacctaatgtggtcgggggttttaaagggggggggcagctgggtttcggcgcacatgtgttgggaaaaaccggtgttcggggggccattagggggtttcaaaaaaggcgggggtggagaaggtgn

SEQ ID NO: 433783 - DNA, 133 bp, Homo sapiens
tgcaacaagaaagttcatttggatatatattttttgggtttttttgaatgcacgttttgtgctggacaacaagcaaatacaaaattttaaggtacagtaatgagtaagacaaatttaactaaagcagatttgt

SEQ ID NO: 433784 - DNA, 613 bp, Homo sapiens
tatgatgtggttattacaatcataaggatatgaactctttaaatactaaaatgaatactgatgaagaaactattttttcgtatagaaaagatattaattgtatgttcattttagttgtcagcaaaatccttcctttctcctaaattttgttaacttaattgttatgagattttgatttgttttgttttaggcatttaaagaattgttttatcctaggaagaaaaagtaacttttacctttttaaattttagggatcctgaaggccttcgagtattttactatttggtacaagacttgaaatgtttagttttcagtcttattggattacacttcaagattaaaccaatttaaattgtatgttttcaggctgtttgtatatttaattaagggatgggaggggttatttgtcatttacagtattggggtttttatgaatgtgaagcaaacaaaaaaaatttgtatgtaaactgaaaataagaaaatacattagcaagcttaatggttatccttacttgagtccacatgggttggacagtccccacacacattaaattctgtaaatgaaagccaccttttgttaaaaatttgctctaataaaacataccaaatcctg

SEQ ID NO: 433785 - DNA, 533 bp, Homo sapiens
gtacaaaaatggctgtggctagcgatttctacctgcgctactacgtagggcacaagggcaagtttgggcacgagtttctggagttcgaatttcggccggacggtgagaagaggcccacggcacgcggtgctgggaaaggggagcgagaccgagaggccgggtggtgtggagggtacaggcggcggaggccactgcttccctcgaaggaaataggagcttaagaatagaggaggcataagttggttttataaatgaaagagaattaattgcaataaattaaagctaatcctgtcacaaactgaaaagttgaacctacagtaatcagaattctgtaacagtgcaccagaagggactctagatcgtcgccctgattgaaaatgctagcacttttttgaaaacacccccaccagcgggtggtccagtggatgaataaaatcttgtggtgaccagtacctttttttcatttaggctgtgtgttttctttgaaggggaggagcccaacgtgttaacaaatgagaataataatatgtttt

SEQ ID NO: 433786 - DNA, 1548 bp, Homo sapiens
tgtggtgacgcacttatccggcgcgatgacgtcactgcaaggcgccgggggacacgttggctgcgttttcggcgggcttcccgggtacaaaaatggctgtggctagcgatttctacctgcgctactacgtagggcacaagggcaagtttgggcacgagtttctggagttcgaatttcggccggacggaaagcttagatatgccaacaacagcaattacaaaaatgatgtgatgatcagaaaagaggcttatgtgcacaagagtgtaatggaagaactgaagagaattattgatgacagtgaaattacaaaagaagatgatgctttgtggcctccccctgatagggttggccgacaggagcttgaaattgtaattggagatgagcacatatcttttaccacatcaaaaataggttctcttattgatgtaaatcagtcaaaggatcctgaaggccttcgagtattttactatttggtacaagacttgaaatgtttagttttcagtcttattggattacacttcaagattaaaccaatttaaattgtatgttttcaggctgtttgtatatttaattaagggatgggaggggttatttgtcatttacagtattggggtttttatgaatgtgaagcaaacaaaaaaaatttgtatgtaaactgaaaataagaaaatacattagcaagcttaatggttatccttacttgagtccacatgggttggacagtccccacacacattaaattctgtaaatgaaagccaccttttgttaaaaatttgctctaataaaacataccaaatcctgaaaaaaaaaaaaaaaaaacaaaaaaaacaaaaaaaaaaaaagaaaagagaagaaacaaaacaaaaaaaacaacaacaaaaacaaacaaaaaaagaagaaagaaagagagagacgacagaaagcacgaaaagaaggagacgagcagacgggcgggagagaaggagatgcgagggtgcgagggagaagagaaacgagaggagggaagaggagaggagcaggagaggaggagtgtgtgtaagagaggggggcgggcgcggaagaggaagaaagagtgagggaggagagggacgaagagagagagctggatcgcacgcggacgtagagctgacggacgagggggagtgagaacgaacgatgacacagagatacgaagaggaacggacagagagattcaaagtagcggggcgagcgagaaggagaaggatgggcgagataacagcagggaacgaagagagaggaaagagcaggaacgccgagtagagttgagcgtcacgtctgacgcggaggagcgcagctggaaacaggcaagaaagaggattagagtgggatagcaacgggacgatggaagacgggagaactgacagacaagaagggaacacgaaccgagcaaatgtgcgagagcgatggcgggagtaaggtaccgaggaggcaaaccagaacggaagagacaagaggttgaaaacacgaaacagaagagtagaaggaaatgcaaaacgcaagcagaagtaaagagtaagaatgaaagag

SEQ ID NO: 433787 - DNA, 699 bp, Homo sapiens
tgtggtgacgcacttatccggcgcgatgacgtcactgcaaggcgccgggggacacgttggctgcgttttcggcgggcttcccgggaaagcttagatatgccaacaacagcaattacaaaaatgatgtgatgatcagaaaagaggcttatgtgcacaagagtgtaatggaagaactgaagagaattattgatgacagtgaaattacaaaagaagatgatgctttgtggcctccccctgatagggttggccgacaggagcttgaaattgtaattggagatgagcacatatcttttaccacatcaaaaataggttctcttattgatgtaaatcagtcaaaggatcctgaaggccttcgagtattttactatttggtacaagacttgaaatgtttagttttcagtcttattggattacacttcaagattaaaccaatttaaattgtatgttttcaggctgtttgtatatttaattaagggatgggaggggttatttgtcatttacagtattggggtttttatgaatgtgaagcaaacaaaaaaaatttgtatgtaaactgaaaataagaaaatacattagcaagcttaatggttatccttacttgagtccacatgggttggacagtccccacacacattaaattctgtaaatgaaagccaccttttgttaaaaatttgctctaataaaacataccaaatcctg

SEQ ID NO: 433788 - DNA, 9072 bp, Homo sapiens
  misc_feature (4169)..(4169): n is a, c, g, or t
caccacgcccggccaaacatgggtgaatttcttttaaaacctgaaaataaagaattttttttctctgatgcttcttgaagtgtacatgtttatcttttagtctggcaaactcacttctaagaattaacctcagagataagctgtcaaaaatacaaaatggcagagattaagaacaatgattctcagactcgagcttgcgtcagaatcacctacaggacgtatggtgcagattcctgggcctcacttcagagtatctgattcagtagatctgggcttccacccaataattttcatttctaatagatttttaggtagtaatgatgttgttctgggtaccacatcttagaaccactggttaagatgtagtcatgagaacaaaagaccagaaacaacccaaaaaaatacccatcaacaaaatctggtggaagaaatcacgatcgatatacacaatggaattctatgcaactattaaaaggaatgcagaagagttccatgttctgttctaggatatcctccaggatgcattgagttttttcacttaaatcaaagtggctcccgcctgggcaacagatatcgtcgtcctccccgcagtcaggctgcccatcacccaccattccagcaggtaaagtcatttctccatcacagaagcacagcaagaaggcactaaagcaggcgctaaagcagcaacagcagaagaagcagcagcagcaatgcaggccaagcatatccatctcctccaaccagcatctctcactaaagactgtcaaagcagccagtgactctgtacctgccaaacctgcaacatgggaaggaaagcaatctgatggacagacaggcagccctcaaaactcaaactccagcttttcttcctcagttaaagtggaaaatactttactaggcttggggaagaagtcattccagagatctgagagactccataccagacaaatgaaaagaactaaatgtgctgacattgacgttgagacaccggactccattctggttaatacaaatctgcgagcactgatcaacaagcacacattttcagtccttcctggagattgccagcaacgactgcttttactactcccagaggtagatcgacaggttggtccagatggtttaatgaagttaaatggctcagcccttaacaatgaattcttcacttcagcagcccaaggctggaagggaaagactctcagaaggtgagtttacacctgagatgcaggtgagaattcgacaagagattgagaaggagaaaaaagtggagccatggaaagaacaattctttgaaagctactatgggcagagttctggcctgagccttgaagattctaagaaattgacagcttctcccagtgatcccaaagtaaagaaaaccccagctgaacaaccaaaatccatgcctgtgtcagaggcctctcttatcagaatagttccagtagtctcccagtcagagtgtaaagaagaagcattgcaaatgtcatcaccaggcagaaaagaagagtgtgaaagccaaggtgaagtgcagccgaacttctccacatcttcagagcccctgctttcctcagctctcaatacacatgagcttagcagcattcttcccatcaagtgcccaaaggatgaggatctcttggagcagaagccagtcacctctgctgaacaggaatctgagaagaaccatctcaccacagcttctaattataacaaaagtgaaagccaagaatctttagttacatcgccaagcaaacccaagagtcctggggttgaaaaaccaatagtgaagcccacagcaggagcgggtccacaggagactaatatgaaagaacctctagcaactcttgttgatcagagcccagaaagcctcaagaggaagtcttccctcacccaagaagaggcccctgtgagctgggagaagaggccacgtgtcactgagaatcgccagcaccagcagccatttcaggtctcaccacagccctttctcaatagaggggacagaatccaggtgcgaaaagtaccacctctcaagatcccggtctccagaatctcccccatgccgtttcatccatcgcaggtctctcccagggctcgttttccagtctccatcactagtcctaacagaacaggagccagaactcttgcagacatcaaagcaaaagcccaactggtcaaagcacagagggcagcagctgccgctgccgccgcagctgctgcagccgcctcagttggagggaccattccaggacctggcccagggggtggacaaggtccaggagagggtggtgaagggcagactgctagaggaggcagtccaggctcagacagagtcagtgaaactggaaagggccccacactggaactggcaggaactggaagcaggggaggtacgagagagcttttaccctgtggtccagagactcagccccagtctgagaccaagaccaccccaagccaggcacagcctcatagtgtctctggagcacaactacagcaaacccccccagtgcctccaacacctgccgtcagtggagcatgcacaagtgtcccatcaccagcccacatagagaaattggataatgaaaaactgaaccccaccagagcaacagccacagtggcctctgtcagccatccacaagggcccagtagttgcagacaggagaaagcaccttctccaacaggtcctgctctaatctcaggtgcctcacctgttcattgtgcagctgatggcacagttgagctcaaagcaggtcctagtaagaatatacctaacccttcagcctcatcaaagacagatgctagtgtgccagtggctgtaactccctcccctttaacatctttattgaccacagccactttagaaaagcttcctgtaccccaggtcagtgcaactacagcacctgctggatcagctccaccctcgagcactttgccagcagcttctagccttaaaaccccaggaacttctttaaacatgaatggacccactttaagaccaacctctagtatccctgctaataatcctttagtgactcagctgcttcaaggcaaagatgttcccatggagcaaattctgcctaaacctctcaccaaagttgaaatgaaaacggttccactgactgcaaaagaggaaagggggatgggagcgctcatagctaccaacacaacagaaaatagcaccagagaggaagttaatgagagacagtcccatccagctacgcagcagcagctgggcaaaaccttgcaaagtaagcagctcccccaggttccaaggccccttcagctcttttcagctaaggagctgagggactccagcattgacacacaccaataccacgaaggactaagtaaagcaacccaagatcagatccttcagactctcattcagagggttcggaggcagaatcttctctcagttgtgccgccctcacagttcaacttcgctcactcaggtttccagctggaagacatctccacaagccagaggttcatgctgggttttgctggcagaaggacatccaaacctgcaatggcagggcactacttactgaatatttctacctacggccggggctcagagagctttaggaggacccattctgtaaaccctgaagatcgtttttgtctaagcagccccactgaagccttgaaaatgggatatacagactgtaaaaatgcaacaggagagagtagcagcagcaaagaagatgacactgatgaggaaagtactggtgatgagcaggaatctgtcacagtgaaagaggagccccaggtttcccagagtgctggcaagggtgacacaagttcaggacctcacagcagggaaactctatctaccagtgattgcttagctagcaagaatgtgaaggctgagataccattgaatgagcaaaccactttaagtaaggagaattacctgttcactagaggccaaacatttgatgaaaagaccctagccagagatttaattcaggcagcacagaagcagatggctcatgcagtgagaggtaaggcaatccgtagcagccccgagcttttcagttctactgttcttcctctgcctgcagacagccccacccaccagcccctactccttccacccctgcaaaccccgaagttgtatggaagccccacccagatagggccaagctatagaggcatgatcaatgtcnccacctcatctgacatggaccataactctgctgtaccaggtagccaggtatctagcaatgtaggtgatgtcatgtcattttcagtgactgtcactaccatccctgctagccaagctatgaatcccagcagccatggccagaccattcctgttcaggcgttctccgaagagaacagcatagagggcacgccttcgaaatgttactgccgcttgaaagccatgatcatgtgcaaaggctgtggcgctttctgccatgatgattgcatcggcccctccaaactgtgcgtctcctgccttgtcgttcggtaatgagactagaaagagatacactgtaaaggagggggaagggaagggttgaccagttgggttttttgcgtccttttggaatcacagaaataaacaagtaggtttcagttgtcttcagagacaaatgttacttaatcaggaatacaaagtacagattttttacattttagaggaagagcaccttgtatagtaagtctaagtcaagcaagactttgtgaatttgtgacaagtttgcacttacaaaatcatgtaaatatgtcacattttgtttaacattatttttccaagtgtttaggtaataatgtattactttgaattcagattaatgttctactacttgtgactgagaaaagtttaatgccggcatggtaaaaggaagctgtctcccttctgacatttcctaggaagctaggaaaaggaaagtgaaggaatggtctaaagaaatgaccattcacactgattttgtctggacagtctggccgcaggttattcatagattattcagcctttgcaggacttggattcagggttttactcagtccctttaccttaggtggaatcttcttaaattgaaatttttggtaaggaattcatttcacaggtagtgtttcagactctgaaagccctgacttggttcttggcttctactgtactagttactagttactggtactgttgccaagcaatctgcttggaatttgtggatccctgctgttccctaatcccaccccctgccctgagacagtgaatgtagtccgtgaagggagtgcctctctgggaccccctgtgttgttacaggctgtgcagtgcaacaattccagcaaaaataccctatccccgcacttagtcattcgtggtaactaacaattttgaaatactcatataaaatgaacaggaaagtgttagtgattgggtgatttgagctacatcttgttgagcaaggggagtgaaaccacagaaactgttaaattgaacgtaaataactttggaaaacagttttgacactagaacaaggtcgcttctcttttcctcttctctcccaacctgttaacctagtgctagatagtcagctgctgttgcaggtagaaaagctcaccaatgccacatttgttcattctgttcaacctgttttgacctcccaggcatctgaacaggatgacatcatcttattatatcttactttacacatacgtgtatgtacacacacacacacaatacaagacatttttcctgttttagaaaatatagcccttgtttggattactgctgtctgagcactagaaatttctaatggaaagaggcctctgaatggctaagggaacatctggaaaggaaggaaaatgagccctaaaggttttttggttgcttgtttttgtttctttttctttcttgtttccttttttgtttttaaatccttctctagtgactgaagaaattgtgagtacataatatttaggtcatggttaaggaacattaaaataaacctgcagtttaacagaattttgtattaaatgggggagtgtcaatttgcatcatttgcatattgatttcaagtctcctaatttggaatgggtaaagtacaaatgttaatgcaacatagtacagttgtatttgtccttcatattcaggatgtgatatttacaaaatgcagaacagtttaaacttgttaagtcacattccagattaggagaaaatgggcaataatcatctctgttttgcccccattctactacccaccactgcccaccccacccccacatcacacactcttcgatgctttcccacagcccctgctccgctcctctccgtaagaaactcacttcactgtttttcacttttcacttctggcttttttgtggcccaaggccaatataggattaatatctgtgttccagcttcagccagaacgatatgtctgtccatctttctcctttcttccagcacacacagctaagagataagaaggctgcaaggattggggataaggagtatattttcaagccaagaaccagtagaaaacagaaataatggtgctcccaaatattcagtaccttgggcaatccaggaagggtttaaagagacctgttgctgcatagaactctccctgccctaccccttaactccaccttagtgccagggccgagggctggtctgcatgctggaagaggttgagagttttggaattgattccatgctaaatgtcagttaccagtttggattgatgaaagtgatttttctgctttacctttttcctgtcagaaaggttttcctctgtgctacccttaacttagggatgaacagactataactaggaaaggaggaaaggtatcagggatttttaagtccgtttagagagcaaaccatattgtgcctcttcatcttgacccaggctcttatagataggtcctaaacattgctgttcactagattatcttaacaaataatactcagctaaatatttgcatttaggaatactcctaaaacagatattgccaactagatacactgcctcaatcttgaccagacaagagaacagttaagttctctcagttgggtagtaacttgaataccagtctatttatcagttggtttcaacacagaggtttcaagtggaaagccattcatcttaaaagctgaacagaaaaattaaaaaaaaaaaaaacacattacaatctggccttttagaaaatgaagcagtagaaacaaaacctttattagtatggtattccagcagcacctttaaagcaatctttaccttagttttttgagttgttttacctttcatcccaatctgaaaagttttaataaatgctgagcttattcttagggtatgacctggcattatttccagtgactagtcaggcattatgcctgatgcatacgcctcccgtgcacccctatctagccttcagatgtcctccactgcaggtcaccccaggagatagcatcaataatatagtctcagtcttgtttataaagattctaagttgtctagtaaataagtctccctgaatcttaaataattttggagaattagaattctccatcctattaaacagaaagtaaagccaaatagcctggagttgtttgtcctacttgttccataacccctatgctcaagatactgaagctatctgtggtatttcatgtaacatttctaagaataagagctggcaaatgggaaacttggggtggagagagcatacttattgggctgtgaaggcatacggatgtacatgttttagagcttatctcagatttaaatagccaaaggaagacctcattgccttccaggtgaaggtgcaaagtcatacatattaatgacctgacagttaacattctgttgtttattattgcctttctccaccttagagagccataaataactctctggtgaagtgatttgctataatgggggtgaggagtggggagacttctctggtcattacactgctatttatttctagaactcactatcagtgagcagtgccagagtgttttctctttgacctagaggtttcacatcatagcaaggagggaaaagtctccccatctccttacaactgtgtgctaagtaagtaacttggccaagggtagttttcagctcaatttatagaatagtccaaagagactttgagaaacatggtgataggcaggggcctttcctaccatgtttcaatacctacaaacctattgaaagagaacagtaggtaaaacatttcctaaagttgaagcaatagcttcgtagattcttggttactttattttttttaatgctttacatttgatacaactattgaagatcaattttaaaaatagctttccagtaatatattttaagtaatatatattttaatatctgtaaaaagtgacagtggaagactttgaatttctcatatatggtatgtttgatgtaggacctcactgttaaggcacaaattatttcaaaggaagttactctaaagacactcagattatttcagaaaaatgcaataaggggaatagttttggggtttattttttattttaaaagaaaattgacttatttaccacaagctatttttttcccttctggctgtaaggtttgtacagactggtttggtaaatgctaaacttttgtgtcttttgcctttttaaaggaattgttaacattggaattgagggtatgtacagagaagttggtgtcaacaccatttaaaaagtcatattttttcacaaatatagaaaatcattttacataagaattttaagtatttgcaataaatatatgtatatagattgtatgtattcctatattcttatttttcattttattattaagtaaaagatcattaaaagtgaaaataaaaaccttggagttttttggtgaatcttgaggtttaacatacatctgagagtggcgtgggtaagagtcctcagttactgccttatactcctatgggatggttcccacagattgtatggaagagagtaaaatgaggaacttggtgataaatcagggtagtgtatttcttttggaatttaagtaaaactgattaaattttccttatctgtctgtctccatgttttctcccttaatctgttttgtctcctaaccc

SEQ ID NO: 433789 - DNA, 9263 bp, Homo sapiens
  misc_feature (92)..(92): n is a, c, g, or t
  misc_feature (4360)..(4360): n is a, c, g, or t
cgtgttctggtaccacatcttagaaccactggttaagatgtagtcatgagaaccaaagaccagaaacgacccgaaaaaatacccatcgacanaatctggtggaagaaatcacgatcgatatacacaatggaattctatgcaactattaaaaggaatgcagaagagttccatgttctgttctaggatatcctccaggctggtcttgaactcctggtctcaaacattctaactgccttagccacccaaagtgttagcattacaggtgtgaaccaccacgcccagccaataaaattattatgtagtttttaaaatgtaagagtatttaatcatttacctggactcatatctacccaatttttgtctaatttaagcctgtgttgtgcctgcatatgaatgttgtatataatttttatcttcggatatagttggaaacattagcttatttgcctcaaagagatgacaggaattcagaaaatattgctggttctgctactgaatcctatagtaacaaaaattagtgcaattaagttgcaacattgcatatcagaagttttaatttctgtttgcttaaatggtaatgattaatcctaattggatgcctacattttcagaaagatgtgccggatggggtgaaagagctgtcagaaggttcagaagaaagcagtgatggtcagtcagattcccagagttctgagaacagcagcagcagcagtgatggtggcagcaacaaggagggaaaaaagagcaggtggaaaaggaaagtatcgtcgtcctccccgcagtcaggctgcccatcacccaccattccagcaggtaaagtcatttctccatcacagaagcacagcaagaaggcactaaagcaggcgctaaagcagcaacagcagaagaagcagcagcagcaatgcaggccaagcatatccatctcctccaaccagcatctctcactaaagactgtcaaagcagccagtgactctgtacctgccaaacctgcaacatgggaaggaaagcaatctgatggacagacaggcagccctcaaaactcaaactccagcttttcttcctcagttaaagtggaaaatactttactaggcttggggaagaagtcattccagagatctgagagactccataccagacaaatgaaaagaactaaatgtgctgacattgacgttgagacaccggactccattctggttaatacaaatctgcgagcactgatcaacaagcacacattttcagtccttcctggagattgccagcaacgactgcttttactactcccagaggtagatcgacaggttggtccagatggtttaatgaagttaaatggctcagcccttaacaatgaattcttcacttcagcagcccaaggctggaagggaaagactctcagaaggtgagtttacacctgagatgcaggtgagaattcgacaagagattgagaaggagaaaaaagtggagccatggaaagaacaattctttgaaagctactatgggcagagttctggcctgagccttgaagattctaagaaattgacagcttctcccagtgatcccaaagtaaagaaaaccccagctgaacaaccaaaatccatgcctgtgtcagaggcctctcttatcagaatagttccagtagtctcccagtcagagtgtaaagaagaagcattgcaaatgtcatcaccaggcagaaaagaagagtgtgaaagccaaggtgaagtgcagccgaacttctccacatcttcagagcccctgctttcctcagctctcaatacacatgagcttagcagcattcttcccatcaagtgcccaaaggatgaggatctcttggagcagaagccagtcacctctgctgaacaggaatctgagaagaaccatctcaccacagcttctaattataacaaaagtgaaagccaagaatctttagttacatcgccaagcaaacccaagagtcctggggttgaaaaaccaatagtgaagcccacagcaggagcgggtccacaggagactaatatgaaagaacctctagcaactcttgttgatcagagcccagaaagcctcaagaggaagtcttccctcacccaagaagaggcccctgtgagctgggagaagaggccacgtgtcactgagaatcgccagcaccagcagccatttcaggtctcaccacagccctttctcaatagaggggacagaatccaggtgcgaaaagtaccacctctcaagatcccggtctccagaatctcccccatgccgtttcatccatcgcaggtctctcccagggctcgttttccagtctccatcactagtcctaacagaacaggagccagaactcttgcagacatcaaagcaaaagcccaactggtcaaagcacagagggcagcagctgccgctgccgccgcagctgctgcagccgcctcagttggagggaccattccaggacctggcccagggggtggacaaggtccaggagagggtggtgaagggcagactgctagaggaggcagtccaggctcagacagagtcagtgaaactggaaagggccccacactggaactggcaggaactggaagcaggggaggtacgagagagcttttaccctgtggtccagagactcagccccagtctgagaccaagaccaccccaagccaggcacagcctcatagtgtctctggagcacaactacagcaaacccccccagtgcctccaacacctgccgtcagtggagcatgcacaagtgtcccatcaccagcccacatagagaaattggataatgaaaaactgaaccccaccagagcaacagccacagtggcctctgtcagccatccacaagggcccagtagttgcagacaggagaaagcaccttctccaacaggtcctgctctaatctcaggtgcctcacctgttcattgtgcagctgatggcacagttgagctcaaagcaggtcctagtaagaatatacctaacccttcagcctcatcaaagacagatgctagtgtgccagtggctgtaactccctcccctttaacatctttattgaccacagccactttagaaaagcttcctgtaccccaggtcagtgcaactacagcacctgctggatcagctccaccctcgagcactttgccagcagcttctagccttaaaaccccaggaacttctttaaacatgaatggacccactttaagaccaacctctagtatccctgctaataatcctttagtgactcagctgcttcaaggcaaagatgttcccatggagcaaattctgcctaaacctctcaccaaagttgaaatgaaaacggttccactgactgcaaaagaggaaagggggatgggagcgctcatagctaccaacacaacagaaaatagcaccagagaggaagttaatgagagacagtcccatccagctacgcagcagcagctgggcaaaaccttgcaaagtaagcagctcccccaggttccaaggccccttcagctcttttcagctaaggagctgagggactccagcattgacacacaccaataccacgaaggactaagtaaagcaacccaagatcagatccttcagactctcattcagagggttcggaggcagaatcttctctcagttgtgccgccctcacagttcaacttcgctcactcaggtttccagctggaagacatctccacaagccagaggttcatgctgggttttgctggcagaaggacatccaaacctgcaatggcagggcactacttactgaatatttctacctacggccggggctcagagagctttaggaggacccattctgtaaaccctgaagatcgtttttgtctaagcagccccactgaagccttgaaaatgggatatacagactgtaaaaatgcaacaggagagagtagcagcagcaaagaagatgacactgatgaggaaagtactggtgatgagcaggaatctgtcacagtgaaagaggagccccaggtttcccagagtgctggcaagggtgacacaagttcaggacctcacagcagggaaactctatctaccagtgattgcttagctagcaagaatgtgaaggctgagataccattgaatgagcaaaccactttaagtaaggagaattacctgttcactagaggccaaacatttgatgaaaagaccctagccagagatttaattcaggcagcacagaagcagatggctcatgcagtgagaggtaaggcaatccgtagcagccccgagcttttcagttctactgttcttcctctgcctgcagacagccccacccaccagcccctactccttccacccctgcaaaccccgaagttgtatggaagccccacccagatagggccaagctatagaggcatgatcaatgtcnccacctcatctgacatggaccataactctgctgtaccaggtagccaggtatctagcaatgtaggtgatgtcatgtcattttcagtgactgtcactaccatccctgctagccaagctatgaatcccagcagccatggccagaccattcctgttcaggcgttctccgaagagaacagcatagagggcacgccttcgaaatgttactgccgcttgaaagccatgatcatgtgcaaaggctgtggcgctttctgccatgatgattgcatcggcccctccaaactgtgcgtctcctgccttgtcgttcggtaatgagactagaaagagatacactgtaaaggagggggaagggaagggttgaccagttgggttttttgcgtccttttggaatcacagaaataaacaagtaggtttcagttgtcttcagagacaaatgttacttaatcaggaatacaaagtacagattttttacattttagaggaagagcaccttgtatagtaagtctaagtcaagcaagactttgtgaatttgtgacaagtttgcacttacaaaatcatgtaaatatgtcacattttgtttaacattatttttccaagtgtttaggtaataatgtattactttgaattcagattaatgttctactacttgtgactgagaaaagtttaatgccggcatggtaaaaggaagctgtctcccttctgacatttcctaggaagctaggaaaaggaaagtgaaggaatggtctaaagaaatgaccattcacactgattttgtctggacagtctggccgcaggttattcatagattattcagcctttgcaggacttggattcagggttttactcagtccctttaccttaggtggaatcttcttaaattgaaatttttggtaaggaattcatttcacaggtagtgtttcagactctgaaagccctgacttggttcttggcttctactgtactagttactagttactggtactgttgccaagcaatctgcttggaatttgtggatccctgctgttccctaatcccaccccctgccctgagacagtgaatgtagtccgtgaagggagtgcctctctgggaccccctgtgttgttacaggctgtgcagtgcaacaattccagcaaaaataccctatccccgcacttagtcattcgtggtaactaacaattttgaaatactcatataaaatgaacaggaaagtgttagtgattgggtgatttgagctacatcttgttgagcaaggggagtgaaaccacagaaactgttaaattgaacgtaaataactttggaaaacagttttgacactagaacaaggtcgcttctcttttcctcttctctcccaacctgttaacctagtgctagatagtcagctgctgttgcaggtagaaaagctcaccaatgccacatttgttcattctgttcaacctgttttgacctcccaggcatctgaacaggatgacatcatcttattatatcttactttacacatacgtgtatgtacacacacacacacaatacaagacatttttcctgttttagaaaatatagcccttgtttggattactgctgtctgagcactagaaatttctaatggaaagaggcctctgaatggctaagggaacatctggaaaggaaggaaaatgagccctaaaggttttttggttgcttgtttttgtttctttttctttcttgtttccttttttgtttttaaatccttctctagtgactgaagaaattgtgagtacataatatttaggtcatggttaaggaacattaaaataaacctgcagtttaacagaattttgtattaaatgggggagtgtcaatttgcatcatttgcatattgatttcaagtctcctaatttggaatgggtaaagtacaaatgttaatgcaacatagtacagttgtatttgtccttcatattcaggatgtgatatttacaaaatgcagaacagtttaaacttgttaagtcacattccagattaggagaaaatgggcaataatcatctctgttttgcccccattctactacccaccactgcccaccccacccccacatcacacactcttcgatgctttcccacagcccctgctccgctcctctccgtaagaaactcacttcactgtttttcacttttcacttctggcttttttgtggcccaaggccaatataggattaatatctgtgttccagcttcagccagaacgatatgtctgtccatctttctcctttcttccagcacacacagctaagagataagaaggctgcaaggattggggataaggagtatattttcaagccaagaaccagtagaaaacagaaataatggtgctcccaaatattcagtaccttgggcaatccaggaagggtttaaagagacctgttgctgcatagaactctccctgccctaccccttaactccaccttagtgccagggccgagggctggtctgcatgctggaagaggttgagagttttggaattgattccatgctaaatgtcagttaccagtttggattgatgaaagtgatttttctgctttacctttttcctgtcagaaaggttttcctctgtgctacccttaacttagggatgaacagactataactaggaaaggaggaaaggtatcagggatttttaagtccgtttagagagcaaaccatattgtgcctcttcatcttgacccaggctcttatagataggtcctaaacattgctgttcactagattatcttaacaaataatactcagctaaatatttgcatttaggaatactcctaaaacagatattgccaactagatacactgcctcaatcttgaccagacaagagaacagttaagttctctcagttgggtagtaacttgaataccagtctatttatcagttggtttcaacacagaggtttcaagtggaaagccattcatcttaaaagctgaacagaaaaattaaaaaaaaaaaaaacacattacaatctggccttttagaaaatgaagcagtagaaacaaaacctttattagtatggtattccagcagcacctttaaagcaatctttaccttagttttttgagttgttttacctttcatcccaatctgaaaagttttaataaatgctgagcttattcttagggtatgacctggcattatttccagtgactagtcaggcattatgcctgatgcatacgcctcccgtgcacccctatctagccttcagatgtcctccactgcaggtcaccccaggagatagcatcaataatatagtctcagtcttgtttataaagattctaagttgtctagtaaataagtctccctgaatcttaaataattttggagaattagaattctccatcctattaaacagaaagtaaagccaaatagcctggagttgtttgtcctacttgttccataacccctatgctcaagatactgaagctatctgtggtatttcatgtaacatttctaagaataagagctggcaaatgggaaacttggggtggagagagcatacttattgggctgtgaaggcatacggatgtacatgttttagagcttatctcagatttaaatagccaaaggaagacctcattgccttccaggtgaaggtgcaaagtcatacatattaatgacctgacagttaacattctgttgtttattattgcctttctccaccttagagagccataaataactctctggtgaagtgatttgctataatgggggtgaggagtggggagacttctctggtcattacactgctatttatttctagaactcactatcagtgagcagtgccagagtgttttctctttgacctagaggtttcacatcatagcaaggagggaaaagtctccccatctccttacaactgtgtgctaagtaagtaacttggccaagggtagttttcagctcaatttatagaatagtccaaagagactttgagaaacatggtgataggcaggggcctttcctaccatgtttcaatacctacaaacctattgaaagagaacagtaggtaaaacatttcctaaagttgaagcaatagcttcgtagattcttggttactttattttttttaatgctttacatttgatacaactattgaagatcaattttaaaaatagctttccagtaatatattttaagtaatatatattttaatatctgtaaaaagtgacagtggaagactttgaatttctcatatatggtatgtttgatgtaggacctcactgttaaggcacaaattatttcaaaggaagttactctaaagacactcagattatttcagaaaaatgcaataaggggaatagttttggggtttattttttattttaaaagaaaattgacttatttaccacaagctatttttttcccttctggctgtaaggtttgtacagactggtttggtaaatgctaaacttttgtgtcttttgcctttttaaaggaattgttaacattggaattgagggtatgtacagagaagttggtgtcaacaccatttaaaaagtcatattttttcacaaatatagaaaatcattttacataagaattttaagtatttgcaataaatatatgtatatagattgtatgtattcctatattcttatttttcattttattattaagtaaaagatcattaaaagtgaaaataaaaaccttggagttttttggtgaatcttgaggtttaacatacatctgagagtggcgtgggtaagagtcctcagttactgccttatactcctatgggatggttcccacagattgtatggaagagagtaaaatgaggaacttggtgataaatcagggtagtgtatttcttttggaatttaagtaaaactgattaaattttccttatctgtctgtctccatgttttctcccttaatctgttttgtctcctaaccc

SEQ ID NO: 433790 - DNA, 8470 bp, Homo sapiens
  misc_feature (3567)..(3567): n is a, c, g, or t
aacgatggtcctcacgcttctcttagacatcaccatccttggtcccttctgatttcctctttccccatcatctccgggagtcaaagtcagctccttcaacgctatttcaatcccacagccacaatcttagtctaggctttccccttccttcagcctagattactgcacagccagtgactctgtacctgccaaacctgcaacatgggaaggaaagcaatctgatggacagacaggcagccctcaaaactcaaactccagcttttcttcctcagttaaagtggaaaatactttactaggcttggggaagaagtcattccagagatctgagagactccataccagacaaatgaaaagaactaaatgtgctgacattgacgttgagacaccggactccattctggttaatacaaatctgcgagcactgatcaacaagcacacattttcagtccttcctggagattgccagcaacgactgcttttactactcccagaggtagatcgacaggttggtccagatggtttaatgaagttaaatggctcagcccttaacaatgaattcttcacttcagcagcccaaggctggaagggaaagactctcagaaggtgagtttacacctgagatgcaggtgagaattcgacaagagattgagaaggagaaaaaagtggagccatggaaagaacaattctttgaaagctactatgggcagagttctggcctgagccttgaagattctaagaaattgacagcttctcccagtgatcccaaagtaaagaaaaccccagctgaacaaccaaaatccatgcctgtgtcagaggcctctcttatcagaatagttccagtagtctcccagtcagagtgtaaagaagaagcattgcaaatgtcatcaccaggcagaaaagaagagtgtgaaagccaaggtgaagtgcagccgaacttctccacatcttcagagcccctgctttcctcagctctcaatacacatgagcttagcagcattcttcccatcaagtgcccaaaggatgaggatctcttggagcagaagccagtcacctctgctgaacaggaatctgagaagaaccatctcaccacagcttctaattataacaaaagtgaaagccaagaatctttagttacatcgccaagcaaacccaagagtcctggggttgaaaaaccaatagtgaagcccacagcaggagcgggtccacaggagactaatatgaaagaacctctagcaactcttgttgatcagagcccagaaagcctcaagaggaagtcttccctcacccaagaagaggcccctgtgagctgggagaagaggccacgtgtcactgagaatcgccagcaccagcagccatttcaggtctcaccacagccctttctcaatagaggggacagaatccaggtgcgaaaagtaccacctctcaagatcccggtctccagaatctcccccatgccgtttcatccatcgcaggtctctcccagggctcgttttccagtctccatcactagtcctaacagaacaggagccagaactcttgcagacatcaaagcaaaagcccaactggtcaaagcacagagggcagcagctgccgctgccgccgcagctgctgcagccgcctcagttggagggaccattccaggacctggcccagggggtggacaaggtccaggagagggtggtgaagggcagactgctagaggaggcagtccaggctcagacagagtcagtgaaactggaaagggccccacactggaactggcaggaactggaagcaggggaggtacgagagagcttttaccctgtggtccagagactcagccccagtctgagaccaagaccaccccaagccaggcacagcctcatagtgtctctggagcacaactacagcaaacccccccagtgcctccaacacctgccgtcagtggagcatgcacaagtgtcccatcaccagcccacatagagaaattggataatgaaaaactgaaccccaccagagcaacagccacagtggcctctgtcagccatccacaagggcccagtagttgcagacaggagaaagcaccttctccaacaggtcctgctctaatctcaggtgcctcacctgttcattgtgcagctgatggcacagttgagctcaaagcaggtcctagtaagaatatacctaacccttcagcctcatcaaagacagatgctagtgtgccagtggctgtaactccctcccctttaacatctttattgaccacagccactttagaaaagcttcctgtaccccaggtcagtgcaactacagcacctgctggatcagctccaccctcgagcactttgccagcagcttctagccttaaaaccccaggaacttctttaaacatgaatggacccactttaagaccaacctctagtatccctgctaataatcctttagtgactcagctgcttcaaggcaaagatgttcccatggagcaaattctgcctaaacctctcaccaaagttgaaatgaaaacggttccactgactgcaaaagaggaaagggggatgggagcgctcatagctaccaacacaacagaaaatagcaccagagaggaagttaatgagagacagtcccatccagctacgcagcagcagctgggcaaaaccttgcaaagtaagcagctcccccaggttccaaggccccttcagctcttttcagctaaggagctgagggactccagcattgacacacaccaataccacgaaggactaagtaaagcaacccaagatcagatccttcagactctcattcagagggttcggaggcagaatcttctctcagttgtgccgccctcacagttcaacttcgctcactcaggtttccagctggaagacatctccacaagccagaggttcatgctgggttttgctggcagaaggacatccaaacctgcaatggcagggcactacttactgaatatttctacctacggccggggctcagagagctttaggaggacccattctgtaaaccctgaagatcgtttttgtctaagcagccccactgaagccttgaaaatgggatatacagactgtaaaaatgcaacaggagagagtagcagcagcaaagaagatgacactgatgaggaaagtactggtgatgagcaggaatctgtcacagtgaaagaggagccccaggtttcccagagtgctggcaagggtgacacaagttcaggacctcacagcagggaaactctatctaccagtgattgcttagctagcaagaatgtgaaggctgagataccattgaatgagcaaaccactttaagtaaggagaattacctgttcactagaggccaaacatttgatgaaaagaccctagccagagatttaattcaggcagcacagaagcagatggctcatgcagtgagaggtaaggcaatccgtagcagccccgagcttttcagttctactgttcttcctctgcctgcagacagccccacccaccagcccctactccttccacccctgcaaaccccgaagttgtatggaagccccacccagatagggccaagctatagaggcatgatcaatgtcnccacctcatctgacatggaccataactctgctgtaccaggtagccaggtatctagcaatgtaggtgatgtcatgtcattttcagtgactgtcactaccatccctgctagccaagctatgaatcccagcagccatggccagaccattcctgttcaggcgttctccgaagagaacagcatagagggcacgccttcgaaatgttactgccgcttgaaagccatgatcatgtgcaaaggctgtggcgctttctgccatgatgattgcatcggcccctccaaactgtgcgtctcctgccttgtcgttcggtaatgagactagaaagagatacactgtaaaggagggggaagggaagggttgaccagttgggttttttgcgtccttttggaatcacagaaataaacaagtaggtttcagttgtcttcagagacaaatgttacttaatcaggaatacaaagtacagattttttacattttagaggaagagcaccttgtatagtaagtctaagtcaagcaagactttgtgaatttgtgacaagtttgcacttacaaaatcatgtaaatatgtcacattttgtttaacattatttttccaagtgtttaggtaataatgtattactttgaattcagattaatgttctactacttgtgactgagaaaagtttaatgccggcatggtaaaaggaagctgtctcccttctgacatttcctaggaagctaggaaaaggaaagtgaaggaatggtctaaagaaatgaccattcacactgattttgtctggacagtctggccgcaggttattcatagattattcagcctttgcaggacttggattcagggttttactcagtccctttaccttaggtggaatcttcttaaattgaaatttttggtaaggaattcatttcacaggtagtgtttcagactctgaaagccctgacttggttcttggcttctactgtactagttactagttactggtactgttgccaagcaatctgcttggaatttgtggatccctgctgttccctaatcccaccccctgccctgagacagtgaatgtagtccgtgaagggagtgcctctctgggaccccctgtgttgttacaggctgtgcagtgcaacaattccagcaaaaataccctatccccgcacttagtcattcgtggtaactaacaattttgaaatactcatataaaatgaacaggaaagtgttagtgattgggtgatttgagctacatcttgttgagcaaggggagtgaaaccacagaaactgttaaattgaacgtaaataactttggaaaacagttttgacactagaacaaggtcgcttctcttttcctcttctctcccaacctgttaacctagtgctagatagtcagctgctgttgcaggtagaaaagctcaccaatgccacatttgttcattctgttcaacctgttttgacctcccaggcatctgaacaggatgacatcatcttattatatcttactttacacatacgtgtatgtacacacacacacacaatacaagacatttttcctgttttagaaaatatagcccttgtttggattactgctgtctgagcactagaaatttctaatggaaagaggcctctgaatggctaagggaacatctggaaaggaaggaaaatgagccctaaaggttttttggttgcttgtttttgtttctttttctttcttgtttccttttttgtttttaaatccttctctagtgactgaagaaattgtgagtacataatatttaggtcatggttaaggaacattaaaataaacctgcagtttaacagaattttgtattaaatgggggagtgtcaatttgcatcatttgcatattgatttcaagtctcctaatttggaatgggtaaagtacaaatgttaatgcaacatagtacagttgtatttgtccttcatattcaggatgtgatatttacaaaatgcagaacagtttaaacttgttaagtcacattccagattaggagaaaatgggcaataatcatctctgttttgcccccattctactacccaccactgcccaccccacccccacatcacacactcttcgatgctttcccacagcccctgctccgctcctctccgtaagaaactcacttcactgtttttcacttttcacttctggcttttttgtggcccaaggccaatataggattaatatctgtgttccagcttcagccagaacgatatgtctgtccatctttctcctttcttccagcacacacagctaagagataagaaggctgcaaggattggggataaggagtatattttcaagccaagaaccagtagaaaacagaaataatggtgctcccaaatattcagtaccttgggcaatccaggaagggtttaaagagacctgttgctgcatagaactctccctgccctaccccttaactccaccttagtgccagggccgagggctggtctgcatgctggaagaggttgagagttttggaattgattccatgctaaatgtcagttaccagtttggattgatgaaagtgatttttctgctttacctttttcctgtcagaaaggttttcctctgtgctacccttaacttagggatgaacagactataactaggaaaggaggaaaggtatcagggatttttaagtccgtttagagagcaaaccatattgtgcctcttcatcttgacccaggctcttatagataggtcctaaacattgctgttcactagattatcttaacaaataatactcagctaaatatttgcatttaggaatactcctaaaacagatattgccaactagatacactgcctcaatcttgaccagacaagagaacagttaagttctctcagttgggtagtaacttgaataccagtctatttatcagttggtttcaacacagaggtttcaagtggaaagccattcatcttaaaagctgaacagaaaaattaaaaaaaaaaaaaacacattacaatctggccttttagaaaatgaagcagtagaaacaaaacctttattagtatggtattccagcagcacctttaaagcaatctttaccttagttttttgagttgttttacctttcatcccaatctgaaaagttttaataaatgctgagcttattcttagggtatgacctggcattatttccagtgactagtcaggcattatgcctgatgcatacgcctcccgtgcacccctatctagccttcagatgtcctccactgcaggtcaccccaggagatagcatcaataatatagtctcagtcttgtttataaagattctaagttgtctagtaaataagtctccctgaatcttaaataattttggagaattagaattctccatcctattaaacagaaagtaaagccaaatagcctggagttgtttgtcctacttgttccataacccctatgctcaagatactgaagctatctgtggtatttcatgtaacatttctaagaataagagctggcaaatgggaaacttggggtggagagagcatacttattgggctgtgaaggcatacggatgtacatgttttagagcttatctcagatttaaatagccaaaggaagacctcattgccttccaggtgaaggtgcaaagtcatacatattaatgacctgacagttaacattctgttgtttattattgcctttctccaccttagagagccataaataactctctggtgaagtgatttgctataatgggggtgaggagtggggagacttctctggtcattacactgctatttatttctagaactcactatcagtgagcagtgccagagtgttttctctttgacctagaggtttcacatcatagcaaggagggaaaagtctccccatctccttacaactgtgtgctaagtaagtaacttggccaagggtagttttcagctcaatttatagaatagtccaaagagactttgagaaacatggtgataggcaggggcctttcctaccatgtttcaatacctacaaacctattgaaagagaacagtaggtaaaacatttcctaaagttgaagcaatagcttcgtagattcttggttactttattttttttaatgctttacatttgatacaactattgaagatcaattttaaaaatagctttccagtaatatattttaagtaatatatattttaatatctgtaaaaagtgacagtggaagactttgaatttctcatatatggtatgtttgatgtaggacctcactgttaaggcacaaattatttcaaaggaagttactctaaagacactcagattatttcagaaaaatgcaataaggggaatagttttggggtttattttttattttaaaagaaaattgacttatttaccacaagctatttttttcccttctggctgtaaggtttgtacagactggtttggtaaatgctaaacttttgtgtcttttgcctttttaaaggaattgttaacattggaattgagggtatgtacagagaagttggtgtcaacaccatttaaaaagtcatattttttcacaaatatagaaaatcattttacataagaattttaagtatttgcaataaatatatgtatatagattgtatgtattcctatattcttatttttcattttattattaagtaaaagatcattaaaagtgaaaataaaaaccttggagttttttggtgaatcttgaggtttaacatacatctgagagtggcgtgggtaagagtcctcagttactgccttatactcctatgggatggttcccacagattgtatggaagagagtaaaatgaggaacttggtgataaatcagggtagtgtatttcttttggaatttaagtaaaactgattaaattttccttatctgtctgtctccatgttttctcccttaatctgttttgtctcctaaccc

SEQ ID NO: 433791 - DNA, 8790 bp, Homo sapiens
  misc_feature (4169)..(4169): n is a, c, g, or t
caccacgcccggccaaacatgggtgaatttcttttaaaacctgaaaataaagaattttttttctctgatgcttcttgaagtgtacatgtttatcttttagtctggcaaactcacttctaagaattaacctcagagataagctgtcaaaaatacaaaatggcagagattaagaacaatgattctcagactcgagcttgcgtcagaatcacctacaggacgtatggtgcagattcctgggcctcacttcagagtatctgattcagtagatctgggcttccacccaataattttcatttctaatagatttttaggtagtaatgatgttgttctgggtaccacatcttagaaccactggttaagatgtagtcatgagaacaaaagaccagaaacaacccaaaaaaatacccatcaacaaaatctggtggaagaaatcacgatcgatatacacaatggaattctatgcaactattaaaaggaatgcagaagagttccatgttctgttctaggatatcctccaggatgcattgagttttttcacttaaatcaaagtggctcccgcctgggcaacagatatcgtcgtcctccccgcagtcaggctgcccatcacccaccattccagcaggtaaagtcatttctccatcacagaagcacagcaagaaggcactaaagcaggcgctaaagcagcaacagcagaagaagcagcagcagcaatgcaggccaagcatatccatctcctccaaccagcatctctcactaaagactgtcaaagcagccagtgactctgtacctgccaaacctgcaacatgggaaggaaagcaatctgatggacagacaggcagccctcaaaactcaaactccagcttttcttcctcagttaaagtggaaaatactttactaggcttggggaagaagtcattccagagatctgagagactccataccagacaaatgaaaagaactaaatgtgctgacattgacgttgagacaccggactccattctggttaatacaaatctgcgagcactgatcaacaagcacacattttcagtccttcctggagattgccagcaacgactgcttttactactcccagaggtagatcgacaggttggtccagatggtttaatgaagttaaatggctcagcccttaacaatgaattcttcacttcagcagcccaaggctggaagggaaagactctcagaaggtgagtttacacctgagatgcaggtgagaattcgacaagagattgagaaggagaaaaaagtggagccatggaaagaacaattctttgaaagctactatgggcagagttctggcctgagccttgaagattctaagaaattgacagcttctcccagtgatcccaaagtaaagaaaaccccagctgaacaaccaaaatccatgcctgtgtcagaggcctctcttatcagaatagttccagtagtctcccagtcagagtgtaaagaagaagcattgcaaatgtcatcaccaggcagaaaagaagagtgtgaaagccaaggtgaagtgcagccgaacttctccacatcttcagagcccctgctttcctcagctctcaatacacatgagcttagcagcattcttcccatcaagtgcccaaaggatgaggatctcttggagcagaagccagtcacctctgctgaacaggaatctgagaagaaccatctcaccacagcttctaattataacaaaagtgaaagccaagaatctttagttacatcgccaagcaaacccaagagtcctggggttgaaaaaccaatagtgaagcccacagcaggagcgggtccacaggagactaatatgaaagaacctctagcaactcttgttgatcagagcccagaaagcctcaagaggaagtcttccctcacccaagaagaggcccctgtgagctgggagaagaggccacgtgtcactgagaatcgccagcaccagcagccatttcaggtctcaccacagccctttctcaatagaggggacagaatccaggtgcgaaaagtaccacctctcaagatcccggtctccagaatctcccccatgccgtttcatccatcgcaggtctctcccagggctcgttttccagtctccatcactagtcctaacagaacaggagccagaactcttgcagacatcaaagcaaaagcccaactggtcaaagcacagagggcagcagctgccgctgccgccgcagctgctgcagccgcctcagttggagggaccattccaggacctggcccagggggtggacaaggtccaggagagggtggtgaagggcagactgctagaggaggcagtccaggctcagacagagtcagtgaaactggaaagggccccacactggaactggcaggaactggaagcaggggaggtacgagagagcttttaccctgtggtccagagactcagccccagtctgagaccaagaccaccccaagccaggcacagcctcatagtgtctctggagcacaactacagcaaacccccccagtgcctccaacacctgccgtcagtggagcatgcacaagtgtcccatcaccagcccacatagagaaattggataatgaaaaactgaaccccaccagagcaacagccacagtggcctctgtcagccatccacaagggcccagtagttgcagacaggagaaagcaccttctccaacaggtcctgctctaatctcaggtgcctcacctgttcattgtgcagctgatggcacagttgagctcaaagcaggtcctagtaagaatatacctaacccttcagcctcatcaaagacagatgctagtgtgccagtggctgtaactccctcccctttaacatctttattgaccacagccactttagaaaagcttcctgtaccccaggtcagtgcaactacagcacctgctggatcagctccaccctcgagcactttgccagcagcttctagccttaaaaccccaggaacttctttaaacatgaatggacccactttaagaccaacctctagtatccctgctaataatcctttagtgactcagctgcttcaaggcaaagatgttcccatggagcaaattctgcctaaacctctcaccaaagttgaaatgaaaacggttccactgactgcaaaagaggaaagggggatgggagcgctcatagctaccaacacaacagaaaatagcaccagagaggaagttaatgagagacagtcccatccagctacgcagcagcagctgggcaaaaccttgcaaagtaagcagctcccccaggttccaaggccccttcagctcttttcagctaaggagctgagggactccagcattgacacacaccaataccacgaaggactaagtaaagcaacccaagatcagatccttcagactctcattcagagggttcggaggcagaatcttctctcagttgtgccgccctcacagttcaacttcgctcactcaggtttccagctggaagacatctccacaagccagaggttcatgctgggttttgctggcagaaggacatccaaacctgcaatggcagggcactacttactgaatatttctacctacggccggggctcagagagctttaggaggacccattctgtaaaccctgaagatcgtttttgtctaagcagccccactgaagccttgaaaatgggatatacagactgtaaaaatgcaacaggagagagtagcagcagcaaagaagatgacactgatgaggaaagtactggtgatgagcaggaatctgtcacagtgaaagaggagccccaggtttcccagagtgctggcaagggtgacacaagttcaggacctcacagcagggaaactctatctaccagtgattgcttagctagcaagaatgtgaaggctgagataccattgaatgagcaaaccactttaagtaaggagaattacctgttcactagaggccaaacatttgatgaaaagaccctagccagagatttaattcaggcagcacagaagcagatggctcatgcagtgagaggtaaggcaatccgtagcagccccgagcttttcagttctactgttcttcctctgcctgcagacagccccacccaccagcccctactccttccacccctgcaaaccccgaagttgtatggaagccccacccagatagggccaagctatagaggcatgatcaatgtcnccacctcatctgacatggaccataactctgctgtaccaggtagccaggtatctagcaatgtaggtgatgtcatgtcattttcagtgactgtcactaccatccctgctagccaagctatgaatcccagcagccatggccagaccattcctgttcaggcgttctccgaagagaacagcatagagggcacgccttcgaaatgttactgccgcttgaaagccatgatcatgtgcaaaggctgtggcgctttctgccatgatgattgcatcggcccctccaaactgtgcgtctcctgccttgtcgttcggtaatgagactagaaagagatacactgtaaaggagggggaagggaagggttgaccagttgggttttttgcgtccttttggaatcacagaaataaacaagtaggtttcagttgtcttcagagacaaatgttacttaatcaggaatacaaagtacagattttttacattttagaggaagagcaccttgtatagtaagtctaagtcaagcaagactttgtgaatttgtgacaagtttgcacttacaaaatcatgtaaatatgtcacattttgtttaacattatttttccaagtgtttaggtaataatgtattactttgaattcagattaatgttctactacttgtgactgagaaaagtttaatgccggcatggtaaaaggaagctgtctcccttctgacatttcctaggaagctaggaaaaggaaagtgaaggaatggtctaaagaaatgaccattcacactgattttgtctggacagtctggccgcaggttattcatagattattcagcctttgcaggacttggattcagggttttactcagtccctttaccttaggtggaatcttcttaaattgaaatttttggtaaggaattcatttcacaggtagtgtttcagactctgaaagccctgacttggttcttggcttctactgtactagttactagttactggtactgttgccaagcaatctgcttggaatttgtggatccctgctgttccctaatcccaccccctgccctgagacagtgaatgtagtccgtgaagggagtgcctctctgggaccccctgtgttgttacaggctgtgcagtgcaacaattccagcaaaaataccctatccccgcacttagtcattcgtggtaactaacaattttgaaatactcatataaaatgaacaggaaagtgttagtgattgggtgatttgagctacatcttgttgagcaaggggagtgaaaccacagaaactgttaaattgaacgtaaataactttggaaaacagttttgacactagaacaaggtcgcttctcttttcctcttctctcccaacctgttaacctagtgctagatagtcagctgctgttgcaggtagaaaagctcaccaatgccacatttgttcattctgttcaacctgttttgacctcccaggcatctgaacaggatgacatcatcttattatatcttactttacacatacgtgtatgtacacacacacacacaatacaagacatttttcctgttttagaaaatatagcccttgtttggattactgctgtctgagcactagaaatttctaatggaaagaggcctctgaatggctaagggaacatctggaaaggaaggaaaatgagccctaaaggttttttggttgcttgtttttgtttctttttctttcttgtttccttttttgtttttaaatccttctctagtgactgaagaaattgtgagtacataatatttaggtcatggttaaggaacattaaaataaacctgcagtttaacagaattttgtattaaatgggggagtgtcaatttgcatcatttgcatattgatttcaagtctcctaatttggaatgggtaaagtacaaatgttaatgcaacatagtacagttgtatttgtccttcatattcaggatgtgatatttacaaaatgcagaacagtttaaacttgttaagtcacattccagattaggagaaaatgggcaataatcatctctgttttgcccccattctactacccaccactgcccaccccacccccacatcacacactcttcgatgctttcccacagcccctgctccgctcctctccgtaagaaactcacttcactgtttttcacttttcacttctggcttttttgtggcccaaggccaatataggattaatatctgtgttccagcttcagccagaacgatatgtctgtccatctttctcctttcttccagcacacacagctaagagataagaaggctgcaaggattggggataaggagtatattttcaagccaagaaccagtagaaaacagaaataatggtgctcccaaatattcagtaccttgggcaatccaggaagggtttaaagagacctgttgctgcatagaactctccctgccctaccccttaactccaccttagtgccagggccgagggctggtctgcatgctggaagaggttgagagttttggaattgattccatgctaaatgtcagttaccagtttggattgatgaaagtgatttttctgctttacctttttcctgtcagaaaggttttcctctgtgctacccttaacttagggatgaacagactataactaggaaaggaggaaaggtatcagggatttttaagtccgtttagagagcaaaccatattgtgcctcttcatcttgacccaggctcttatagataggtcctaaacattgctgttcactagattatcttaacaaataatactcagctaaatatttgcatttaggaatactcctaaaacagatattgccaactagatacactgcctcaatcttgaccagacaagagaacagttaagttctctcagttgggtagtaacttgaataccagtctatttatcagttggtttcaacacagaggtttcaagtggaaagccattcatcttaaaagctgaacagaaaaattaaaaaaaaaaaaaacacattacaatctggccttttagaaaatgaagcagtagaaacaaaacctttattagtatggtattccagcagcacctttaaagcaatctttaccttagttttttgagttgttttacctttcatcccaatctgaaaagttttaataaatgctgagcttattcttagggtatgacctggcattatttccagtgactagtcaggcattatgcctgatgcatacgcctcccgtgcacccctatctagccttcagatgtcctccactgcaggtcaccccaggagatagcatcaataatatagtctcagtcttgtttataaagattctaagttgtctagtaaataagtctccctgaatcttaaataattttggagaattagaattctccatcctattaaacagaaagtaaagccaaatagcctggagttgtttgtcctacttgttccataacccctatgctcaagatactgaagctatctgtggtatttcatgtaacatttctaagaataagagctggcaaatgggaaacttggggtggagagagcatacttattgggctgtgaaggcatacggatgtacatgttttagagcttatctcagatttaaatagccatctccttacaactgtgtgctaagtaagtaacttggccaagggtagttttcagctcaatttatagaatagtccaaagagactttgagaaacatggtgataggcaggggcctttcctaccatgtttcaatacctacaaacctattgaaagagaacagtaggtaaaacatttcctaaagttgaagcaatagcttcgtagattcttggttactttattttttttaatgctttacatttgatacaactattgaagatcaattttaaaaatagctttccagtaatatattttaagtaatatatattttaatatctgtaaaaagtgacagtggaagactttgaatttctcatatatggtatgtttgatgtaggacctcactgttaaggcacaaattatttcaaaggaagttactctaaagacactcagattatttcagaaaaatgcaataaggggaatagttttggggtttattttttattttaaaagaaaattgacttatttaccacaagctatttttttcccttctggctgtaaggtttgtacagactggtttggtaaatgctaaacttttgtgtcttttgcctttttaaaggaattgttaacattggaattgagggtatgtacagagaagttggtgtcaacaccatttaaaaagtcatattttttcacaaatatagaaaatcattttacataagaattttaagtatttgcaataaatatatgtatatagattgtatgtattcctatattcttatttttcattttattattaagtaaaagatcattaaaagtgaaaataaaaaccttggagttttttggtgaatcttgaggtttaacatacatctgagagtggcgtgggtaagagtcctcagttactgccttatactcctatgggatggttcccacagattgtatggaagagagtaaaatgaggaacttggtgataaatcagggtagtgtatttcttttggaatttaagtaaaactgattaaattttccttatctgtctgtctccatgttttctcccttaatctgttttgtctcctaaccc

SEQ ID NO: 433792 - DNA, 9027 bp, Homo sapiens
  misc_feature (4124)..(4124): n is a, c, g, or t
caccacgcccggccaaacatgggtgaatttcttttaaaacctgaaaataaagaattttttttctctgatgcttcttgaagtgtacatgtttatcttttagtctggcaaactcacttctaagaattaacctcagagataagctgtcaaaaatacaaaatggcagagattaagaacaatgattctcagactcgagcttgcgtcagaatcacctacaggacgtatggtgcagattcctgggcctcacttcagagtatctgattcagtagatctgggcttccacccaataattttcatttctaatagatttttaggtagtaatgatgttgttctgggtaccacatcttagaaccactggttaagatgtagtcatgagaacaaaagaccagaaacaacccaaaaaaatacccatcaacaaaatctggtggaagaaatcacgatcgatatacacaatggaattctatgcaactattaaaaggaatgcagaagagttccatgttctgttctaggatatcctccaggatgcattgagttttttcacttaaatcaaagtggctcccgcctgggcaacagatatcgtcgtcctccccgcagtcaggctgcccatcacccaccattccagcaggtaaagtcatttctccatcacagaagcacagcaagaaggcactaaagcaggcgctaaagcagcaacagcagaagaagcagcagcagcaatgcaggccaagcatatccatctcctccaaccagcatctctcactaaagactgtcaaagcagccagtgactctgtacctgccaaacctgcaacatgggaaggaaagcaatctgatggacagacaggcagccctcaaaactcaaactccagcttttcttcctcagttaaagtggaaaatactttactaggcttggggaagaagtcattccagagatctgagagactccataccagacaaatgaaaagaactaaatgtgctgacattgacgttgagacaccggactccattctggttaatacaaatctgcgagcactgatcaacaagcacacattttcagtccttcctggagattgccagcaacgactgcttttactactcccagaggtagatcgacaggttggtccagatggtttaatgaagttaaatggctcagcccttaacaatgaattcttcacttcagcagcccaaggctggaagggaaagactctcagaaggtgagtttacacctgagatgcaggtgagaattcgacaagagattgagaaggagaaaaaagtggagccatggaaagaacaattctttgaaagctactatgggcagagttctggcctgagccttgaagattctaagaaattgacagcttctcccagtgatcccaaagtaaagaaaaccccagctgaacaaccaaaatccatgcctgtgtcagaggcctctcttatcagaatagttccagtagtctcccagtcagagtgtaaagaagaagcattgcaaatgtcatcaccaggcagaaaagaagagtgtgaaagccaaggtgaagtgcagccgaacttctccacatcttcagagcccctgctttcctcagctctcaatacacatgagcttagcagcattcttcccatcaagtgcccaaaggatgaggatctcttggagcagaagccagtcacctctgctgaacaggaatctgagaagaaccatctcaccacagcttctaattataacaaaagtgaaagccaagaatctttagttacatcgccaagcaaacccaagagtcctggggttgaaaaaccaatagtgaagcccacagcaggagcgggtccacaggagactaatatgaaagaacctctagcaactcttgttgatcagagcccagaaagcctcaagaggaagtcttccctcacccaagaagaggcccctgtgagctgggagaagaggccacgtgtcactgagaatcgccagcaccagcagccatttcaggtctcaccacagccctttctcaatagaggggacagaatccaggtgcgaaaagtaccacctctcaaggtctctcccagggctcgttttccagtctccatcactagtcctaacagaacaggagccagaactcttgcagacatcaaagcaaaagcccaactggtcaaagcacagagggcagcagctgccgctgccgccgcagctgctgcagccgcctcagttggagggaccattccaggacctggcccagggggtggacaaggtccaggagagggtggtgaagggcagactgctagaggaggcagtccaggctcagacagagtcagtgaaactggaaagggccccacactggaactggcaggaactggaagcaggggaggtacgagagagcttttaccctgtggtccagagactcagccccagtctgagaccaagaccaccccaagccaggcacagcctcatagtgtctctggagcacaactacagcaaacccccccagtgcctccaacacctgccgtcagtggagcatgcacaagtgtcccatcaccagcccacatagagaaattggataatgaaaaactgaaccccaccagagcaacagccacagtggcctctgtcagccatccacaagggcccagtagttgcagacaggagaaagcaccttctccaacaggtcctgctctaatctcaggtgcctcacctgttcattgtgcagctgatggcacagttgagctcaaagcaggtcctagtaagaatatacctaacccttcagcctcatcaaagacagatgctagtgtgccagtggctgtaactccctcccctttaacatctttattgaccacagccactttagaaaagcttcctgtaccccaggtcagtgcaactacagcacctgctggatcagctccaccctcgagcactttgccagcagcttctagccttaaaaccccaggaacttctttaaacatgaatggacccactttaagaccaacctctagtatccctgctaataatcctttagtgactcagctgcttcaaggcaaagatgttcccatggagcaaattctgcctaaacctctcaccaaagttgaaatgaaaacggttccactgactgcaaaagaggaaagggggatgggagcgctcatagctaccaacacaacagaaaatagcaccagagaggaagttaatgagagacagtcccatccagctacgcagcagcagctgggcaaaaccttgcaaagtaagcagctcccccaggttccaaggccccttcagctcttttcagctaaggagctgagggactccagcattgacacacaccaataccacgaaggactaagtaaagcaacccaagatcagatccttcagactctcattcagagggttcggaggcagaatcttctctcagttgtgccgccctcacagttcaacttcgctcactcaggtttccagctggaagacatctccacaagccagaggttcatgctgggttttgctggcagaaggacatccaaacctgcaatggcagggcactacttactgaatatttctacctacggccggggctcagagagctttaggaggacccattctgtaaaccctgaagatcgtttttgtctaagcagccccactgaagccttgaaaatgggatatacagactgtaaaaatgcaacaggagagagtagcagcagcaaagaagatgacactgatgaggaaagtactggtgatgagcaggaatctgtcacagtgaaagaggagccccaggtttcccagagtgctggcaagggtgacacaagttcaggacctcacagcagggaaactctatctaccagtgattgcttagctagcaagaatgtgaaggctgagataccattgaatgagcaaaccactttaagtaaggagaattacctgttcactagaggccaaacatttgatgaaaagaccctagccagagatttaattcaggcagcacagaagcagatggctcatgcagtgagaggtaaggcaatccgtagcagccccgagcttttcagttctactgttcttcctctgcctgcagacagccccacccaccagcccctactccttccacccctgcaaaccccgaagttgtatggaagccccacccagatagggccaagctatagaggcatgatcaatgtcnccacctcatctgacatggaccataactctgctgtaccaggtagccaggtatctagcaatgtaggtgatgtcatgtcattttcagtgactgtcactaccatccctgctagccaagctatgaatcccagcagccatggccagaccattcctgttcaggcgttctccgaagagaacagcatagagggcacgccttcgaaatgttactgccgcttgaaagccatgatcatgtgcaaaggctgtggcgctttctgccatgatgattgcatcggcccctccaaactgtgcgtctcctgccttgtcgttcggtaatgagactagaaagagatacactgtaaaggagggggaagggaagggttgaccagttgggttttttgcgtccttttggaatcacagaaataaacaagtaggtttcagttgtcttcagagacaaatgttacttaatcaggaatacaaagtacagattttttacattttagaggaagagcaccttgtatagtaagtctaagtcaagcaagactttgtgaatttgtgacaagtttgcacttacaaaatcatgtaaatatgtcacattttgtttaacattatttttccaagtgtttaggtaataatgtattactttgaattcagattaatgttctactacttgtgactgagaaaagtttaatgccggcatggtaaaaggaagctgtctcccttctgacatttcctaggaagctaggaaaaggaaagtgaaggaatggtctaaagaaatgaccattcacactgattttgtctggacagtctggccgcaggttattcatagattattcagcctttgcaggacttggattcagggttttactcagtccctttaccttaggtggaatcttcttaaattgaaatttttggtaaggaattcatttcacaggtagtgtttcagactctgaaagccctgacttggttcttggcttctactgtactagttactagttactggtactgttgccaagcaatctgcttggaatttgtggatccctgctgttccctaatcccaccccctgccctgagacagtgaatgtagtccgtgaagggagtgcctctctgggaccccctgtgttgttacaggctgtgcagtgcaacaattccagcaaaaataccctatccccgcacttagtcattcgtggtaactaacaattttgaaatactcatataaaatgaacaggaaagtgttagtgattgggtgatttgagctacatcttgttgagcaaggggagtgaaaccacagaaactgttaaattgaacgtaaataactttggaaaacagttttgacactagaacaaggtcgcttctcttttcctcttctctcccaacctgttaacctagtgctagatagtcagctgctgttgcaggtagaaaagctcaccaatgccacatttgttcattctgttcaacctgttttgacctcccaggcatctgaacaggatgacatcatcttattatatcttactttacacatacgtgtatgtacacacacacacacaatacaagacatttttcctgttttagaaaatatagcccttgtttggattactgctgtctgagcactagaaatttctaatggaaagaggcctctgaatggctaagggaacatctggaaaggaaggaaaatgagccctaaaggttttttggttgcttgtttttgtttctttttctttcttgtttccttttttgtttttaaatccttctctagtgactgaagaaattgtgagtacataatatttaggtcatggttaaggaacattaaaataaacctgcagtttaacagaattttgtattaaatgggggagtgtcaatttgcatcatttgcatattgatttcaagtctcctaatttggaatgggtaaagtacaaatgttaatgcaacatagtacagttgtatttgtccttcatattcaggatgtgatatttacaaaatgcagaacagtttaaacttgttaagtcacattccagattaggagaaaatgggcaataatcatctctgttttgcccccattctactacccaccactgcccaccccacccccacatcacacactcttcgatgctttcccacagcccctgctccgctcctctccgtaagaaactcacttcactgtttttcacttttcacttctggcttttttgtggcccaaggccaatataggattaatatctgtgttccagcttcagccagaacgatatgtctgtccatctttctcctttcttccagcacacacagctaagagataagaaggctgcaaggattggggataaggagtatattttcaagccaagaaccagtagaaaacagaaataatggtgctcccaaatattcagtaccttgggcaatccaggaagggtttaaagagacctgttgctgcatagaactctccctgccctaccccttaactccaccttagtgccagggccgagggctggtctgcatgctggaagaggttgagagttttggaattgattccatgctaaatgtcagttaccagtttggattgatgaaagtgatttttctgctttacctttttcctgtcagaaaggttttcctctgtgctacccttaacttagggatgaacagactataactaggaaaggaggaaaggtatcagggatttttaagtccgtttagagagcaaaccatattgtgcctcttcatcttgacccaggctcttatagataggtcctaaacattgctgttcactagattatcttaacaaataatactcagctaaatatttgcatttaggaatactcctaaaacagatattgccaactagatacactgcctcaatcttgaccagacaagagaacagttaagttctctcagttgggtagtaacttgaataccagtctatttatcagttggtttcaacacagaggtttcaagtggaaagccattcatcttaaaagctgaacagaaaaattaaaaaaaaaaaaaacacattacaatctggccttttagaaaatgaagcagtagaaacaaaacctttattagtatggtattccagcagcacctttaaagcaatctttaccttagttttttgagttgttttacctttcatcccaatctgaaaagttttaataaatgctgagcttattcttagggtatgacctggcattatttccagtgactagtcaggcattatgcctgatgcatacgcctcccgtgcacccctatctagccttcagatgtcctccactgcaggtcaccccaggagatagcatcaataatatagtctcagtcttgtttataaagattctaagttgtctagtaaataagtctccctgaatcttaaataattttggagaattagaattctccatcctattaaacagaaagtaaagccaaatagcctggagttgtttgtcctacttgttccataacccctatgctcaagatactgaagctatctgtggtatttcatgtaacatttctaagaataagagctggcaaatgggaaacttggggtggagagagcatacttattgggctgtgaaggcatacggatgtacatgttttagagcttatctcagatttaaatagccaaaggaagacctcattgccttccaggtgaaggtgcaaagtcatacatattaatgacctgacagttaacattctgttgtttattattgcctttctccaccttagagagccataaataactctctggtgaagtgatttgctataatgggggtgaggagtggggagacttctctggtcattacactgctatttatttctagaactcactatcagtgagcagtgccagagtgttttctctttgacctagaggtttcacatcatagcaaggagggaaaagtctccccatctccttacaactgtgtgctaagtaagtaacttggccaagggtagttttcagctcaatttatagaatagtccaaagagactttgagaaacatggtgataggcaggggcctttcctaccatgtttcaatacctacaaacctattgaaagagaacagtaggtaaaacatttcctaaagttgaagcaatagcttcgtagattcttggttactttattttttttaatgctttacatttgatacaactattgaagatcaattttaaaaatagctttccagtaatatattttaagtaatatatattttaatatctgtaaaaagtgacagtggaagactttgaatttctcatatatggtatgtttgatgtaggacctcactgttaaggcacaaattatttcaaaggaagttactctaaagacactcagattatttcagaaaaatgcaataaggggaatagttttggggtttattttttattttaaaagaaaattgacttatttaccacaagctatttttttcccttctggctgtaaggtttgtacagactggtttggtaaatgctaaacttttgtgtcttttgcctttttaaaggaattgttaacattggaattgagggtatgtacagagaagttggtgtcaacaccatttaaaaagtcatattttttcacaaatatagaaaatcattttacataagaattttaagtatttgcaataaatatatgtatatagattgtatgtattcctatattcttatttttcattttattattaagtaaaagatcattaaaagtgaaaataaaaaccttggagttttttggtgaatcttgaggtttaacatacatctgagagtggcgtgggtaagagtcctcagttactgccttatactcctatgggatggttcccacagattgtatggaagagagtaaaatgaggaacttggtgataaatcagggtagtgtatttcttttggaatttaagtaaaactgattaaattttccttatctgtctgtctccatgttttctcccttaatctgttttgtctcctaaccc

SEQ ID NO: 433793 - DNA, 2463 bp, Homo sapiens
gcggccgcctactactactactgctcgaattcaagcttctaacgatgtacggggacatgctaaatgtcagttaccagtttggattgatgaaagtgatttttctgctttacctttttcctgtcagaaaggttttcctctgtgctacccttaacttagggatgaacagactataactaggaaaggaggaaaggtatcagggatttttaagtccgtttagagagcaaaccatattgtgcctcttcatcttgacccaggctcttatagataggtcctaaacattgctgttcactagattatcttaacaaataatactcagctaaatatttgcatttaggaatactcctaaaacagatattgccaactagatacactgcctcaatcttgaccagacaagagaacagttaagttctctcagttgggtagtaacttgaataccagtctatttatcagttggtttcaacacagaggtttcaagtggaaagccattcatcttaaaagctgaacagaaaaattaaaaaaaaaaaaaacacattacaatctggccttttagaaaatgaagcagtagaaacaaaacctttattagtatggtattccagcagcacctttaaagcaatctttaccttagttttttgagttgttttacctttcatcccaatctgaaaagttttaataaatgctgagcttattcttagggtatgacctggcattatttccagtgactagtcaggcattatgcctgatgcatacgcctcccgtgcacccctatctagccttcagatgtcctccactgcaggtcaccccaggagatagcatcaataatatagtctcagtcttgtttataaagattctaagttgtctagtaaataagtctccctgaatcttaaataattttggagaattagaattctccatcctattaaacagaaagtaaagccaaatagcctggagttgtttgtcctacttgttccataacccctatgctcaagatactgaagctatctgtggtatttcatgtaacatttctaagaataagagctggcaaatgggaaacttggggtggagagagcatacttattgggctgtgaaggcatacggatgtacatgttttagagcttatctcagatttaaatagccaaaggaagacctcattgccttccaggtgaaggtgcaaagtcatacatattaatgacctgacagttaacattctgttgtttattattgcctttctccaccttagagagccataaataactctctggtgaagtgatttgctataatgggggtgaggagtggggagacttctctggtcattacactgctatttatttctagaactcactatcagtgagcagtgccagagtgttttctctttgacctagaggtttcacatcatagcaaggagggaaaagtctccccatctccttacaactgtgtgctaagtaagtaacttggccaagggtagttttcagctcaatttatagaatagtccaaagagactttgagaaacatggtgataggcaggggcctttcctaccatgtttcaatacctacaaacctattgaaagagaacagtaggtaaaacatttcctaaagttgaagcaatagcttcgtagattcttggttactttattttttttaatgctttacatttgatacaactattgaagatcaattttaaaaatagctttccagtaatatattttaagtaatatatattttaatatctgtaaaaagtgacagtggaagactttgaatttctcatatatggtatgtttgatgtaggacctcactgttaaggcacaaattatttcaaaggaagttactctaaagacactcagattatttcagaaaaatgcaataaggggaatagttttggggtttattttttattttaaaagaaaattgacttatttaccacaagctatttttttcccttctggctgtaaggtttgtacagactggtttggtaaatgctaaacttttgtgtcttttgcctttttaaaggaattgttaacattggaattgagggtatgtacagagaagttggtgtcaacaccatttaaaaagtcatattttttcacaaatatagaaaatcattttacataagaattttaagtatttgcaataaatatatgtatatagattgtatgtattcctatattcttatttttcattttattattaagtaaaagatcattaaaagtgaaaataaaaaccttggagttttttggtgaatcttgaggtttaacatacatctgagagtggcgtgggtaagagtcctcagttactgccttatactcctatgggatggttcccacagattgtatggaagagagtaaaatgaggaacttggtgataaatcagggtagtgtatttcttttggaatttaagtaaaactgattaaattttccttatctgtctgtctccatgttttctcccttaatctgttttgtctcctaaccc

SEQ ID NO: 433794 - DNA, 1090 bp, Homo sapiens
gctcgggcccagctcagtaagttgaaaatggtcctaagcagactccgagaaaattgggtggatcagtgcacgtgagggtgcctttgcgcttatcctactgctcatactaataaacacatagccacacggctgaggtttgaacacggaagcagattacgttgagagctaaatacaatgtatggtagattgcttgagagtcaattaggcttgtgcagtcatatctactctgggtagattctatagtctgtagtcctcgaatgtctatatataatctgtgactgcaaactattgaagatcaattttaaaaatagctttccagtaatatattttaagtaatatatattttaatatctgtaaaaagtgacagtggaagactttgaatttctcatatatggtatgtttgatgtaggacctcactgttaaggcacaaattatttcaaaggaagttactctaaagacactcagattatttcagaaaaatgcaataaggggaatagttttggggtttattttttattttaaaagaaaattgacttatttaccacaagctatttttttcccttctggctgtaaggtttgtacagactggtttggtaaatgctaaacttttgtgtcttttgcctttttaaaggaattgttaacattggaattgagggtatgtacagagaagttggtgtcaacaccatttaaaaagtcatattttttcacaaatatagaaaatcattttacataagaattttaagtatttgcaataaatatatgtatatagattgtatgtattcctatattcttatttttcattttattattaagtaaaagatcattaaaagtgaaaataaaaaccttggagttttttggtgaatcttgaggtttaacatacatctgagagtggcgtgggtaagagtcctcagttactgccttatactcctatgggatggttcccacagattgtatggaagagagtaaaatgaggaacttggtgataaatcagggtagtgtatttcttttggaatttaagtaaaactgattaaattttccttatctgtctgtctccatgttttctcccttaatctgttttgtctcctaaccc

SEQ ID NO: 433795 - DNA, 5693 bp, Homo sapiens
  misc_feature (4169)..(4169): n is a, c, g, or t
caccacgcccggccaaacatgggtgaatttcttttaaaacctgaaaataaagaattttttttctctgatgcttcttgaagtgtacatgtttatcttttagtctggcaaactcacttctaagaattaacctcagagataagctgtcaaaaatacaaaatggcagagattaagaacaatgattctcagactcgagcttgcgtcagaatcacctacaggacgtatggtgcagattcctgggcctcacttcagagtatctgattcagtagatctgggcttccacccaataattttcatttctaatagatttttaggtagtaatgatgttgttctgggtaccacatcttagaaccactggttaagatgtagtcatgagaacaaaagaccagaaacaacccaaaaaaatacccatcaacaaaatctggtggaagaaatcacgatcgatatacacaatggaattctatgcaactattaaaaggaatgcagaagagttccatgttctgttctaggatatcctccaggatgcattgagttttttcacttaaatcaaagtggctcccgcctgggcaacagatatcgtcgtcctccccgcagtcaggctgcccatcacccaccattccagcaggtaaagtcatttctccatcacagaagcacagcaagaaggcactaaagcaggcgctaaagcagcaacagcagaagaagcagcagcagcaatgcaggccaagcatatccatctcctccaaccagcatctctcactaaagactgtcaaagcagccagtgactctgtacctgccaaacctgcaacatgggaaggaaagcaatctgatggacagacaggcagccctcaaaactcaaactccagcttttcttcctcagttaaagtggaaaatactttactaggcttggggaagaagtcattccagagatctgagagactccataccagacaaatgaaaagaactaaatgtgctgacattgacgttgagacaccggactccattctggttaatacaaatctgcgagcactgatcaacaagcacacattttcagtccttcctggagattgccagcaacgactgcttttactactcccagaggtagatcgacaggttggtccagatggtttaatgaagttaaatggctcagcccttaacaatgaattcttcacttcagcagcccaaggctggaagggaaagactctcagaaggtgagtttacacctgagatgcaggtgagaattcgacaagagattgagaaggagaaaaaagtggagccatggaaagaacaattctttgaaagctactatgggcagagttctggcctgagccttgaagattctaagaaattgacagcttctcccagtgatcccaaagtaaagaaaaccccagctgaacaaccaaaatccatgcctgtgtcagaggcctctcttatcagaatagttccagtagtctcccagtcagagtgtaaagaagaagcattgcaaatgtcatcaccaggcagaaaagaagagtgtgaaagccaaggtgaagtgcagccgaacttctccacatcttcagagcccctgctttcctcagctctcaatacacatgagcttagcagcattcttcccatcaagtgcccaaaggatgaggatctcttggagcagaagccagtcacctctgctgaacaggaatctgagaagaaccatctcaccacagcttctaattataacaaaagtgaaagccaagaatctttagttacatcgccaagcaaacccaagagtcctggggttgaaaaaccaatagtgaagcccacagcaggagcgggtccacaggagactaatatgaaagaacctctagcaactcttgttgatcagagcccagaaagcctcaagaggaagtcttccctcacccaagaagaggcccctgtgagctgggagaagaggccacgtgtcactgagaatcgccagcaccagcagccatttcaggtctcaccacagccctttctcaatagaggggacagaatccaggtgcgaaaagtaccacctctcaagatcccggtctccagaatctcccccatgccgtttcatccatcgcaggtctctcccagggctcgttttccagtctccatcactagtcctaacagaacaggagccagaactcttgcagacatcaaagcaaaagcccaactggtcaaagcacagagggcagcagctgccgctgccgccgcagctgctgcagccgcctcagttggagggaccattccaggacctggcccagggggtggacaaggtccaggagagggtggtgaagggcagactgctagaggaggcagtccaggctcagacagagtcagtgaaactggaaagggccccacactggaactggcaggaactggaagcaggggaggtacgagagagcttttaccctgtggtccagagactcagccccagtctgagaccaagaccaccccaagccaggcacagcctcatagtgtctctggagcacaactacagcaaacccccccagtgcctccaacacctgccgtcagtggagcatgcacaagtgtcccatcaccagcccacatagagaaattggataatgaaaaactgaaccccaccagagcaacagccacagtggcctctgtcagccatccacaagggcccagtagttgcagacaggagaaagcaccttctccaacaggtcctgctctaatctcaggtgcctcacctgttcattgtgcagctgatggcacagttgagctcaaagcaggtcctagtaagaatatacctaacccttcagcctcatcaaagacagatgctagtgtgccagtggctgtaactccctcccctttaacatctttattgaccacagccactttagaaaagcttcctgtaccccaggtcagtgcaactacagcacctgctggatcagctccaccctcgagcactttgccagcagcttctagccttaaaaccccaggaacttctttaaacatgaatggacccactttaagaccaacctctagtatccctgctaataatcctttagtgactcagctgcttcaaggcaaagatgttcccatggagcaaattctgcctaaacctctcaccaaagttgaaatgaaaacggttccactgactgcaaaagaggaaagggggatgggagcgctcatagctaccaacacaacagaaaatagcaccagagaggaagttaatgagagacagtcccatccagctacgcagcagcagctgggcaaaaccttgcaaagtaagcagctcccccaggttccaaggccccttcagctcttttcagctaaggagctgagggactccagcattgacacacaccaataccacgaaggactaagtaaagcaacccaagatcagatccttcagactctcattcagagggttcggaggcagaatcttctctcagttgtgccgccctcacagttcaacttcgctcactcaggtttccagctggaagacatctccacaagccagaggttcatgctgggttttgctggcagaaggacatccaaacctgcaatggcagggcactacttactgaatatttctacctacggccggggctcagagagctttaggaggacccattctgtaaaccctgaagatcgtttttgtctaagcagccccactgaagccttgaaaatgggatatacagactgtaaaaatgcaacaggagagagtagcagcagcaaagaagatgacactgatgaggaaagtactggtgatgagcaggaatctgtcacagtgaaagaggagccccaggtttcccagagtgctggcaagggtgacacaagttcaggacctcacagcagggaaactctatctaccagtgattgcttagctagcaagaatgtgaaggctgagataccattgaatgagcaaaccactttaagtaaggagaattacctgttcactagaggccaaacatttgatgaaaagaccctagccagagatttaattcaggcagcacagaagcagatggctcatgcagtgagaggtaaggcaatccgtagcagccccgagcttttcagttctactgttcttcctctgcctgcagacagccccacccaccagcccctactccttccacccctgcaaaccccgaagttgtatggaagccccacccagatagggccaagctatagaggcatgatcaatgtcnccacctcatctgacatggaccataactctgctgtaccaggtagccaggtatctagcaatgtaggtgatgtcatgtcattttcagtgactgtcactaccatccctgctagccaagctatgaatcccagcagccatggccagaccattcctgttcaggcgttctccgaagagaacagcatagagggcacgccttcgaaatgttactgccgcttgaaagccatgatcatgtgcaaaggctgtggcgctttctgccatgatgattgcatcggcccctccaaactgtgcgtctcctgccttgtcgttcggtaatgagactagaaagagatacactgtaaaggagggggaagggaagggttgaccagttgggttttttgcgtccttttggaatcacagaaataaacaagtaggtttcagttgtcttcagagacaaatgttacttaatcaggaatacaaagtacagattttttacattttagaggaagagcaccttgtatagtaagtctaagtcaagcaagactttgtgaatttgtgacaagtttgcacttacaaaatcatgtaaatatgtcacattttgtttaacattatttttccaagtgtttaggtaataatgtattactttgaattcagattaatgttctactacttgtgactgagaaaagtttaatgccggcatggtaaaaggaagctgtctcccttctgacatttcctaggaagctaggaaaaggaaagtgaaggaatggtctaaagaaatgaccattcacactgattttgtctggacagtctggccgcaggttattcatagattattcagcctttgcaggacttggattcagggttttactcagtccctttaccttaggtggaatcttcttaaattgaaatttttggtaaggaattcatttcacaggtagtgtttcagactctgaaagccctgacttggttcttggcttctactgtactagttactagttactggtactgttgccaagcaatctgcttggaatttgtggatccctgctgttccctaatcccaccccctgccctgagacagtgaatgtagtccgtgaagggagtgcctctctgggaccccctgtgttgttacaggctgtgcagtgcaacaattccagcaaaaataccctatccccgcacttagtcattcgtggtaactaacaattttgaaatactcatataaaatgaacaggaaagtgttagtgactcagctgcttcaaggcaaagatgttcccatggagcaaattctgcctaaacctctcaccaaagttgaaatgaaaacggttccactgactgcaaaagaggaaagggggatgggagcgctcatagctaccaacacgacagaaaatagcaccagagaggaagttaatgagagacagtcccatccagctacgcagcagcagctgggcaaaccttgcaagtaagcagctcccccaggttccaggccccttcagctcttttcagctaaggagctgagggactccagcatgacacttcatccgagcgtaccgacctg

SEQ ID NO: 433796 - DNA, 691 bp, Homo sapiens
gaacccaatatggcagcggcggtagcagtggcaacggcagcaagaggaccggccgccccatagacccccccgcgcaccacccccgccgcttcctctgcttggtgcccccccggtctgacttcccttttctcccacctttcccggcaccgcgggaaaagcagcgcagggcagagcaggcagggagggcggccggagcccggacacgggagcctcccagtcagttcaagacccgacatgagggaaaagggacgtaggaagaagggcaggacctgggcggaggccgccaagacggtcttagaaaaataccccaatacacccatgagtcataaagaaattcttcaagttatccagagagaaggactaaaagaaatcagaagtgggacttctcctcttgcatgcctgaatgcaatgcttcacacaaactccagaggtgaagagggcatcttctataaggttccaggtagaatgggagtatatactttgaagaaagatgtgccggatggggtgaaagagctgtcagaaggttcagaagaaagcagtgatggtcagtcagattcccagagttctgagaacagcagcagcagcagtgatggtggcagcaacaaggagggaaaaaagagcaggtggaaaaggaaaggtaaatccacctgatccttcaataaagtattaaatgctgtaggacaaaaaaaaa

SEQ ID NO: 433797 - DNA, 9149 bp, Homo sapiens
  misc_feature (4169)..(4169): n is a, c, g, or t
  misc_feature (9020)..(9020): n is a, c, g, or t
  misc_feature (9023)..(9023): n is a, c, g, or t
  misc_feature (9031)..(9031): n is a, c, g, or t
  misc_feature (9034)..(9034): n is a, c, g, or t
caccacgcccggccaaacatgggtgaatttcttttaaaacctgaaaataaagaattttttttctctgatgcttcttgaagtgtacatgtttatcttttagtctggcaaactcacttctaagaattaacctcagagataagctgtcaaaaatacaaaatggcagagattaagaacaatgattctcagactcgagcttgcgtcagaatcacctacaggacgtatggtgcagattcctgggcctcacttcagagtatctgattcagtagatctgggcttccacccaataattttcatttctaatagatttttaggtagtaatgatgttgttctgggtaccacatcttagaaccactggttaagatgtagtcatgagaacaaaagaccagaaacaacccaaaaaaatacccatcaacaaaatctggtggaagaaatcacgatcgatatacacaatggaattctatgcaactattaaaaggaatgcagaagagttccatgttctgttctaggatatcctccaggatgcattgagttttttcacttaaatcaaagtggctcccgcctgggcaacagatatcgtcgtcctccccgcagtcaggctgcccatcacccaccattccagcaggtaaagtcatttctccatcacagaagcacagcaagaaggcactaaagcaggcgctaaagcagcaacagcagaagaagcagcagcagcaatgcaggccaagcatatccatctcctccaaccagcatctctcactaaagactgtcaaagcagccagtgactctgtacctgccaaacctgcaacatgggaaggaaagcaatctgatggacagacaggcagccctcaaaactcaaactccagcttttcttcctcagttaaagtggaaaatactttactaggcttggggaagaagtcattccagagatctgagagactccataccagacaaatgaaaagaactaaatgtgctgacattgacgttgagacaccggactccattctggttaatacaaatctgcgagcactgatcaacaagcacacattttcagtccttcctggagattgccagcaacgactgcttttactactcccagaggtagatcgacaggttggtccagatggtttaatgaagttaaatggctcagcccttaacaatgaattcttcacttcagcagcccaaggctggaagggaaagactctcagaaggtgagtttacacctgagatgcaggtgagaattcgacaagagattgagaaggagaaaaaagtggagccatggaaagaacaattctttgaaagctactatgggcagagttctggcctgagccttgaagattctaagaaattgacagcttctcccagtgatcccaaagtaaagaaaaccccagctgaacaaccaaaatccatgcctgtgtcagaggcctctcttatcagaatagttccagtagtctcccagtcagagtgtaaagaagaagcattgcaaatgtcatcaccaggcagaaaagaagagtgtgaaagccaaggtgaagtgcagccgaacttctccacatcttcagagcccctgctttcctcagctctcaatacacatgagcttagcagcattcttcccatcaagtgcccaaaggatgaggatctcttggagcagaagccagtcacctctgctgaacaggaatctgagaagaaccatctcaccacagcttctaattataacaaaagtgaaagccaagaatctttagttacatcgccaagcaaacccaagagtcctggggttgaaaaaccaatagtgaagcccacagcaggagcgggtccacaggagactaatatgaaagaacctctagcaactcttgttgatcagagcccagaaagcctcaagaggaagtcttccctcacccaagaagaggcccctgtgagctgggagaagaggccacgtgtcactgagaatcgccagcaccagcagccatttcaggtctcaccacagccctttctcaatagaggggacagaatccaggtgcgaaaagtaccacctctcaagatcccggtctccagaatctcccccatgccgtttcatccatcgcaggtctctcccagggctcgttttccagtctccatcactagtcctaacagaacaggagccagaactcttgcagacatcaaagcaaaagcccaactggtcaaagcacagagggcagcagctgccgctgccgccgcagctgctgcagccgcctcagttggagggaccattccaggacctggcccagggggtggacaaggtccaggagagggtggtgaagggcagactgctagaggaggcagtccaggctcagacagagtcagtgaaactggaaagggccccacactggaactggcaggaactggaagcaggggaggtacgagagagcttttaccctgtggtccagagactcagccccagtctgagaccaagaccaccccaagccaggcacagcctcatagtgtctctggagcacaactacagcaaacccccccagtgcctccaacacctgccgtcagtggagcatgcacaagtgtcccatcaccagcccacatagagaaattggataatgaaaaactgaaccccaccagagcaacagccacagtggcctctgtcagccatccacaagggcccagtagttgcagacaggagaaagcaccttctccaacaggtcctgctctaatctcaggtgcctcacctgttcattgtgcagctgatggcacagttgagctcaaagcaggtcctagtaagaatatacctaacccttcagcctcatcaaagacagatgctagtgtgccagtggctgtaactccctcccctttaacatctttattgaccacagccactttagaaaagcttcctgtaccccaggtcagtgcaactacagcacctgctggatcagctccaccctcgagcactttgccagcagcttctagccttaaaaccccaggaacttctttaaacatgaatggacccactttaagaccaacctctagtatccctgctaataatcctttagtgactcagctgcttcaaggcaaagatgttcccatggagcaaattctgcctaaacctctcaccaaagttgaaatgaaaacggttccactgactgcaaaagaggaaagggggatgggagcgctcatagctaccaacacaacagaaaatagcaccagagaggaagttaatgagagacagtcccatccagctacgcagcagcagctgggcaaaaccttgcaaagtaagcagctcccccaggttccaaggccccttcagctcttttcagctaaggagctgagggactccagcattgacacacaccaataccacgaaggactaagtaaagcaacccaagatcagatccttcagactctcattcagagggttcggaggcagaatcttctctcagttgtgccgccctcacagttcaacttcgctcactcaggtttccagctggaagacatctccacaagccagaggttcatgctgggttttgctggcagaaggacatccaaacctgcaatggcagggcactacttactgaatatttctacctacggccggggctcagagagctttaggaggacccattctgtaaaccctgaagatcgtttttgtctaagcagccccactgaagccttgaaaatgggatatacagactgtaaaaatgcaacaggagagagtagcagcagcaaagaagatgacactgatgaggaaagtactggtgatgagcaggaatctgtcacagtgaaagaggagccccaggtttcccagagtgctggcaagggtgacacaagttcaggacctcacagcagggaaactctatctaccagtgattgcttagctagcaagaatgtgaaggctgagataccattgaatgagcaaaccactttaagtaaggagaattacctgttcactagaggccaaacatttgatgaaaagaccctagccagagatttaattcaggcagcacagaagcagatggctcatgcagtgagaggtaaggcaatccgtagcagccccgagcttttcagttctactgttcttcctctgcctgcagacagccccacccaccagcccctactccttccacccctgcaaaccccgaagttgtatggaagccccacccagatagggccaagctatagaggcatgatcaatgtcnccacctcatctgacatggaccataactctgctgtaccaggtagccaggtatctagcaatgtaggtgatgtcatgtcattttcagtgactgtcactaccatccctgctagccaagctatgaatcccagcagccatggccagaccattcctgttcaggcgttctccgaagagaacagcatagagggcacgccttcgaaatgttactgccgcttgaaagccatgatcatgtgcaaaggctgtggcgctttctgccatgatgattgcatcggcccctccaaactgtgcgtctcctgccttgtcgttcggtaatgagactagaaagagatacactgtaaaggagggggaagggaagggttgaccagttgggttttttgcgtccttttggaatcacagaaataaacaagtaggtttcagttgtcttcagagacaaatgttacttaatcaggaatacaaagtacagattttttacattttagaggaagagcaccttgtatagtaagtctaagtcaagcaagactttgtgaatttgtgacaagtttgcacttacaaaatcatgtaaatatgtcacattttgtttaacattatttttccaagtgtttaggtaataatgtattactttgaattcagattaatgttctactacttgtgactgagaaaagtttaatgccggcatggtaaaaggaagctgtctcccttctgacatttcctaggaagctaggaaaaggaaagtgaaggaatggtctaaagaaatgaccattcacactgattttgtctggacagtctggccgcaggttattcatagattattcagcctttgcaggacttggattcagggttttactcagtccctttaccttaggtggaatcttcttaaattgaaatttttggtaaggaattcatttcacaggtagtgtttcagactctgaaagccctgacttggttcttggcttctactgtactagttactagttactggtactgttgccaagcaatctgcttggaatttgtggatccctgctgttccctaatcccaccccctgccctgagacagtgaatgtagtccgtgaagggagtgcctctctgggaccccctgtgttgttacaggctgtgcagtgcaacaattccagcaaaaataccctatccccgcacttagtcattcgtggtaactaacaattttgaaatactcatataaaatgaacaggaaagtgttagtgattgggtgatttgagctacatcttgttgagcaaggggagtgaaaccacagaaactgttaaattgaacgtaaataactttggaaaacagttttgacactagaacaaggtcgcttctcttttcctcttctctcccaacctgttaacctagtgctagatagtcagctgctgttgcaggtagaaaagctcaccaatgccacatttgttcattctgttcaacctgttttgacctcccaggcatctgaacaggatgacatcatcttattatatcttactttacacatacgtgtatgtacacacacacacacaatacaagacatttttcctgttttagaaaatatagcccttgtttggattactgctgtctgagcactagaaatttctaatggaaagaggcctctgaatggctaagggaacatctggaaaggaaggaaaatgagccctaaaggttttttggttgcttgtttttgtttctttttctttcttgtttccttttttgtttttaaatccttctctagtgactgaagaaattgtgagtacataatatttaggtcatggttaaggaacattaaaataaacctgcagtttaacagaattttgtattaaatgggggagtgtcaatttgcatcatttgcatattgatttcaagtctcctaatttggaatgggtaaagtacaaatgttaatgcaacatagtacagttgtatttgtccttcatattcaggatgtgatatttacaaaatgcagaacagtttaaacttgttaagtcacattccagattaggagaaaatgggcaataatcatctctgttttgcccccattctactacccaccactgcccaccccacccccacatcacacactcttcgatgctttcccacagcccctgctccgctcctctccgtaagaaactcacttcactgtttttcacttttcacttctggcttttttgtggcccaaggccaatataggattaatatctgtgttccagcttcagccagaacgatatgtctgtccatctttctcctttcttccagcacacacagctaagagataagaaggctgcaaggattggggataaggagtatattttcaagccaagaaccagtagaaaacagaaataatggtgctcccaaatattcagtaccttgggcaatccaggaagggtttaaagagacctgttgctgcatagaactctccctgccctaccccttaactccaccttagtgccagggccgagggctggtctgcatgctggaagaggttgagagttttggaattgattccatgctaaatgtcagttaccagtttggattgatgaaagtgatttttctgctttacctttttcctgtcagaaaggttttcctctgtgctacccttaacttagggatgaacagactataactaggaaaggaggaaaggtatcagggatttttaagtccgtttagagagcaaaccatattgtgcctcttcatcttgacccaggctcttatagataggtcctaaacattgctgttcactagattatcttaacaaataatactcagctaaatatttgcatttaggaatactcctaaaacagatattgccaactagatacactgcctcaatcttgaccagacaagagaacagttaagttctctcagttgggtagtaacttgaataccagtctatttatcagttggtttcaacacagaggtttcaagtggaaagccattcatcttaaaagctgaacagaaaaattaaaaaaaaaaaaaacacattacaatctggccttttagaaaatgaagcagtagaaacaaaacctttattagtatggtattccagcagcacctttaaagcaatctttaccttagttttttgagttgttttacctttcatcccaatctgaaaagttttaataaatgctgagcttattcttagggtatgacctggcattatttccagtgactagtcaggcattatgcctgatgcatacgcctcccgtgcacccctatctagccttcagatgtcctccactgcaggtcaccccaggagatagcatcaataatatagtctcagtcttgtttataaagattctaagttgtctagtaaataagtctccctgaatcttaaataattttggagaattagaattctccatcctattaaacagaaagtaaagccaaatagcctggagttgtttgtcctacttgttccataacccctatgctcaagatactgaagctatctgtggtatttcatgtaacatttctaagaataagagctggcaaatgggaaacttggggtggagagagcatacttattgggctgtgaaggcatacggatgtacatgttttagagcttatctcagatttaaatagccaaaggaagacctcattgccttccaggtgaaggtgcaaagtcatacatattaatgacctgacagttaacattctgttgtttattattgcctttctccaccttagagagccataaataactctctggtgaagtgatttgctataatgggggtgaggagtggggagacttctctggtcattacactgctatttatttctagaactcactatcagtgagcagtgccagagtgttttctctttgacctagaggtttcacatcatagcaaggagggaaaagtctccccatctccttacaactgtgtgctaagtaagtaacttggccaagggtagttttcagctcaatttatagaatagtccaaagagactttgagaaacatggtgataggcaggggcctttcctaccatgtttcaatacctacaaacctattgaaagagaacagtaggtaaaacatttcctaaagttgaagcaatagcttcgtagattcttggttactttattttttttaatgctttacatttgatacaactattgaagatcaattttaaaaatagctttccagtaatatattttaagtaatatatattttaatatctgtaaaaagtgacagtggaagactttgaatttctcatatatggtatgtttgatgtaggacctcactgttaaggcacaaattatttcaaaggaagttactctaaagacactcagattatttcagaaaaatgcaataaggggaatagttttggggtttattttttattttaaaagaaaattgacttatttaccacaagctatttttttcccttctggctgtaaggtttgtacagactggtttggtaaatgctaaacttttgtgtcttttgcctttttaaaggaattgttaacattggaattgagggtatgtacagagaagttggtgtcaacaccatttaaaaagtcatattttttcacaaatatagaaaatcattttacataagaattttaagtatttgcaataaatatatgtatatagattgtatgtattcctatattcttatttttcattttattattaagtaaaagatcattaaaagtgaaaataaaaaccttggagttttttggtgaatcttgaggtttaacatacatctgagagtggcgtgggtaagagtcctcagttactgccttatactcctatgggatggttcccacagattgtatggaagagagtaaaatgaggaacttggtgataaatcagggtagtgtatttcttttggaatttaagtaaaactgattaaattttancanaccaacancancaacaccaccacacaccacacacacacggggcccgcccaaagaaatccccgcgggcccccaattcgccgcaccacccctccctgcaacacgtgggcccccaagaggggccccaaa

SEQ ID NO: 433798 - DNA, 9138 bp, Homo sapiens
  misc_feature (4235)..(4235): n is a, c, g, or t
gaacccaatatggcagcggcggtagcagtggcaacggcagcaagaggaccggccgccccatagacccccccgcgcaccacccccgccgcttcctctgcttggtgcccccccggtctgacttcccttttctcccacctttcccggcaccgcgggaaaagcagcgcagggcagagcaggcagggagggcggccggagcccggacacgggagcctcccagtcagttcaagacccgacatgagggaaaagggacgtaggaagaagggcaggacctgggcggaggccgccaagacggtcttagaaaaataccccaatacacccatgagtcataaagaaattcttcaagttatccagagagaaggactaaaagaaatcagaagtgggacttctcctcttgcatgcctgaatgcaatgcttcacacaaactccagaggtgaagagggcatcttctataaggttccaggtagaatgggagtatatactttgaagaaagatgtgccggatggggtgaaagagctgtcagaaggttcagaagaaagcagtgatggtcagtcagattcccagagttctgagaacagcagcagcagcagtgatggtggcagcaacaaggagggaaaaaagagcaggtggaaaaggaaagtatcgtcgtcctccccgcagtcaggctgcccatcacccaccattccagcaggtaaagtcatttctccatcacagaagcacagcaagaaggcactaaagcaggcgctaaagcagcaacagcagaagaagcagcagcagcaatgcaggccaagcatatccatctcctccaaccagcatctctcactaaagactgtcaaagcagccagtgactctgtacctgccaaacctgcaacatgggaaggaaagcaatctgatggacagacaggcagccctcaaaactcaaactccagcttttcttcctcagttaaagtggaaaatactttactaggcttggggaagaagtcattccagagatctgagagactccataccagacaaatgaaaagaactaaatgtgctgacattgacgttgagacaccggactccattctggttaatacaaatctgcgagcactgatcaacaagcacacattttcagtccttcctggagattgccagcaacgactgcttttactactcccagaggtagatcgacaggttggtccagatggtttaatgaagttaaatggctcagcccttaacaatgaattcttcacttcagcagcccaaggctggaagggaaagactctcagaaggtgagtttacacctgagatgcaggtgagaattcgacaagagattgagaaggagaaaaaagtggagccatggaaagaacaattctttgaaagctactatgggcagagttctggcctgagccttgaagattctaagaaattgacagcttctcccagtgatcccaaagtaaagaaaaccccagctgaacaaccaaaatccatgcctgtgtcagaggcctctcttatcagaatagttccagtagtctcccagtcagagtgtaaagaagaagcattgcaaatgtcatcaccaggcagaaaagaagagtgtgaaagccaaggtgaagtgcagccgaacttctccacatcttcagagcccctgctttcctcagctctcaatacacatgagcttagcagcattcttcccatcaagtgcccaaaggatgaggatctcttggagcagaagccagtcacctctgctgaacaggaatctgagaagaaccatctcaccacagcttctaattataacaaaagtgaaagccaagaatctttagttacatcgccaagcaaacccaagagtcctggggttgaaaaaccaatagtgaagcccacagcaggagcgggtccacaggagactaatatgaaagaacctctagcaactcttgttgatcagagcccagaaagcctcaagaggaagtcttccctcacccaagaagaggcccctgtgagctgggagaagaggccacgtgtcactgagaatcgccagcaccagcagccatttcaggtctcaccacagccctttctcaatagaggggacagaatccaggtgcgaaaagtaccacctctcaagatcccggtctccagaatctcccccatgccgtttcatccatcgcaggtctctcccagggctcgttttccagtctccatcactagtcctaacagaacaggagccagaactcttgcagacatcaaagcaaaagcccaactggtcaaagcacagagggcagcagctgccgctgccgccgcagctgctgcagccgcctcagttggagggaccattccaggacctggcccagggggtggacaaggtccaggagagggtggtgaagggcagactgctagaggaggcagtccaggctcagacagagtcagtgaaactggaaagggccccacactggaactggcaggaactggaagcaggggaggtacgagagagcttttaccctgtggtccagagactcagccccagtctgagaccaagaccaccccaagccaggcacagcctcatagtgtctctggagcacaactacagcaaacccccccagtgcctccaacacctgccgtcagtggagcatgcacaagtgtcccatcaccagcccacatagagaaattggataatgaaaaactgaaccccaccagagcaacagccacagtggcctctgtcagccatccacaagggcccagtagttgcagacaggagaaagcaccttctccaacaggtcctgctctaatctcaggtgcctcacctgttcattgtgcagctgatggcacagttgagctcaaagcaggtcctagtaagaatatacctaacccttcagcctcatcaaagacagatgctagtgtgccagtggctgtaactccctcccctttaacatctttattgaccacagccactttagaaaagcttcctgtaccccaggtcagtgcaactacagcacctgctggatcagctccaccctcgagcactttgccagcagcttctagccttaaaaccccaggaacttctttaaacatgaatggacccactttaagaccaacctctagtatccctgctaataatcctttagtgactcagctgcttcaaggcaaagatgttcccatggagcaaattctgcctaaacctctcaccaaagttgaaatgaaaacggttccactgactgcaaaagaggaaagggggatgggagcgctcatagctaccaacacaacagaaaatagcaccagagaggaagttaatgagagacagtcccatccagctacgcagcagcagctgggcaaaaccttgcaaagtaagcagctcccccaggttccaaggccccttcagctcttttcagctaaggagctgagggactccagcattgacacacaccaataccacgaaggactaagtaaagcaacccaagatcagatccttcagactctcattcagagggttcggaggcagaatcttctctcagttgtgccgccctcacagttcaacttcgctcactcaggtttccagctggaagacatctccacaagccagaggttcatgctgggttttgctggcagaaggacatccaaacctgcaatggcagggcactacttactgaatatttctacctacggccggggctcagagagctttaggaggacccattctgtaaaccctgaagatcgtttttgtctaagcagccccactgaagccttgaaaatgggatatacagactgtaaaaatgcaacaggagagagtagcagcagcaaagaagatgacactgatgaggaaagtactggtgatgagcaggaatctgtcacagtgaaagaggagccccaggtttcccagagtgctggcaagggtgacacaagttcaggacctcacagcagggaaactctatctaccagtgattgcttagctagcaagaatgtgaaggctgagataccattgaatgagcaaaccactttaagtaaggagaattacctgttcactagaggccaaacatttgatgaaaagaccctagccagagatttaattcaggcagcacagaagcagatggctcatgcagtgagaggtaaggcaatccgtagcagccccgagcttttcagttctactgttcttcctctgcctgcagacagccccacccaccagcccctactccttccacccctgcaaaccccgaagttgtatggaagccccacccagatagggccaagctatagaggcatgatcaatgtcnccacctcatctgacatggaccataactctgctgtaccaggtagccaggtatctagcaatgtaggtgatgtcatgtcattttcagtgactgtcactaccatccctgctagccaagctatgaatcccagcagccatggccagaccattcctgttcaggcgttctccgaagagaacagcatagagggcacgccttcgaaatgttactgccgcttgaaagccatgatcatgtgcaaaggctgtggcgctttctgccatgatgattgcatcggcccctccaaactgtgcgtctcctgccttgtcgttcggtaatgagactagaaagagatacactgtaaaggagggggaagggaagggttgaccagttgggttttttgcgtccttttggaatcacagaaataaacaagtaggtttcagttgtcttcagagacaaatgttacttaatcaggaatacaaagtacagattttttacattttagaggaagagcaccttgtatagtaagtctaagtcaagcaagactttgtgaatttgtgacaagtttgcacttacaaaatcatgtaaatatgtcacattttgtttaacattatttttccaagtgtttaggtaataatgtattactttgaattcagattaatgttctactacttgtgactgagaaaagtttaatgccggcatggtaaaaggaagctgtctcccttctgacatttcctaggaagctaggaaaaggaaagtgaaggaatggtctaaagaaatgaccattcacactgattttgtctggacagtctggccgcaggttattcatagattattcagcctttgcaggacttggattcagggttttactcagtccctttaccttaggtggaatcttcttaaattgaaatttttggtaaggaattcatttcacaggtagtgtttcagactctgaaagccctgacttggttcttggcttctactgtactagttactagttactggtactgttgccaagcaatctgcttggaatttgtggatccctgctgttccctaatcccaccccctgccctgagacagtgaatgtagtccgtgaagggagtgcctctctgggaccccctgtgttgttacaggctgtgcagtgcaacaattccagcaaaaataccctatccccgcacttagtcattcgtggtaactaacaattttgaaatactcatataaaatgaacaggaaagtgttagtgattgggtgatttgagctacatcttgttgagcaaggggagtgaaaccacagaaactgttaaattgaacgtaaataactttggaaaacagttttgacactagaacaaggtcgcttctcttttcctcttctctcccaacctgttaacctagtgctagatagtcagctgctgttgcaggtagaaaagctcaccaatgccacatttgttcattctgttcaacctgttttgacctcccaggcatctgaacaggatgacatcatcttattatatcttactttacacatacgtgtatgtacacacacacacacaatacaagacatttttcctgttttagaaaatatagcccttgtttggattactgctgtctgagcactagaaatttctaatggaaagaggcctctgaatggctaagggaacatctggaaaggaaggaaaatgagccctaaaggttttttggttgcttgtttttgtttctttttctttcttgtttccttttttgtttttaaatccttctctagtgactgaagaaattgtgagtacataatatttaggtcatggttaaggaacattaaaataaacctgcagtttaacagaattttgtattaaatgggggagtgtcaatttgcatcatttgcatattgatttcaagtctcctaatttggaatgggtaaagtacaaatgttaatgcaacatagtacagttgtatttgtccttcatattcaggatgtgatatttacaaaatgcagaacagtttaaacttgttaagtcacattccagattaggagaaaatgggcaataatcatctctgttttgcccccattctactacccaccactgcccaccccacccccacatcacacactcttcgatgctttcccacagcccctgctccgctcctctccgtaagaaactcacttcactgtttttcacttttcacttctggcttttttgtggcccaaggccaatataggattaatatctgtgttccagcttcagccagaacgatatgtctgtccatctttctcctttcttccagcacacacagctaagagataagaaggctgcaaggattggggataaggagtatattttcaagccaagaaccagtagaaaacagaaataatggtgctcccaaatattcagtaccttgggcaatccaggaagggtttaaagagacctgttgctgcatagaactctccctgccctaccccttaactccaccttagtgccagggccgagggctggtctgcatgctggaagaggttgagagttttggaattgattccatgctaaatgtcagttaccagtttggattgatgaaagtgatttttctgctttacctttttcctgtcagaaaggttttcctctgtgctacccttaacttagggatgaacagactataactaggaaaggaggaaaggtatcagggatttttaagtccgtttagagagcaaaccatattgtgcctcttcatcttgacccaggctcttatagataggtcctaaacattgctgttcactagattatcttaacaaataatactcagctaaatatttgcatttaggaatactcctaaaacagatattgccaactagatacactgcctcaatcttgaccagacaagagaacagttaagttctctcagttgggtagtaacttgaataccagtctatttatcagttggtttcaacacagaggtttcaagtggaaagccattcatcttaaaagctgaacagaaaaattaaaaaaaaaaaaaacacattacaatctggccttttagaaaatgaagcagtagaaacaaaacctttattagtatggtattccagcagcacctttaaagcaatctttaccttagttttttgagttgttttacctttcatcccaatctgaaaagttttaataaatgctgagcttattcttagggtatgacctggcattatttccagtgactagtcaggcattatgcctgatgcatacgcctcccgtgcacccctatctagccttcagatgtcctccactgcaggtcaccccaggagatagcatcaataatatagtctcagtcttgtttataaagattctaagttgtctagtaaataagtctccctgaatcttaaataattttggagaattagaattctccatcctattaaacagaaagtaaagccaaatagcctggagttgtttgtcctacttgttccataacccctatgctcaagatactgaagctatctgtggtatttcatgtaacatttctaagaataagagctggcaaatgggaaacttggggtggagagagcatacttattgggctgtgaaggcatacggatgtacatgttttagagcttatctcagatttaaatagccaaaggaagacctcattgccttccaggtgaaggtgcaaagtcatacatattaatgacctgacagttaacattctgttgtttattattgcctttctccaccttagagagccataaataactctctggtgaagtgatttgctataatgggggtgaggagtggggagacttctctggtcattacactgctatttatttctagaactcactatcagtgagcagtgccagagtgttttctctttgacctagaggtttcacatcatagcaaggagggaaaagtctccccatctccttacaactgtgtgctaagtaagtaacttggccaagggtagttttcagctcaatttatagaatagtccaaagagactttgagaaacatggtgataggcaggggcctttcctaccatgtttcaatacctacaaacctattgaaagagaacagtaggtaaaacatttcctaaagttgaagcaatagcttcgtagattcttggttactttattttttttaatgctttacatttgatacaactattgaagatcaattttaaaaatagctttccagtaatatattttaagtaatatatattttaatatctgtaaaaagtgacagtggaagactttgaatttctcatatatggtatgtttgatgtaggacctcactgttaaggcacaaattatttcaaaggaagttactctaaagacactcagattatttcagaaaaatgcaataaggggaatagttttggggtttattttttattttaaaagaaaattgacttatttaccacaagctatttttttcccttctggctgtaaggtttgtacagactggtttggtaaatgctaaacttttgtgtcttttgcctttttaaaggaattgttaacattggaattgagggtatgtacagagaagttggtgtcaacaccatttaaaaagtcatattttttcacaaatatagaaaatcattttacataagaattttaagtatttgcaataaatatatgtatatagattgtatgtattcctatattcttatttttcattttattattaagtaaaagatcattaaaagtgaaaataaaaaccttggagttttttggtgaatcttgaggtttaacatacatctgagagtggcgtgggtaagagtcctcagttactgccttatactcctatgggatggttcccacagattgtatggaagagagtaaaatgaggaacttggtgataaatcagggtagtgtatttcttttggaatttaagtaaaactgattaaattttccttatctgtctgtctccatgttttctcccttaatctgttttgtctcctaaccc

SEQ ID NO: 433799 - DNA, 8815 bp, Homo sapiens
  misc_feature (4169)..(4169): n is a, c, g, or t
caccacgcccggccaaacatgggtgaatttcttttaaaacctgaaaataaagaattttttttctctgatgcttcttgaagtgtacatgtttatcttttagtctggcaaactcacttctaagaattaacctcagagataagctgtcaaaaatacaaaatggcagagattaagaacaatgattctcagactcgagcttgcgtcagaatcacctacaggacgtatggtgcagattcctgggcctcacttcagagtatctgattcagtagatctgggcttccacccaataattttcatttctaatagatttttaggtagtaatgatgttgttctgggtaccacatcttagaaccactggttaagatgtagtcatgagaacaaaagaccagaaacaacccaaaaaaatacccatcaacaaaatctggtggaagaaatcacgatcgatatacacaatggaattctatgcaactattaaaaggaatgcagaagagttccatgttctgttctaggatatcctccaggatgcattgagttttttcacttaaatcaaagtggctcccgcctgggcaacagatatcgtcgtcctccccgcagtcaggctgcccatcacccaccattccagcaggtaaagtcatttctccatcacagaagcacagcaagaaggcactaaagcaggcgctaaagcagcaacagcagaagaagcagcagcagcaatgcaggccaagcatatccatctcctccaaccagcatctctcactaaagactgtcaaagcagccagtgactctgtacctgccaaacctgcaacatgggaaggaaagcaatctgatggacagacaggcagccctcaaaactcaaactccagcttttcttcctcagttaaagtggaaaatactttactaggcttggggaagaagtcattccagagatctgagagactccataccagacaaatgaaaagaactaaatgtgctgacattgacgttgagacaccggactccattctggttaatacaaatctgcgagcactgatcaacaagcacacattttcagtccttcctggagattgccagcaacgactgcttttactactcccagaggtagatcgacaggttggtccagatggtttaatgaagttaaatggctcagcccttaacaatgaattcttcacttcagcagcccaaggctggaagggaaagactctcagaaggtgagtttacacctgagatgcaggtgagaattcgacaagagattgagaaggagaaaaaagtggagccatggaaagaacaattctttgaaagctactatgggcagagttctggcctgagccttgaagattctaagaaattgacagcttctcccagtgatcccaaagtaaagaaaaccccagctgaacaaccaaaatccatgcctgtgtcagaggcctctcttatcagaatagttccagtagtctcccagtcagagtgtaaagaagaagcattgcaaatgtcatcaccaggcagaaaagaagagtgtgaaagccaaggtgaagtgcagccgaacttctccacatcttcagagcccctgctttcctcagctctcaatacacatgagcttagcagcattcttcccatcaagtgcccaaaggatgaggatctcttggagcagaagccagtcacctctgctgaacaggaatctgagaagaaccatctcaccacagcttctaattataacaaaagtgaaagccaagaatctttagttacatcgccaagcaaacccaagagtcctggggttgaaaaaccaatagtgaagcccacagcaggagcgggtccacaggagactaatatgaaagaacctctagcaactcttgttgatcagagcccagaaagcctcaagaggaagtcttccctcacccaagaagaggcccctgtgagctgggagaagaggccacgtgtcactgagaatcgccagcaccagcagccatttcaggtctcaccacagccctttctcaatagaggggacagaatccaggtgcgaaaagtaccacctctcaagatcccggtctccagaatctcccccatgccgtttcatccatcgcaggtctctcccagggctcgttttccagtctccatcactagtcctaacagaacaggagccagaactcttgcagacatcaaagcaaaagcccaactggtcaaagcacagagggcagcagctgccgctgccgccgcagctgctgcagccgcctcagttggagggaccattccaggacctggcccagggggtggacaaggtccaggagagggtggtgaagggcagactgctagaggaggcagtccaggctcagacagagtcagtgaaactggaaagggccccacactggaactggcaggaactggaagcaggggaggtacgagagagcttttaccctgtggtccagagactcagccccagtctgagaccaagaccaccccaagccaggcacagcctcatagtgtctctggagcacaactacagcaaacccccccagtgcctccaacacctgccgtcagtggagcatgcacaagtgtcccatcaccagcccacatagagaaattggataatgaaaaactgaaccccaccagagcaacagccacagtggcctctgtcagccatccacaagggcccagtagttgcagacaggagaaagcaccttctccaacaggtcctgctctaatctcaggtgcctcacctgttcattgtgcagctgatggcacagttgagctcaaagcaggtcctagtaagaatatacctaacccttcagcctcatcaaagacagatgctagtgtgccagtggctgtaactccctcccctttaacatctttattgaccacagccactttagaaaagcttcctgtaccccaggtcagtgcaactacagcacctgctggatcagctccaccctcgagcactttgccagcagcttctagccttaaaaccccaggaacttctttaaacatgaatggacccactttaagaccaacctctagtatccctgctaataatcctttagtgactcagctgcttcaaggcaaagatgttcccatggagcaaattctgcctaaacctctcaccaaagttgaaatgaaaacggttccactgactgcaaaagaggaaagggggatgggagcgctcatagctaccaacacaacagaaaatagcaccagagaggaagttaatgagagacagtcccatccagctacgcagcagcagctgggcaaaaccttgcaaagtaagcagctcccccaggttccaaggccccttcagctcttttcagctaaggagctgagggactccagcattgacacacaccaataccacgaaggactaagtaaagcaacccaagatcagatccttcagactctcattcagagggttcggaggcagaatcttctctcagttgtgccgccctcacagttcaacttcgctcactcaggtttccagctggaagacatctccacaagccagaggttcatgctgggttttgctggcagaaggacatccaaacctgcaatggcagggcactacttactgaatatttctacctacggccggggctcagagagctttaggaggacccattctgtaaaccctgaagatcgtttttgtctaagcagccccactgaagccttgaaaatgggatatacagactgtaaaaatgcaacaggagagagtagcagcagcaaagaagatgacactgatgaggaaagtactggtgatgagcaggaatctgtcacagtgaaagaggagccccaggtttcccagagtgctggcaagggtgacacaagttcaggacctcacagcagggaaactctatctaccagtgattgcttagctagcaagaatgtgaaggctgagataccattgaatgagcaaaccactttaagtaaggagaattacctgttcactagaggccaaacatttgatgaaaagaccctagccagagatttaattcaggcagcacagaagcagatggctcatgcagtgagaggtaaggcaatccgtagcagccccgagcttttcagttctactgttcttcctctgcctgcagacagccccacccaccagcccctactccttccacccctgcaaaccccgaagttgtatggaagccccacccagatagggccaagctatagaggcatgatcaatgtcnccacctcatctgacatggaccataactctgctgtaccaggtagccaggtatctagcaatgtaggtgatgtcatgtcattttcagtgactgtcactaccatccctgctagccaagctatgaatcccagcagccatggccagaccattcctgttcaggcgttctccgaagagaacagcatagagggcacgccttcgaaatgttactgccgcttgaaagccatgatcatgtgcaaaggctgtggcgctttctgccatgatgattgcatcggcccctccaaactgtgcgtctcctgccttgtcgttcggtaatgagactagaaagagatacactgtaaaggagggggaagggaagggttgaccagttgggttttttgcgtccttttggaatcacagaaataaacaagtaggtttcagttgtcttcagagacaaatgttacttaatcaggaatacaaagtacagattttttacattttagaggaagagcaccttgtatagtaagtctaagtcaagcaagactttgtgaatttgtgacaagtttgcacttacaaaatcatgtaaatatgtcacattttgtttaacattatttttccaagtgtttaggtaataatgtattactttgaattcagattaatgttctactacttgtgactgagaaaagtttaatgccggcatggtaaaaggaagctgtctcccttctgacatttcctaggaagctaggaaaaggaaagtgaaggaatggtctaaagaaatgaccattcacactgattttgtctggacagtctggccgcaggttattcatagattattcagcctttgcaggacttggattcagggttttactcagtccctttaccttaggtggaatcttcttaaattgaaatttttggtaaggaattcatttcacaggtagtgtttcagactctgaaagccctgacttggttcttggcttctactgtactagttactagttactggtactgttgccaagcaatctgcttggaatttgtggatccctgctgttccctaatcccaccccctgccctgagacagtgaatgtagtccgtgaagggagtgcctctctgggaccccctgtgttgttacaggctgtgcagtgcaacaattccagcaaaaataccctatccccgcacttagtcattcgtggtaactaacaattttgaaatactcatataaaatgaacaggaaagtgttagtgattgggtgatttgagctacatcttgttgagcaaggggagtgaaaccacagaaactgttaaattgaacgtaaataactttggaaaacagttttgacactagaacaaggtcgcttctcttttcctcttctctcccaacctgttaacctagtgctagatagtcagctgctgttgcaggtagaaaagctcaccaatgccacatttgttcattctgttcaacctgttttgacctcccaggcatctgaacaggatgacatcatcttattatatcttactttacacatacgtgtatgtacacacacacacacaatacaagacatttttcctgttttagaaaatatagcccttgtttggattactgctgtctgagcactagaaatttctaatggaaagaggcctctgaatggctaagggaacatctggaaaggaaggaaaatgagccctaaaggttttttggttgcttgtttttgtttctttttctttcttgtttccttttttgtttttaaatccttctctagtgactgaagaaattgtgagtacataatatttaggtcatggttaaggaacattaaaataaacctgcagtttaacagaattttgtattaaatgggggagtgtcaatttgcatcatttgcatattgatttcaagtctcctaatttggaatgggtaaagtacaaatgttaatgcaacatagtacagttgtatttgtccttcatattcaggatgtgatatttacaaaatgcagaacagtttaaacttgttaagtcacattccagattaggagaaaatgggcaataatcatctctgttttgcccccattctactacccaccactgcccaccccacccccacatcacacactcttcgatgctttcccacagcccctgctccgctcctctccgtaagaaactcacttcactgtttttcacttttcacttctggcttttttgtggcccaaggccaatataggattaatatctgtgttccagcttcagccagaacgatatgtctgtccatctttctcctttcttccagcacacacagctaagagataagaaggctgcaaggattggggataaggagtatattttcaagccaagaaccagtagaaaacagaaataatggtgctcccaaatattcagtaccttgggcaatccaggaagggtttaaagagacctgttgctgcatagaactctccctgccctaccccttaactccaccttagtgccagggccgagggctggtctgcatgctggaagaggttgagagttttggaattgattccatgctaaatgtcagttaccagtttggattgatgaaagtgatttttctgctttacctttttcctgtcagaaaggttttcctctgtgctacccttaacttagggatgaacagactataactaggaaaggaggaaaggtatcagggatttttaagtccgtttagagagcaaaccatattgtgcctcttcatcttgacccaggctcttatagataggtcctaaacattgctgttcactagattatcttaacaaataatactcagctaaatatttgcatttaggaatactcctaaaacagatattgccaactagatacactgcctcaatcttgaccagacaagagaacagttaagttctctcagttgggtagtaacttgaataccagtctatttatcagttggtttcaacacagaggtttcaagtggaaagccattcatcttaaaagctgaacagaaaaattaaaaaaaaaaaaaacacattacaatctggccttttagaaaatgaagcagtagaaacaaaacctttattagtatggtattccagcagcacctttaaagcaatctttaccttagttttttgagttgttttacctttcatcccaatctgaaaagttttaataaatgctgagcttattcttagggtatgacctggcattatttccagtgactagtcaggcattatgcctgatgcatacgcctcccgtgcacccctatctagccttcagatgtcctccactgcaggtcaccccaggagatagcatcaataatatagtctcagtcttgtttataaagattctaagttgtctagtaaataagtctccctgaatcttaaataattttggagaattagaattctccatcctattaaacagaaagtaaagccaaatagcctggagttgtttgtcctacttgttccataacccctatgctcaagatactgaagctatctgtggtatttcatgtaacatttctaagaataagagctggcaaatgggaaacttggggtggagagagcatacttattgggctgtgaaggcatacggatgtacatgttttagagcttatctcagatttaaatagccaaaggaagacctcattgccttccaggtgaaggtgcaaagtcatacatattaatgacctgacagttaacattctgttgtttattattgcctttctccaccttagagagccataaataactctctggtgaagtgatttgctataatgggggtgaggagtggggagacttctctggtcattacactgctatttatttctagaactcactatcagtgagcagtgccagagtgttttctctttgacctagaggtttcacatcatagcaaggagggaaaagtctccccatctccttacaactgtgtgctaagtaagtaacttggccaagggtagttttcagctcaatttatagaatagtccaaagagactttgagaaacatggtgataggcaggggcctttcctaccatgtttcaatacctacaaacctattgaaagagaacagtaggtaaaacatttcctaaagttgaagcaatagcttcgtagattcttggttactttattttttttaatgctttacatttgatacaactattgaagatcaattttaaaaatagctttccagtaatatattttaagtaatatatattttaatatctgtaaaaagtgacagtggaagactttgaatttctcatatatggtatgtttgatgtaggacctcactgttaaggcacaaattatttcaaaggaagttactctaaagacactcagattatttcagaaaaatgcaataaggggaatagttttggggtttattttttattttaaaagaaaattgacttatttaccacaagctatttttttcccttctggctgtaaggtttgtacagactggtttggtaaatgctaaacttttgtgtcttttgcctttttaaaggaattgttaacattggaattgagggtatgtacagagaagttggtgtcaacaccatttaaaaagtcatattttttcacaaatatagaaaatcattttacataagaattttaagtatttgcaataaatatatgtatatagattgtatgtattcctatattcttatttttcattttattattaagtaaaagatcattaaaagtga

SEQ ID NO: 433800 - DNA, 7250 bp, Homo sapiens
  misc_feature (4169)..(4169): n is a, c, g, or t
caccacgcccggccaaacatgggtgaatttcttttaaaacctgaaaataaagaattttttttctctgatgcttcttgaagtgtacatgtttatcttttagtctggcaaactcacttctaagaattaacctcagagataagctgtcaaaaatacaaaatggcagagattaagaacaatgattctcagactcgagcttgcgtcagaatcacctacaggacgtatggtgcagattcctgggcctcacttcagagtatctgattcagtagatctgggcttccacccaataattttcatttctaatagatttttaggtagtaatgatgttgttctgggtaccacatcttagaaccactggttaagatgtagtcatgagaacaaaagaccagaaacaacccaaaaaaatacccatcaacaaaatctggtggaagaaatcacgatcgatatacacaatggaattctatgcaactattaaaaggaatgcagaagagttccatgttctgttctaggatatcctccaggatgcattgagttttttcacttaaatcaaagtggctcccgcctgggcaacagatatcgtcgtcctccccgcagtcaggctgcccatcacccaccattccagcaggtaaagtcatttctccatcacagaagcacagcaagaaggcactaaagcaggcgctaaagcagcaacagcagaagaagcagcagcagcaatgcaggccaagcatatccatctcctccaaccagcatctctcactaaagactgtcaaagcagccagtgactctgtacctgccaaacctgcaacatgggaaggaaagcaatctgatggacagacaggcagccctcaaaactcaaactccagcttttcttcctcagttaaagtggaaaatactttactaggcttggggaagaagtcattccagagatctgagagactccataccagacaaatgaaaagaactaaatgtgctgacattgacgttgagacaccggactccattctggttaatacaaatctgcgagcactgatcaacaagcacacattttcagtccttcctggagattgccagcaacgactgcttttactactcccagaggtagatcgacaggttggtccagatggtttaatgaagttaaatggctcagcccttaacaatgaattcttcacttcagcagcccaaggctggaagggaaagactctcagaaggtgagtttacacctgagatgcaggtgagaattcgacaagagattgagaaggagaaaaaagtggagccatggaaagaacaattctttgaaagctactatgggcagagttctggcctgagccttgaagattctaagaaattgacagcttctcccagtgatcccaaagtaaagaaaaccccagctgaacaaccaaaatccatgcctgtgtcagaggcctctcttatcagaatagttccagtagtctcccagtcagagtgtaaagaagaagcattgcaaatgtcatcaccaggcagaaaagaagagtgtgaaagccaaggtgaagtgcagccgaacttctccacatcttcagagcccctgctttcctcagctctcaatacacatgagcttagcagcattcttcccatcaagtgcccaaaggatgaggatctcttggagcagaagccagtcacctctgctgaacaggaatctgagaagaaccatctcaccacagcttctaattataacaaaagtgaaagccaagaatctttagttacatcgccaagcaaacccaagagtcctggggttgaaaaaccaatagtgaagcccacagcaggagcgggtccacaggagactaatatgaaagaacctctagcaactcttgttgatcagagcccagaaagcctcaagaggaagtcttccctcacccaagaagaggcccctgtgagctgggagaagaggccacgtgtcactgagaatcgccagcaccagcagccatttcaggtctcaccacagccctttctcaatagaggggacagaatccaggtgcgaaaagtaccacctctcaagatcccggtctccagaatctcccccatgccgtttcatccatcgcaggtctctcccagggctcgttttccagtctccatcactagtcctaacagaacaggagccagaactcttgcagacatcaaagcaaaagcccaactggtcaaagcacagagggcagcagctgccgctgccgccgcagctgctgcagccgcctcagttggagggaccattccaggacctggcccagggggtggacaaggtccaggagagggtggtgaagggcagactgctagaggaggcagtccaggctcagacagagtcagtgaaactggaaagggccccacactggaactggcaggaactggaagcaggggaggtacgagagagcttttaccctgtggtccagagactcagccccagtctgagaccaagaccaccccaagccaggcacagcctcatagtgtctctggagcacaactacagcaaacccccccagtgcctccaacacctgccgtcagtggagcatgcacaagtgtcccatcaccagcccacatagagaaattggataatgaaaaactgaaccccaccagagcaacagccacagtggcctctgtcagccatccacaagggcccagtagttgcagacaggagaaagcaccttctccaacaggtcctgctctaatctcaggtgcctcacctgttcattgtgcagctgatggcacagttgagctcaaagcaggtcctagtaagaatatacctaacccttcagcctcatcaaagacagatgctagtgtgccagtggctgtaactccctcccctttaacatctttattgaccacagccactttagaaaagcttcctgtaccccaggtcagtgcaactacagcacctgctggatcagctccaccctcgagcactttgccagcagcttctagccttaaaaccccaggaacttctttaaacatgaatggacccactttaagaccaacctctagtatccctgctaataatcctttagtgactcagctgcttcaaggcaaagatgttcccatggagcaaattctgcctaaacctctcaccaaagttgaaatgaaaacggttccactgactgcaaaagaggaaagggggatgggagcgctcatagctaccaacacaacagaaaatagcaccagagaggaagttaatgagagacagtcccatccagctacgcagcagcagctgggcaaaaccttgcaaagtaagcagctcccccaggttccaaggccccttcagctcttttcagctaaggagctgagggactccagcattgacacacaccaataccacgaaggactaagtaaagcaacccaagatcagatccttcagactctcattcagagggttcggaggcagaatcttctctcagttgtgccgccctcacagttcaacttcgctcactcaggtttccagctggaagacatctccacaagccagaggttcatgctgggttttgctggcagaaggacatccaaacctgcaatggcagggcactacttactgaatatttctacctacggccggggctcagagagctttaggaggacccattctgtaaaccctgaagatcgtttttgtctaagcagccccactgaagccttgaaaatgggatatacagactgtaaaaatgcaacaggagagagtagcagcagcaaagaagatgacactgatgaggaaagtactggtgatgagcaggaatctgtcacagtgaaagaggagccccaggtttcccagagtgctggcaagggtgacacaagttcaggacctcacagcagggaaactctatctaccagtgattgcttagctagcaagaatgtgaaggctgagataccattgaatgagcaaaccactttaagtaaggagaattacctgttcactagaggccaaacatttgatgaaaagaccctagccagagatttaattcaggcagcacagaagcagatggctcatgcagtgagaggtaaggcaatccgtagcagccccgagcttttcagttctactgttcttcctctgcctgcagacagccccacccaccagcccctactccttccacccctgcaaaccccgaagttgtatggaagccccacccagatagggccaagctatagaggcatgatcaatgtcnccacctcatctgacatggaccataactctgctgtaccaggtagccaggtatctagcaatgtaggtgatgtcatgtcattttcagtgactgtcactaccatccctgctagccaagctatgaatcccagcagccatggccagaccattcctgttcaggcgttctccgaagagaacagcatagagggcacgccttcgaaatgttactgccgcttgaaagccatgatcatgtgcaaaggctgtggcgctttctgccatgatgattgcatcggcccctccaaactgtgcgtctcctgccttgtcgttcggtaatgagactagaaagagatacactgtaaaggagggggaagggaagggttgaccagttgggttttttgcgtccttttggaatcacagaaataaacaagtaggtttcagttgtcttcagagacaaatgttacttaatcaggaatacaaagtacagattttttacattttagaggaagagcaccttgtatagtaagtctaagtcaagcaagactttgtgaatttgtgacaagtttgcacttacaaaatcatgtaaatatgtcacattttgtttaacattatttttccaagtgtttaggtaataatgtattactttgaattcagattaatgttctactacttgtgactgagaaaagtttaatgccggcatggtaaaaggaagctgtctcccttctgacatttcctaggaagctaggaaaaggaaagtgaaggaatggtctaaagaaatgaccattcacactgattttgtctggacagtctggccgcaggttattcatagattattcagcctttgcaggacttggattcagggttttactcagtccctttaccttaggtggaatcttcttaaattgaaatttttggtaaggaattcatttcacaggtagtgtttcagactctgaaagccctgacttggttcttggcttctactgtactagttactagttactggtactgttgccaagcaatctgcttggaatttgtggatccctgctgttccctaatcccaccccctgccctgagacagtgaatgtagtccgtgaagggagtgcctctctgggaccccctgtgttgttacaggctgtgcagtgcaacaattccagcaaaaataccctatccccgcacttagtcattcgtggtaactaacaattttgaaatactcatataaaatgaacaggaaagtgttagtgattgggtgatttgagctacatcttgttgagcaaggggagtgaaaccacagaaactgttaaattgaacgtaaataactttggaaaacagttttgacactagaacaaggtcgcttctcttttcctcttctctcccaacctgttaacctagtgctagatagtcagctgctgttgcaggtagaaaagctcaccaatgccacatttgttcattctgttcaacctgttttgacctcccaggcatctgaacaggatgacatcatcttattatatcttactttacacatacgtgtatgtacacacacacacacaatacaagacatttttcctgttttagaaaatatagcccttgtttggattactgctgtctgagcactagaaatttctaatggaaagaggcctctgaatggctaagggaacatctggaaaggaaggaaaatgagccctaaaggttttttggttgcttgtttttgtttctttttctttcttgtttccttttttgtttttaaatccttctctagtgactgaagaaattgtgagtacataatatttaggtcatggttaaggaacattaaaataaacctgcagtttaacagaattttgtattaaatgggggagtgtcaatttgcatcatttgcatattgatttcaagtctcctaatttggaatgggtaaagtacaaatgttaatgcaacatagtacagttgtatttgtccttcatattcaggatgtgatatttacaaaatgcagaacagtttaaacttgttaagtcacattccagattaggagaaaatgggcaataatcatctctgttttgcccccattctactacccaccactgcccaccccacccccacatcacacactcttcgatgctttcccacagcccctgctccgctcctctccgtaagaaactcacttcactgtttttcacttttcacttctggcttttttgtggcccaaggccaatataggattaatatctgtgttccagcttcagccagaacgatatgtctgtccatctttctcctttcttccagcacacacagctaagagataagaaggctgcaaggattggggataaggagtatattttcaagccaagaaccagtagaaaacagaaataatggtgctcccaaatattcagtaccttgggcaatccaggaagggtttaaagagacctgttgctgcatagaactctccctgccctaccccttaactccaccttagtgccagggccgagggctggtctgcatgctggaagaggttgagagttttggaattgattccatgctaaatgtcagttaccagtttggattgatgaaagtgatttttctgctttacctttttcctgtcagaaaggttttcctctgtgctacccttaacttagggatgaacagactataactaggaaaggaggaaaggtatcagggatttttaagtccgtttagagagcaaaccatattgtgcctcttcatcttgacccaggctcttatagataggtcctaaacattgctgttcactagattatcttaacaaataatactcagctaaatatttgcatttaggaatactcctaaaacagatattgccaactagatacactgcctcaatcttgaccagacaagagaacagttaagttctctcagttgggtagtaacttgaataccagtctatttatcagttggtttcaacacagaggtttcaagtggaaagccattcatcttaaaagctgacgaaaacaaaacaaaaaactcgcgggggccgtcccaatcgccaatggagtcgaccatcatgccgcgttaaagtcggacgggaaccgggtaccactagccgtggaaatcctttccggggttagggacgagctcgggcggg

SEQ ID NO: 433801 - DNA, 349 bp, Homo sapiens
cgggtccacaggagactaatatgaaagaacctctagcaactcttgttgatcagagcccagaaagcctcaagaggaagtcttccctcacccaagaagaggcccctgtgagctgggagaagaggccacgtgtcactgagaatcgccagcaccagcagccatttcaggtctcaccacagccctttctcaatagaggggacagaatccaggtgcgaaaagtaccacctctcaaggtaagagaatggagagaattagaaaagcagagatcgtctgaaccctatgtttttggtcatacctactaaatttcaagtaaattgtggtagttcttaatgcagaagcagttggatatatt

SEQ ID NO: 433802 - DNA, 1656 bp, Homo sapiens
tggttcgggagcacccaagtgaaaggggaagagtgcgacaggcggccctggggtcttcacgccaggcgggcggggtccagccagtatgcagtcgggctggacaggggtctcggtgggacagccttcggggacagcgccatccttgtcgtgccaagcggttacatagctgtctggaaatacgtcctcagctgccccagatcccggaagaaaatctctcccacaccactgtagtcagagaggccagtgggtgcatggaactcctcgcacgcgctgtcagcagcagcagtgaggaagccggcagcacagtctgggaaggaaggaggtgcttggctctctcccgggccgccaccttcgccgtcctcgccatcggtctcatcgtcagtttcctcgtcatcgttgtcacctcggtcgtcaggggccgcggacagtgaggggtaggcaccaagcccctcggctttggcaggtgtcgggggcgcaggcagctgcaaactcgcgggccggcgctgcttaccgctgtgcgcggcaccggggtgccccgggggtgcgcagccagcaggtggcgcaggcggtgacgcagctgctcaggtgcgagtggcgggggcacaggggtgggcaggggcgcgggtgcagaggtgctcgcgggtgcagaggagcgcgtgcgataatctgcgtgcattcgtcgataactgtctatgcgaagcaccgacgcagccatgagtacctgcggggcttcactctgtgccacaacgagcgaaccgctgtacaggagctcgactagctgtcgcaccgtctgcacaggcaccaccgaaggcacacggatctcagaggggccgagcagcagcttgtcttggaaggagggcgagccgattgccagcccgcagcggtgcgcacgcagcgaagcttcatgaatgcacacagtcacgtcgcagaagtgcccacccagcttctgcccattgagggtctcaagcagagagcgtgagaagttctgcagatgtatgtggcgcacagcctctacagccgccgactccgactcctcttcaggcaccaggcctggccgtggccgccttctcaccgactccaaggcagcacttccgggcgcttctctttatttttatacagttttattgagatataatttacatgctatccagcccatctatttcaagtgtaccatgcaaggggtttgtatatattcacagagttgtgtatccatcaccatcgttttagaacattcatcactccagaagaaactactacccatcagcagccactgcccatttccctgatctgccccgccctaggaaatccgtaatcactttcagtctatggatttgcctattctagaccattcatataaatgaagtcacacaacactgggtcttatgtgactggcttctatcaaagtttgcaaggttcatttatgttcatgccaaccaaccaagtaacaaaacaaataagcaaacagccaaccaatcaaccaacaagcaagcaagcaacaaaccaaccaaacaagcaagcaagcaagcaagcaaccaaccaaccaaccaagtaaccgatcaaaccaacccttggagccctttctaaaactttgacctacaaccctgaatccagaatctctgtttagtgggccaacattaataaatttagcctactcca

SEQ ID NO: 433803 - DNA, 2569 bp, Homo sapiens
tggttcgggagcacccaagtgaaaggggaagagtgcgacaggcggccctggggtcttcacgccaggcgggcggggtccagccagtatgcagtcgggctggacaggggtctcggtgggacagccttcggggacagcgccatccttgtcgtgccaagcggttacatagctgtctggaaatacgtcctcagctgccccagatcccggaagaaaatctctcccacaccactgtagtcagagaggccagtgggtgcatggaactcctcgcacgcgctgtcagcagcagcagtgaggaagccggcagcacagtctgggaaggaaggaggtgcttggctctctcccgggccgccaccttcgccgtcctcgccatcggtctcatcgtcagtttcctcgtcatcgttgtcacctcggtcgtcaggggccgcggacagtgaggggtaggcaccaagcccctcggctttggcaggtgtcgggggcgcaggcagctgcaaactcgcgggccggcgctgcttaccgctgtgcgcggcaccggggtgccccgggggtgcgcagccagcaggtggcgcaggcggtgacgcagctgctcaggtgcgagtggcgggggcacaggggtgggcaggggcgcgggtgcagaggtgctcgcgggtgcagaggagcgcgtgcgataatctgcgtgcattcgtcgataactgtctatgcgaagcaccgacgcagccatgagtacctgcggggcttcactctgtgccacaacgagcgaaccgctgtacaggagctcgactagctgtcgcaccgtctgcacaggcaccaccgaaggcacacggatctcagaggggccgagcagcagcttgtcttggaaggagggcgagccgattgccagcccgcagcggtgcgcacgcagcgaagcttcatgaatgcacacagtcacgtcgcagaagtgcccacccagcttctgcccattgagggtctcaagcagagagcgtgagaagttctgcagatgtatgtggcgcacagcctctacagccgccgactccgactcctcttcaggcaccaggcctggccgtggccgccttctcaccgactccaaggcagcacttccgggcgcttctctttatttttatacagttttattgagatataatttacatgctatccagcccatctatttcaagtgtaccatgcaaggggtttgtatatattcacagagttgtgtatccatcaccatcgttttagaacattcatcactccagaagaaactactacccatcagcagccactgcccatttccctgatctgccccgccctaggaaatccgtaatcactttcagtctatggatttgcctattctagaccattcatataaatgaagtcacacaacactgggtcttatgtgactggcttctatcaaagtttgcaaggttcatttatgttcatgccaaccaaccaagtaacaaaacaaataagcaaacagccaaccaatcaaccaacaagcaagcaagcaacaaaccaaccaaacaagcaagcaagcaagcaagcaaccaaccaaccaaccaagtaaccgatcaaaccaacccttggagccctttctaaaactttgacctacaaccctgaatccagaatctctgtttagtgggccaacattaataaatttagcctactccaactttgtgttacttccaccatggtgccacacacttaatatccattcccacatatattctccagatttctttctgtataaattgtgtgtgtgtgtgtgtgtgtgtgtgtgtagaaagagagcatcaactgaaaaatcacacaattttataaatttagaaaagagagctttatttcttataaaggtttgcagcctgcaaggtggccattatgacaggctgggaagtgtggcctacagccaaggctagaggcaggcccttccagggagggaaggagaggacaggaatttgagctgaatgagttgactacatatacatactcaataggatatcagaggagctatatcattttatgagaatactcataaaagaggtcctaacacatgcatattgaataaacatgcatgttcattctggtgtggagacttgacatttaaatgtgttataattaggccctacacatcaaaaagtgaagcagggaatgaaggtactcagcctctgtaaaggcacagcctctaaaactggccagaaccagtccatggaggatggtctcttatcaggagaaagttactgaaatcagtcccttgtccagtgaaagctgtcgttaaggtcggtggggcaggagatcagttactcagtgtctgtgaactgggtgagttgtaattgttttaatcttgcttctctcatagccagtgcttgcttggctgctagagaaaaataaaaactatgtggtagttagaatctagtttattctttaagagtagggtacaagacttaacccttgcctggcatggccctaggtcctgtttataatttggggtcttattgccacaaagagtctgttctgtcagtctcatgatctctattttaacgttaatgctgttcagttgattggtgacgtacacggtgtcacctct

SEQ ID NO: 433804 - DNA, 1114 bp, Homo sapiens
gttaaaacccggtcaacctggcggttaattgaaaaccttcggaaaccaaccaaacaagcaagcaagcaagcaagcaaccaaccaaccaaccaagtaaccgatcaaaccaacccttggagccctttctaaaactttgacctacaaccctgaatccagaatctctgtttagtgggccaacattaataaatttagcctactccaactttgtgttacttccaccatggtgccacacacttaatatccattcccacatatattctccagatttctttctgtataaattgtgtgtgtgtgtgtgtgtgtgtgtgtgtagaaagagagcatcaactgaaaaatcacacaattttataaatttagaaaagagagctttatttcttataaaggtttgcagcctgcaaggtggccattatgacaggctgggaagtgtggcctacagccaaggctagaggcaggcccttccagggagggaaggagaggacaggaatttgagctgaatgagttgactacatatacatactcaataggatatcagaggagctatatcattttatgagaatactcataaaagaggtcctaacacatgcatattgaataaacatgcatgttcattctggtgtggagacttgacatttaaatgtgttataattaggccctacacatcaaaaagtgaagcagggaatgaaggtactcagcctctgtaaaggcacagcctctaaaactggccagaaccagtccatggaggatggtctcttatcaggagaaagttactgaaatcagtcccttgtccagtgaaagctgtcgttaaggtcggtggggcaggagatcagttactcagtgtctgtgaactgggtgagttgtaattgttttaatcttgcttctctcatagccagtgcttgcttggctgctagagaaaaataaaaactatgtggtagttagaatctagtttattctttaagagtagggtacaagacttaacccttgcctggcatggccctaggtcctgtttataatttggggtcttattgccacaaagagtctgttctgtcagtctcatgatctctattttaacgttaatgctgttcagttgattggtgacgtacacggtgtcacctct

SEQ ID NO: 433805 - DNA, 1099 bp, Homo sapiens
  misc_feature (27)..(27): n is a, c, g, or t
cagtgtagtcgactgggaaaacctggnaaaccaaccaaacaagcaagcaagcaagcaagcaaccaaccaaccaaccaagtaaccgatcaaaccaacccttggagccctttctaaaactttgacctacaaccctgaatccagaatctctgtttagtgggccaacattaataaatttagcctactccaactttgtgttacttccaccatggtgccacacacttaatatccattcccacatatattctccagatttctttctgtataaattgtgtgtgtgtgtgtgtgtgtgtgtgtgtagaaagagagcatcaactgaaaaatcacacaattttataaatttagaaaagagagctttatttcttataaaggtttgcagcctgcaaggtggccattatgacaggctgggaagtgtggcctacagccaaggctagaggcaggcccttccagggagggaaggagaggacaggaatttgagctgaatgagttgactacatatacatactcaataggatatcagaggagctatatcattttatgagaatactcataaaagaggtcctaacacatgcatattgaataaacatgcatgttcattctggtgtggagacttgacatttaaatgtgttataattaggccctacacatcaaaaagtgaagcagggaatgaaggtactcagcctctgtaaaggcacagcctctaaaactggccagaaccagtccatggaggatggtctcttatcaggagaaagttactgaaatcagtcccttgtccagtgaaagctgtcgttaaggtcggtggggcaggagatcagttactcagtgtctgtgaactgggtgagttgtaattgttttaatcttgcttctctcatagccagtgcttgcttggctgctagagaaaaataaaaactatgtggtagttagaatctagtttattctttaagagtagggtacaagacttaacccttgcctggcatggccctaggtcctgtttataatttggggtcttattgccacaaagagtctgttctgtcagtctcatgatctctattttaacgttaatgctgttcagttgattggtgacgtacacggtgtcacctct

SEQ ID NO: 433806 - DNA, 1897 bp, Homo sapiens
tggttcgggagcacccaagtgaaaggggaagagtgcgacaggcggccctggggtcttcacgccaggcgggcggggtccagccagtatgcagtcgggctggacaggggtctcggtgggacagccttcggggacagcgccatccttgtcgtgccaagcggttacatagctgtctggaaatacgtcctcagctgccccagatcccggaagaaaatctctcccacaccactgtagtcagagaggccagtgggtgcatggaactcctcgcacgcgctgtcagcagcagcagtgaggaagccggcagcacagtctgggaaggaaggaggtgcttggctctctcccgggccgccaccttcgccgtcctcgccatcggtctcatcgtcagtttcctcgtcatcgttgtcacctcggtcgtcaggggccgcggacagtgaggggtaggcaccaagcccctcggctttggcaggtgtcgggggcgcaggcagctgcaaactcgcgggccggcgctgcttaccgctgtgcgcggcaccggggtgccccgggggtgcgcagccagcaggtggcgcaggcggtgacgcagctgctcaggtgcgagtggcgggggcacaggggtgggcaggggcgcgggtgcagaggtgctcgcgggtgcagaggagcgcgtgcgataatctgcgtgcattcgtcgataactgtctatgcgaagcaccgacgcagccatgagtacctgcggggcttcactctgtgccacaacgagcgaaccgctgtacaggagctcgactagctgtcgcaccgtctgcacaggcaccaccgaaggcacacggatctcagaggggccgagcagcagcttgtcttggaaggagggcgagccgattgccagcccgcagcggtgcgcacgcagcgaagcttcatgaatgcacacagtcacgtcgcagaagtgcccacccagcttctgcccattgagggtctcaagcagagagcgtgagaagttctgcagatgtatgtggcgcacagcctctacagccgccgactccgactcctcttcaggcaccaggcctggccgtggccgccttctcaccgactccaaggcagcacttccgggcgcttctctttatttttatacagttttattgagatataatttacatgctatccagcccatctatttcaagtgtaccatgcaaggggtttgtatatattcacagagttgtgtatccatcaccatcgttttagaacattcatcactccagaagaaactactacccatcagcagccactgcccatttccctgatctgccccgccctaggaaatccgtaatcactttcagtctatggatttgcctattctagaccattcatataaatgaagtcacacaacactgggtcttatgtgactggcttctatcaaagtttgcaaggttcatttatgttcatgccaaccaaccaagtaacaaaacaaataagcaaacagccaaccaatcaaccaacaagcaagcaagcaacaaaccaaccaaacaagcaagcaagcaagcaagcaaccaaccaaccaaccaagtaaccgatcaaaccaacccttggagccctttctaaaactttgacctacaaccctgaatcagttactcagtgtctgtgaactgggtgagttgtaattgttttaatcttgcttctctcatagccagtgcttgcttggctgctagagaaaaataaaaactatgtggtagttagaatctagtttattctttaagagtagggtacaagacttaacccttgcctggcatggccctaggtcctgtttataatttggggtcttattgccacaaagagtctgttctgtcagtctcatgatctctattttaacgttaatgctgttcagttgattggtgacgtacacggtgtcacctct

SEQ ID NO: 433807 - DNA, 1985 bp, Homo sapiens
tggttcgggagcacccaagtgaaaggggaagagtgcgacaggcggccctggggtcttcacgccaggcgggcggggtccagccagtatgcagtcgggctggacaggggtctcggtgggacagccttcggggacagcgccatccttgtcgtgccaagcggttacatagctgtctggaaatacgtcctcagctgccccagatcccggaagaaaatctctcccacaccactgtagtcagagaggccagtgggtgcatggaactcctcgcacgcgctgtcagcagcagcagtgaggaagccggcagcacagtctgggaaggaaggaggtgcttggctctctcccgggccgccaccttcgccgtcctcgccatcggtctcatcgtcagtttcctcgtcatcgttgtcacctcggtcgtcaggggccgcggacagtgaggggtaggcaccaagcccctcggctttggcaggtgtcgggggcgcaggcagctgcaaactcgcgggccggcgctgcttaccgctgtgcgcggcaccggggtgccccgggggtgcgcagccagcaggtggcgcaggcggtgacgcagctgctcaggtgcgagtggcgggggcacaggggtgggcaggggcgcgggtgcagaggtgctcgcgggtgcagaggagcgcgtgcgataatctgcgtgcattcgtcgataactgtctatgcgaagcaccgacgcagccatgagtacctgcggggcttcactctgtgccacaacgagcgaaccgctgtacaggagctcgactagctgtcgcaccgtctgcacaggcaccaccgaaggcacacggatctcagaggggccgagcagcagcttgtcttggaaggagggcgagccgattgccagcccgcagcggtgcgcacgcagcgaagcttcatgaatgcacacagtcacgtcgcagaagtgcccacccagcttctgcccattgagggtctcaagcagagagcgtgagaagttctgcagatgtatgtggcgcacagcctctacagccgccgactccgactcctcttcaggcaccaggcctggccgtggccgccttctcaccgactccaaggcagcacttccgggcgcttctctttatttttatacagttttattgagatataatttacatgctatccagcccatctatttcaagtgtaccatgcaaggggtttgtatatattcacagagttgtgtatccatcaccatcgttttagaacattcatcactccagaagaaactactacccatcagcagccactgcccatttccctgatctgccccgccctaggaaatccgtaatcactttcagtctatggatttgcctattctagaccattcatataaatgaagtcacacaacactgggtcttatgtgactggcttctatcaaagtttgcaaggttcatttatgttcatggtatgtatcagtagcttgttactttttatgtttgacttctattctgttacttacctacaccgtattttatctatctcttctgcagtttatgggatttaggtcgtttccacgttttggctgttctaaataatgctgctctgagcgttcacatacaagcttttcacatgatttcatttctccagatctaggagtgcaattgctatattatatggcaaccccgtgtttcactttttgacaaagtgccagactgcttttcaaaggacagcatcattttatattcctgccagcaatgtcgaggggtccagtttccacacattctcacaaacacttattgttatctgtctctctagttattgccttcctgatggatgtggagtgctttctcattggttttgatttgcattgtttaaatgagttataagattgagcatgttttcatgtttattggctgcttgtatatcttctttggagaaatgtctattcagattgtctccccattttaaaatcgtgttattttcttttttactattgacttgtgaatgttcaaacatgtata

SEQ ID NO: 433808 - DNA, 672 bp, Homo sapiens
tggataccatggactacacaatgccatgggtttctgtgagtcaaaccattctgactgctgctttgacactgctttccactgtagtgaccacacccacctcatctttggtgattaaggacagcccatgttccctgccaccccaggattcaattatcctcattttatttaaagatcccagtccagtggctgcagtttctgctgtaacattttgcctactgagagcacgagctcaaagctcttccaggatactgggctcctctcacaatattctttctcatgatcgttgtgagaagtatgttctgtagaccctccagtgtgagtgagcaggtctgacataataaatccagtctccctgagtttttgcataccttcctatacacataaaccaaggaagttgtgacatctcaactttatgtactttaggtaaactctgattctgtttcagccaaccaaccaagtaacaaaacaaataagcaaacagccaaccaatcaaccaacaagcaagcaagcaacaaaccaaccaaacaagcaagcaagcaagcaagcaaccaaccaaccaaccaagtaaccgatcaaaccaacccttggagccctttctaaaactttgacctacaaccctgaatccagaatctctgtttagtgggccaacattaataaatttagcctactcca

SEQ ID NO: 433809 - DNA, 1585 bp, Homo sapiens
tggataccatggactacacaatgccatgggtttctgtgagtcaaaccattctgactgctgctttgacactgctttccactgtagtgaccacacccacctcatctttggtgattaaggacagcccatgttccctgccaccccaggattcaattatcctcattttatttaaagatcccagtccagtggctgcagtttctgctgtaacattttgcctactgagagcacgagctcaaagctcttccaggatactgggctcctctcacaatattctttctcatgatcgttgtgagaagtatgttctgtagaccctccagtgtgagtgagcaggtctgacataataaatccagtctccctgagtttttgcataccttcctatacacataaaccaaggaagttgtgacatctcaactttatgtactttaggtaaactctgattctgtttcagccaaccaaccaagtaacaaaacaaataagcaaacagccaaccaatcaaccaacaagcaagcaagcaacaaaccaaccaaacaagcaagcaagcaagcaagcaaccaaccaaccaaccaagtaaccgatcaaaccaacccttggagccctttctaaaactttgacctacaaccctgaatccagaatctctgtttagtgggccaacattaataaatttagcctactccaactttgtgttacttccaccatggtgccacacacttaatatccattcccacatatattctccagatttctttctgtataaattgtgtgtgtgtgtgtgtgtgtgtgtgtgtagaaagagagcatcaactgaaaaatcacacaattttataaatttagaaaagagagctttatttcttataaaggtttgcagcctgcaaggtggccattatgacaggctgggaagtgtggcctacagccaaggctagaggcaggcccttccagggagggaaggagaggacaggaatttgagctgaatgagttgactacatatacatactcaataggatatcagaggagctatatcattttatgagaatactcataaaagaggtcctaacacatgcatattgaataaacatgcatgttcattctggtgtggagacttgacatttaaatgtgttataattaggccctacacatcaaaaagtgaagcagggaatgaaggtactcagcctctgtaaaggcacagcctctaaaactggccagaaccagtccatggaggatggtctcttatcaggagaaagttactgaaatcagtcccttgtccagtgaaagctgtcgttaaggtcggtggggcaggagatcagttactcagtgtctgtgaactgggtgagttgtaattgttttaatcttgcttctctcatagccagtgcttgcttggctgctagagaaaaataaaaactatgtggtagttagaatctagtttattctttaagagtagggtacaagacttaacccttgcctggcatggccctaggtcctgtttataatttggggtcttattgccacaaagagtctgttctgtcagtctcatgatctctattttaacgttaatgctgttcagttgattggtgacgtacacggtgtcacctct

SEQ ID NO: 433810 - DNA, 956 bp, Homo sapiens
agttttctctactaacctatttttctttttcttttttagaccaatgatgcgagctcagagtcaatagcatccttctctaaacaggaggtcatgagtagctttctgccagagggagggtgttacgagctgctcactgtgataggtatgtgcaggggccgtccttactctcctgctttctgctccaggggctgctgcagctttctcagcagccccagatgtgtgtacagcagaggccatccactagttaggaggattcatgggcacagacttgcttctgtgggtcttctctgtttttttatgccaagtatgggaagagatcaaacttccaggaaagaagctcttttgccatctttcctttgtggctgccatgtttccggtgtcctggccatagtgagtcagaaaggttggctgagaaggaactgatgagagaaaaatcaagaaatgtgagccatgaacataacagttaaattctgctgggaaaaggaaaaaaaaaaaagtaacagtagtgaaaaatttaacattaagtttcttttgaaatcaagtcccttttttaaaggaaaattttcttaaaaccttttgttgttcttgtcgttgcgtatggcattccctttttcttttaggcaaaggatttgaggacctgatgactgtgaatctagcaaggtacaaaccaacaggagagtacgtgactgtacggaggattaacctagaagcttgttccaatgagatggtaacattcttgcaggtaataaaccatgagtgtgtcacatggagggagggtgggctcttggctctgataggaattacaaggaattacaaagaaatgaagggagactaaacgttcggaagttatggaagctttcagtggagaatcctggccatttggcactaaggattgggctgaaatgctgctcagcctaatttatatttcccttttcttctccaaacactcccttctg

SEQ ID NO: 433811 - DNA, 968 bp, Homo sapiens
ctgcgcatggcacgttgcgtactcccctcccagcaaccggtctggcggcggcgcggcagtaaaactgaggaggcggagccaagacggtcggggctgcttgctaactccaggaacaggtttaagtttttgaaactgaagtaggtctacacagtaggaactcatgtcatttcttaccaatgatgcgagctcagagtcaatagcatccttctctaaacaggaggtcatgagtagctttctgccagagggagggtgttacgagctgctcactgtgataggcaaaggatttgaggacctgatgactgtgaatctagcaaggtacaaaccaacaggagagtacgtgactgtacggaggattaacctagaagcttgttccaatgagatggtaacattcttgcagggcgagctgcatgtctccaaactcttcaaccatcccaatatcgtgccatatcgagccacttttattgcagacaatgagctgtgggttgtcacatcattcatggcatacggttctgcaaaagatctcatctgtacacacttcatggatggcatgaatgagctggcgattgcttacatcctgcagggggtgctgaaggccctcgactacatccaccacatgggatatgtacacaggagtgtcaaagccagccacatcctgatctctgtggatgggaaggtctacctgtctggtttgcgcagcaacctcagcatgataagccatgggcagcggcagcgagtggtccacgattttcccaagtacagtgtcaaggttctgccgtggctcagccccgaggtcctccagcagatctcctgttagatgcagtcgactcacggtggatcccagctgtgaggcagcagccttaaggagcgcccatggttgaatgaaggccgctgctggacaagccccggaatgatactccggatgcgggccccccgggcaaaaaacccacaaaccacttcaagacaacccg

SEQ ID NO: 433812 - DNA, 664 bp, Homo sapiens
atgcaacttgttgtgtgccattttacaaactaacagggtcttgtgaataactactgtttcatctctgttttctgtgttatgaattccagtaatagttttcaaattgacatcagtgatccaaggcatctgtaatgtagaacgagtaagatggaaccaatatagggaaggcaaaaacagtcttcattattacagccagtactatctatttctcatctgtcaaatttaagaattattcatcaaataggcaaagaggagtggagaaaggaatcttgtttttagttcaagattctgttaaaaacttttccatagaaatgattcctaactgtactgcatgattctgttttcatagttgggattttgtttgtctgtctaaaggctgatagctaatttgttgcggcttggaagaaatactaattctctttggggttttcctctttagcggtgggtctcggaaaagttcattgttgagggcttaagagatttggaactatttggaggtaagtacagtatggcatttagccatcacttcaggatataaaaatcactacttttttgttgactaaatcaatctatagcaattggcaattctaagggcaagtgtaacctacagttgttggatttctttggttcctttttgaatttatggtttcccaaagatttgaag

SEQ ID NO: 433813 - DNA, 526 bp, Homo sapiens
ctgcgcatggcacgttgcgtactcccctcccagcaaccggtctggcggcggcgcggcagtaaaactgaggaggcggagccaagacggtcggggctgcttgctaactccaggaacaggtttaagtttttgaaactgaagtaggtctacacagtaggaactcatgtcatttcttgtaagtaaaccagagcgaatcagggtgagtgtttttctattcttctggctttactatttttgttttctgaaaagcagtgtattttggcagatgttgtaggtggttttctacgtgagggtcggaatgatacggaagtgagggatgtaggaagtaaggcaggtagtgcagcctccactcctgagaagagtttgcagacagaggctgaccagagacacaaaatttaccaccagcttgtctgatagagaagaaataagaagaaagtggcttatttcatgaatatcagtcatacaacattaaatgagtcgatgatacttttaagtgtagacgtttaactgcttatgaccccccgtgagg

SEQ ID NO: 433814 - DNA, 396 bp, Homo sapiens
ctctctgcagcatttttactgtggatctgtgtgtgtttatatgtagccccgcaggcactttttgctgtaatgacttttaagtggtttctattaataaatgtagtcctaagtacaataattgctgttctgaatgtgggtgtgtcttctgctaaaacacaaaatgccaacaatcaatttctctaccccagagcagcctccgggtgacactcggagaaaagtaagtggcttcctaggccctagcactatggctgttgcatggagatgacttcttgtggaagtttgtgtgttttgttggcttatcattttatgtttctgcttatctgtcactgagctttatttgtagtgtgatttttgtacttgtggagattcaggtttcaccctggaaaaatttggatg

SEQ ID NO: 433815 - DNA, 2184 bp, Homo sapiens
ctgcgcatggcacgttgcgtactcccctcccagcaaccggtctggcggcggcgcggcagtaaaactgaggaggcggagccaagacggtcggggctgcttgctaactccaggaacaggtttaagtttttgaaactgaagtaggtctacacagtaggaactcatgtcatttcttgtaagtaaaccagagcgaatcaggcggtgggtctcggaaaagttcattgttgagggcttaagagatttggaactatttggagaccaatgatgcgagctcagagtcaatagcatccttctctaaacaggaggtcatgagtagctttctgccagagggagggtgttacgagctgctcactgtgataggcaaaggatttgaggacctgatgactgtgaatctagcaaggtacaaaccaacaggagagtacgtgactgtacggaggattaacctagaagcttgttccaatgagatggtaacattcttgcagggcgagctgcatgtctccaaactcttcaaccatcccaatatcgtgccatatcgagccacttttattgcagacaatgagctgtgggttgtcacatcattcatggcatacggttctgcaaaagatctcatctgtacacacttcatggatggcatgaatgagctggcgattgcttacatcctgcagggggtgctgaaggccctcgactacatccaccacatgggatatgtacacaggagtgtcaaagccagccacatcctgatctctgtggatgggaaggtctacctgtctggtttgcgcagcaacctcagcatgataagccatgggcagcggcagcgagtggtccacgattttcccaagtacagtgtcaaggttctgccgtggctcagccccgaggtcctccagcagaatctccagggttatgatgccaagtctgacatctacagtgtgggaatcacagcctgtgaactggccaacggccatgtcccctttaaggatatgcctgccacccagatgctgctagagaaactgaacggcacagtgccctgcctgttggataccagcaccatccccgctgaggagctgaccatgagcccttcgcgctcagtggccaactctggcctgagtgacagcctgaccaccagcaccccccggccctccaacggtgactcgccctcccacccctaccaccgaaccttctccccccacttccaccactttgtggagcagtgccttcagcgcaacccggatgccaggcccagtgccagcaccctcctgaaccactctttcttcaagcagatcaagcgacgtgcctcagaggctttgcccgaattgcttcgtcctgtcacccccatcaccaattttgagggcagccagtctcaggaccacagtggaatctttggcctggtaacaaacctggaagagctggaggtggacgattgggagttctgagcctctgcaaactgtgcgcattctccagccagggatgcagaggccacccagaggcccttcctgagggccggccacattcccgccctcctgggcagattgggtagaaaggacattcttccaggaaagttgactgctgactgattgggaaagaaaatcctggagagacacttcactgctccaaggcttttgagacacaagggaatctcaacaaccagggatcaggagggtccaaagccgacattcccagtcctgtgagctcaggtgacctcctccgcagaagagagatgctgctctggccctgggagctgaattccaagcccagggtttggctccttaaacccgaggaccgccacctcttcccagtgcttgcgaccagcctcattctatttaactttgctctcagatgcctcagatgctataggtcagtgaaagggcaagtagtaagctgcctgcctcccttccctcagacctctccctcataattccagagaagggcatttctgtctttttaagcacagactaaggctggaacagtccatccttatccctcttctggcttgggccctgacacctaagtctttcccacggtttatgtgtgtgcctcattcctttcccaccaagaatccatcttagcgcctcctgccagctgccctggtgctttctccaagggccatcagtgtcttgcctagcttgagggcttaagtccttatgctgtgttagtttcgttgtcagaacaaattaaaattttcagagacgc

SEQ ID NO: 433816 - DNA, 2078 bp, Homo sapiens
ctgcgcatggcacgttgcgtactcccctcccagcaaccggtctggcggcggcgcggcagtaaaactgaggaggcggagccaagacggtcggggctgcttgctaactccaggaacaggtttaagtttttgaaactgaagtaggtctacacagtaggaactcatgtcatttcttgtaagtaaaccagagcgaatcaggcggtgggtctcggaaaagttcattgttgagggcttaagagatttggaactatttggagaccaatgatgcgagctcagagtcaatagcatccttctctaaacaggaggtcatgagtagctttctgccagagggagggtgttacgagctgctcactgtgataggcaaaggatttgaggacctgatgactgtgaatctagcaaggtacaaaccaacaggagagtacgtgactgtacggaggattaacctagaagcttgttccaatgagatggtaacattcttgcagggcgagctgcatgtctccaaactcttcaaccatcccaatatcgtgccatatcgagccacttttattgcagacaatgagctgtgggttgtcacatcattcatggcatacggttctgcaaaagatctcatctgtacacacttcatggatggcatgaatgagctggcgattgcttacatcctgcagggggtgctgaaggccctcgactacatccaccacatgggatatgtacacaggagtgtcaaagccagccacatcctgatctctgtggatgggaaggtctacctgtctggtttgcgcagcaacctcagcatgataagccatgggcagcggcagcgagtggtccacgattttcccaagtacagtgtcaaggttctgccgtggctcagccccgaggtcctccagcagaatctccagggttatgatgccaagtctgacatctacagtgtgggaatcacagcctgtgaactggccaacggccatgtcccctttaaggatatgcctgccacccagatgctgctagagaaactgaacggcacagtgccctgcctgttggataccagcaccatccccgctgaggagctgaccatgagcccttcgcgctcagtggccaactctggcctgagtgacagcctgaccaccagcacccgcccagtgccagcaccctcctgaaccactctttcttcaagcagatcaagcgacgtgcctcagaggctttgcccgaattgcttcgtcctgtcacccccatcaccaattttgagggcagccagtctcaggaccacagtggaatctttggcctggtaacaaacctggaagagctggaggtggacgattgggagttctgagcctctgcaaactgtgcgcattctccagccagggatgcagaggccacccagaggcccttcctgagggccggccacattcccgccctcctgggcagattgggtagaaaggacattcttccaggaaagttgactgctgactgattgggaaagaaaatcctggagagacacttcactgctccaaggcttttgagacacaagggaatctcaacaaccagggatcaggagggtccaaagccgacattcccagtcctgtgagctcaggtgacctcctccgcagaagagagatgctgctctggccctgggagctgaattccaagcccagggtttggctccttaaacccgaggaccgccacctcttcccagtgcttgcgaccagcctcattctatttaactttgctctcagatgcctcagatgctataggtcagtgaaagggcaagtagtaagctgcctgcctcccttccctcagacctctccctcataattccagagaagggcatttctgtctttttaagcacagactaaggctggaacagtccatccttatccctcttctggcttgggccctgacacctaagtctttcccacggtttatgtgtgtgcctcattcctttcccaccaagaatccatcttagcgcctcctgccagctgccctggtgctttctccaagggccatcagtgtcttgcctagcttgagggcttaagtccttatgctgtgttagtttcgttgtcagaacaaattaaaattttcagagacgc

SEQ ID NO: 433817 - DNA, 2102 bp, Homo sapiens
ctgcgcatggcacgttgcgtactcccctcccagcaaccggtctggcggcggcgcggcagtaaaactgaggaggcggagccaagacggtcggggctgcttgctaactccaggaacaggtttaagtttttgaaactgaagtaggtctacacagtaggaactcatgtcatttcttaccaatgatgcgagctcagagtcaatagcatccttctctaaacaggaggtcatgagtagctttctgccagagggagggtgttacgagctgctcactgtgataggcaaaggatttgaggacctgatgactgtgaatctagcaaggtacaaaccaacaggagagtacgtgactgtacggaggattaacctagaagcttgttccaatgagatggtaacattcttgcagggcgagctgcatgtctccaaactcttcaaccatcccaatatcgtgccatatcgagccacttttattgcagacaatgagctgtgggttgtcacatcattcatggcatacggttctgcaaaagatctcatctgtacacacttcatggatggcatgaatgagctggcgattgcttacatcctgcagggggtgctgaaggccctcgactacatccaccacatgggatatgtacacaggagtgtcaaagccagccacatcctgatctctgtggatgggaaggtctacctgtctggtttgcgcagcaacctcagcatgataagccatgggcagcggcagcgagtggtccacgattttcccaagtacagtgtcaaggttctgccgtggctcagccccgaggtcctccagcagaatctccagggttatgatgccaagtctgacatctacagtgtgggaatcacagcctgtgaactggccaacggccatgtcccctttaaggatatgcctgccacccagatgctgctagagaaactgaacggcacagtgccctgcctgttggataccagcaccatccccgctgaggagctgaccatgagcccttcgcgctcagtggccaactctggcctgagtgacagcctgaccaccagcaccccccggccctccaacggtgactcgccctcccacccctaccaccgaaccttctccccccacttccaccactttgtggagcagtgccttcagcgcaacccggatgccaggcccagtgccagcaccctcctgaaccactctttcttcaagcagatcaagcgacgtgcctcagaggctttgcccgaattgcttcgtcctgtcacccccatcaccaattttgagggcagccagtctcaggaccacagtggaatctttggcctggtaacaaacctggaagagctggaggtggacgattgggagttctgagcctctgcaaactgtgcgcattctccagccagggatgcagaggccacccagaggcccttcctgagggccggccacattcccgccctcctgggcagattgggtagaaaggacattcttccaggaaagttgactgctgactgattgggaaagaaaatcctggagagacacttcactgctccaaggcttttgagacacaagggaatctcaacaaccagggatcaggagggtccaaagccgacattcccagtcctgtgagctcaggtgacctcctccgcagaagagagatgctgctctggccctgggagctgaattccaagcccagggtttggctccttaaacccgaggaccgccacctcttcccagtgcttgcgaccagcctcattctatttaactttgctctcagatgcctcagatgctataggtcagtgaaagggcaagtagtaagctgcctgcctcccttccctcagacctctccctcataattccagagaagggcatttctgtctttttaagcacagactaaggctggaacagtccatccttatccctcttctggcttgggccctgacacctaagtctttcccacggtttatgtgtgtgcctcattcctttcccaccaagaatccatcttagcgcctcctgccagctgccctggtgctttctccaagggccatcagtgtcttgcctagcttgagggcttaagtccttatgctgtgttagtttcgttgtcagaacaaattaaaattttcagagacgc

SEQ ID NO: 433818 - DNA, 2160 bp, Homo sapiens
ctgcgcatggcacgttgcgtactcccctcccagcaaccggtctggcggcggcgcggcagtaaaactgaggaggcggagccaagacggtcggggctgcttgctaactccaggaacaggtttaagtttttgaaactgaagtaggtctacacagtaggaactcatgtcatttcttcggtgggtctcggaaaagttcattgttgagggcttaagagatttggaactatttggagaccaatgatgcgagctcagagtcaatagcatccttctctaaacaggaggtcatgagtagctttctgccagagggagggtgttacgagctgctcactgtgataggcaaaggatttgaggacctgatgactgtgaatctagcaaggtacaaaccaacaggagagtacgtgactgtacggaggattaacctagaagcttgttccaatgagatggtaacattcttgcagggcgagctgcatgtctccaaactcttcaaccatcccaatatcgtgccatatcgagccacttttattgcagacaatgagctgtgggttgtcacatcattcatggcatacggttctgcaaaagatctcatctgtacacacttcatggatggcatgaatgagctggcgattgcttacatcctgcagggggtgctgaaggccctcgactacatccaccacatgggatatgtacacaggagtgtcaaagccagccacatcctgatctctgtggatgggaaggtctacctgtctggtttgcgcagcaacctcagcatgataagccatgggcagcggcagcgagtggtccacgattttcccaagtacagtgtcaaggttctgccgtggctcagccccgaggtcctccagcagaatctccagggttatgatgccaagtctgacatctacagtgtgggaatcacagcctgtgaactggccaacggccatgtcccctttaaggatatgcctgccacccagatgctgctagagaaactgaacggcacagtgccctgcctgttggataccagcaccatccccgctgaggagctgaccatgagcccttcgcgctcagtggccaactctggcctgagtgacagcctgaccaccagcaccccccggccctccaacggtgactcgccctcccacccctaccaccgaaccttctccccccacttccaccactttgtggagcagtgccttcagcgcaacccggatgccaggcccagtgccagcaccctcctgaaccactctttcttcaagcagatcaagcgacgtgcctcagaggctttgcccgaattgcttcgtcctgtcacccccatcaccaattttgagggcagccagtctcaggaccacagtggaatctttggcctggtaacaaacctggaagagctggaggtggacgattgggagttctgagcctctgcaaactgtgcgcattctccagccagggatgcagaggccacccagaggcccttcctgagggccggccacattcccgccctcctgggcagattgggtagaaaggacattcttccaggaaagttgactgctgactgattgggaaagaaaatcctggagagacacttcactgctccaaggcttttgagacacaagggaatctcaacaaccagggatcaggagggtccaaagccgacattcccagtcctgtgagctcaggtgacctcctccgcagaagagagatgctgctctggccctgggagctgaattccaagcccagggtttggctccttaaacccgaggaccgccacctcttcccagtgcttgcgaccagcctcattctatttaactttgctctcagatgcctcagatgctataggtcagtgaaagggcaagtagtaagctgcctgcctcccttccctcagacctctccctcataattccagagaagggcatttctgtctttttaagcacagactaaggctggaacagtccatccttatccctcttctggcttgggccctgacacctaagtctttcccacggtttatgtgtgtgcctcattcctttcccaccaagaatccatcttagcgcctcctgccagctgccctggtgctttctccaagggccatcagtgtcttgcctagcttgagggcttaagtccttatgctgtgttagtttcgttgtcagaacaaattaaaattttcagagacgc

SEQ ID NO: 433819 - DNA, 2126 bp, Homo sapiens
ctgcgcatggcacgttgcgtactcccctcccagcaaccggtctggcggcggcgcggcagtaaaactgaggaggcggagccaagacggtcggggctgcttgctaactccaggaacaggtttaagtttttgaaactgaagtaggtctacacagtaggaactcatgtcatttcttgtaagtaaaccagagcgaatcaggaccaatgatgcgagctcagagtcaatagcatccttctctaaacaggaggtcatgagtagctttctgccagagggagggtgttacgagctgctcactgtgataggcaaaggatttgaggacctgatgactgtgaatctagcaaggtacaaaccaacaggagagtacgtgactgtacggaggattaacctagaagcttgttccaatgagatggtaacattcttgcagggcgagctgcatgtctccaaactcttcaaccatcccaatatcgtgccatatcgagccacttttattgcagacaatgagctgtgggttgtcacatcattcatggcatacggttctgcaaaagatctcatctgtacacacttcatggatggcatgaatgagctggcgattgcttacatcctgcagggggtgctgaaggccctcgactacatccaccacatgggatatgtacacaggagtgtcaaagccagccacatcctgatctctgtggatgggaaggtctacctgtctggtttgcgcagcaacctcagcatgataagccatgggcagcggcagcgagtggtccacgattttcccaagtacagtgtcaaggttctgccgtggctcagccccgaggtcctccagcagaatctccagggttatgatgccaagtctgacatctacagtgtgggaatcacagcctgtgaactggccaacggccatgtcccctttaaggatatgcctgccacccagatgctgctagagaaactgaacggcacagtgccctgcctgttggataccagcaccatccccgctgaggagctgaccatgagcccttcgcgctcagtggccaactctggcctgagtgacagcctgaccaccagcaccccccggccctccaacggtgactcgccctcccacccctaccaccgaaccttctccccccacttccaccactttgtggagcagtgccttcagcgcaacccggatgccaggcccagtgccagcaccctcctgaaccactctttcttcaagcagatcaagcgacgtgcctcagaggctttgcccgaattgcttcgtcctgtcacccccatcaccaattttgagggcagccagtctcaggaccacagtggaatctttggcctggtaacaaacctggaagagctggaggtggacgattgggagttctgagcctctgcaaactgtgcgcattctccagccagggatgcagaggccacccagaggcccttcctgagggccggccacattcccgccctcctgggcagattgggtagaaaggacattcttccaggaaagttgactgctgactgattgggaaagaaaatcctggagagacacttcactgctccaaggcttttgagacacaagggaatctcaacaaccagggatcaggagggtccaaagccgacattcccagtcctgtgagctcaggtgacctcctccgcagaagagagatgctgctctggccctgggagctgaattccaagcccagggtttggctccttaaacccgaggaccgccacctcttcccagtgcttgcgaccagcctcattctatttaactttgctctcagatgcctcagatgctataggtcagtgaaagggcaagtagtaagctgcctgcctcccttccctcagacctctccctcataattccagagaagggcatttctgtctttttaagcacagactaaggctggaacagtccatccttatccctcttctggcttgggccctgacacctaagtctttcccacggtttatgtgtgtgcctcattcctttcccaccaagaatccatcttagcgcctcctgccagctgccctggtgctttctccaagggccatcagtgtcttgcctagcttgagggcttaagtccttatgctgtgttagtttcgttgtcagaacaaattaaaattttcagagacgc

SEQ ID NO: 433820 - DNA, 2041 bp, Homo sapiens
ctgcgcatggcacgttgcgtactcccctcccagcaaccggtctggcggcggcgcggcagtaaaactgaggaggcggagccaagacggtcggggctgcttgctaactccaggaacaggtttaagtttttgaaactgaagtaggtctacacagtaggaactcatgtcatttcttgtaagtaaaccagagcgaatcaggcggtgggtctcggaaaagttcattgttgagggcttaagagatttggaactatttggagagcagcctccgggtgacactcggagaaaaaccaatgatgcgagctcagagtcaatagcatccttctctaaacaggaggtcatgagtagctttctgccagagggagggtgttacgagctgctcactgtgataggcaaaggatttgaggacctgatgactgtgaatctagcaaggtacaaaccaacaggagagtacgtgactgtacggaggattaacctagaagcttgttccaatgagatggtaacattcttgcagggcgagctgcatgtctccaaactcttcaaccatcccaatatcgtgccatatcgagccacttttattgcagacaatgagctgtgggttgtcacatcattcatggcatacggttctgcaaaagatctcatctgtacacacttcatggatggcatgaatgagctggcgattgcttacatcctgcagggggtgctgaaggccctcgactacatccaccacatgggatatgtacacagaatctccagggttatgatgccaagtctgacatctacagtgtgggaatcacagcctgtgaactggccaacggccatgtcccctttaaggatatgcctgccacccagatgctgctagagaaactgaacggcacagtgccctgcctgttggataccagcaccatccccgctgaggagctgaccatgagcccttcgcgctcagtggccaactctggcctgagtgacagcctgaccaccagcaccccccggccctccaacggtgactcgccctcccacccctaccaccgaaccttctccccccacttccaccactttgtggagcagtgccttcagcgcaacccggatgccaggcccagtgccagcaccctcctgaaccactctttcttcaagcagatcaagcgacgtgcctcagaggctttgcccgaattgcttcgtcctgtcacccccatcaccaattttgagggcagccagtctcaggaccacagtggaatctttggcctggtaacaaacctggaagagctggaggtggacgattgggagttctgagcctctgcaaactgtgcgcattctccagccagggatgcagaggccacccagaggcccttcctgagggccggccacattcccgccctcctgggcagattgggtagaaaggacattcttccaggaaagttgactgctgactgattgggaaagaaaatcctggagagacacttcactgctccaaggcttttgagacacaagggaatctcaacaaccagggatcaggagggtccaaagccgacattcccagtcctgtgagctcaggtgacctcctccgcagaagagagatgctgctctggccctgggagctgaattccaagcccagggtttggctccttaaacccgaggaccgccacctcttcccagtgcttgcgaccagcctcattctatttaactttgctctcagatgcctcagatgctataggtcagtgaaagggcaagtagtaagctgcctgcctcccttccctcagacctctccctcataattccagagaagggcatttctgtctttttaagcacagactaaggctggaacagtccatccttatccctcttctggcttgggccctgacacctaagtctttcccacggtttatgtgtgtgcctcattcctttcccaccaagaatccatcttagcgcctcctgccagctgccctggtgctttctccaagggccatcagtgtcttgcctagcttgagggcttaagtccttatgctgtgttagtttcgttgtcagaacaaattaaaattttcagagacgc

SEQ ID NO: 433821 - DNA, 1201 bp, Homo sapiens
atgagcccttcgcgctcagtggccaactctggcctgagtgacagcctgaccaccagcaccatccccgctgaggagctgaccatgagcccttcgcgctcagtggccaactctggcctgagtgacagcctgaccaccagcaccccccggccctccaacggtgactcgccctcccacccctaccaccgaaccttctccccccacttccaccactttgtggagcagtgccttcagcgcaacccggatgccaggcccagtgccagcaccctcctgaaccactctttcttcaagcagatcaagcgacgtgcctcagaggctttgcccgaattgcttcgtcctgtcacccccatcaccaattttgagggcagccagtctcaggaccacagtggaatctttggcctggtaacaaacctggaagagctggaggtggacgattgggagttctgagcctctgcaaactgtgcgcattctccagccagggatgcagaggccacccagaggcccttcctgagggccggccacattcccgccctcctgggcagattgggtagaaaggacattcttccaggaaagttgactgctgactgattgggaaagaaaatcctggagagacacttcactgctccaaggcttttgagacacaagggaatctcaacaaccagggatcaggagggtccaaagccgacattcccagtcctgtgagctcaggtgacctcctccgcagaagagagatgctgctctggccctgggagctgaattccaagcccagggtttggctccttaaacccgaggaccgccacctcttcccagtgcttgcgaccagcctcattctatttaactttgctctcagatgcctcagatgctataggtcagtgaaagggcaagtagtaagctgcctgcctcccttccctcagacctctccctcataattccagagaagggcatttctgtctttttaagcacagactaaggctggaacagtccatccttatccctcttctggcttgggccctgacacctaagtctttcccacggtttatgtgtgtgcctcattcctttcccaccaagaatccatcttagcgcctcctgccagctgccctggtgctttctccaagggccatcagtgtcttgcctagcttgagggcttaagtccttatgctgtgttagtttcgttgtcagaacaaattaaaattttcagagacgc

SEQ ID NO: 433822 - DNA, 3625 bp, Homo sapiens
ctgcgcatggcacgttgcgtactcccctcccagcaaccggtctggcggcggcgcggcagtaaaactgaggaggcggagccaagacggtcggggctgcttgctaactccaggaacaggtttaagtttttgaaactgaagtaggtctacacagtaggaactcatgtcatttcttgtaagtaaaccagagcgaatcaggcggtgggtctcggaaaagttcattgttgagggcttaagagatttggaactatttggagaccaatgatgcgagctcagagtcaatagcatccttctctaaacaggaggtcatgagtagctttctgccagagggagggtgttacgagctgctcactgtgataggcaaaggatttgaggacctgatgactgtgaatctagcaaggtacaaaccaacaggagagtacgtgactgtacggaggattaacctagaagcttgttccaatgagatggtaacattcttgcagggcgagctgcatgtctccaaactcttcaaccatcccaatatcgtgccatatcgagccacttttattgcagacaatgagctgtgggttgtcacatcattcatggcatacggttctgcaaaagatctcatctgtacacacttcatggatggcatgaatgagctggcgattgcttacatcctgcagggggtgctgaaggccctcgactacatccaccacatgggatatgtacacaggagtgtcaaagccagccacatcctgatctctgtggatgggaaggtctacctgtctggtttgcgcagcaacctcagcatgataagccatgggcagcggcagcgagtggtccacgattttcccaagtacagtgtcaaggttctgccgtggctcagccccgaggtcctccagcagaatctccagggttatgatgccaagtctgacatctacagtgtgggaatcacagcctgtgaactggccaacggccatgtcccctttaaggatatgcctgccacccagatgctgctagagaaactgaacggcacagtgccctgcctgttggataccagcaccatccccgctgaggagctgaccatgagcccttcgcgctcagtggccaactctggcctgagtgacagcctgaccaccagcaccccccggccctccaacggtgactcgccctcccacccctaccaccgaaccttctccccccacttccaccactttgtggagcagtgccttcagcgcaacccggatgccaggcccagtgccagcaccctcctgaaccactctttcttcaagcagatcaagcgacgtgcctcagaggctttgcccgaattgcttcgtcctgtcacccccatcaccaattttgagggcagccagtctcaggaccacagtggaatctttggcctggtaacaaacctggaagagctggaggtggacgattgggagttctgagcctctgcaaactgtgcgcattctccagccagggatgcagaggccacccagaggcccttcctgagggccggccacattcccgccctcctgggcagattgggtagaaaggacattcttccaggaaagttgactgctgactgattgggaaagaaaatcctggagagacacttcactgctccaaggcttttgagacacaagggaattctcagatgcctcagatgctataggtcagtgaaagggcaagtagtaagctgcctgcctcccttccctcagacctctccctcataattccagagaagggcatttctgtctttttaagcacagactaaggctggaacagtccatccttatccctcttctggcttgggccctgacacctaagtctttcccacggtttatgtgtgtgcctcattcctttcccaccaagaatccatcttagcgcctcctgccagctgccctggtgctttctccaagggccatcagtgtcttgcctagcttgagggcttaagtccttatgctgtgttagtttcgttgtcagaacaaattaaaattttcagagacgctgctggagaatggcattgtgtctgcgtcagctcaggggctacaggctgcttcctggtgtgtgtgcttgcagggatggccgtgctgccccaggtgagagctgtcccaccatccaagagcaggcccatgggtgctcactgaagctcagcagtgacctcttacactagatagaccagtttatttgaaaacctgtaacagatctgtctcttaactatctaaaattttaagactatgaattttagcctgtggtcatcaaaccactttggagctaaaaaggtccaaagattgagattgaggcagaggatgctggtggcctttggcaggaaaggaggtagaagggtttgtcttgcaaccggacatgggtgtctccttaccctgggtgctagcacccaaagagcaggaaacctaagaaccagccccgcccatccctgccatgctggctggcgccagcgagtgtgagccagggggtgcaaatctgaggctccctgcagtgcttccagggcacatggcttacccttctcccagtccctcagggggaaggccctcccccagctcaggcacctcaaatgcccctctaacctgaagctgcactgaaccatcaggtgcccttgctttccgtttcctcccaaattttaacagcagtttaaagaagaaaagtaagcctctttgggcagtgagaggctaaggtgaagggaatgacactgaccctgggctaggatggggcctggggcgagtgagtgtcgggggcggcggggagcatttccggccctcctccccctgctttaaacctcaagttcccttcgcctcgccccgccctcccccccccacacacacacaaacacagagtctgtcgcccaggctggcgtgcactggcttcatgttgactcactgtaggctccacctcccgggttcaagcgattcttctgcctcagcctcccgagtagctaggattacaggcacacaccaccacgcctggataatttttgtatttttagtagagacgggatttcaccatgttggccaggctggtcttggacttctgacctcgtgatccacctgtctctgcctcccaaagtgctgggactacaggcgtgagccaccgccgagccaagttccctttttttgtttgtttttgacgctggtcatcagtttcctttgcttctggatgccttctgcaccttgctgttggggcatcctcaatgcccatctgcagctcagcccacaggcccgtcctgggcagggtgccggggcctcaccatgcccaatggcagcaagccctgctcctagtacccccggggcttcccgtttcttgcatcaaacagcccctttggagaatctgatgacaggtgtggaagctttcccgagaggcagccactttagagggtctgacgctccccactagagagtcggcccacagtgcagacaaaacgcagatcttcctctagagagaacagaaggctggagaggagacgcggagccggtccgtggagtccgccagcctgggaaacagctggtcgctggggaagctgcagcctccctgctcccctgccaggcgtcgggcgagagctgttctgttccctgacaagcgcgtgggccgccagtgctattcctgccacagtgtgggaaggcgctgggct

SEQ ID NO: 433823 - DNA, 1990 bp, Homo sapiens
ctgcgcatggcacgttgcgtactcccctcccagcaaccggtctggcggcggcgcggcagtaaaactgaggaggcggagccaagacggtcggggctgcttgctaactccaggaacaggtttaagtttttgaaactgaagtaggtctacacagtaggaactcatgtcatttcttgtaagtaaaccagagcgaatcaggcggtgggtctcggaaaagttcattgttgagggcttaagagatttggaactatttggagaccaatgatgcgagctcagagtcaatagcatccttctctaaacaggaggtcatgagtagctttctgccagagggagggtgttacgagctgctcactgtgataggcaaaggatttgaggacctgatgactgtgaatctagcaaggtacaaaccaacaggagagtacgtgactgtacggaggattaacctagaagcttgttccaatgagatggtaacattcttgcagggcgagctgcatgtctccaaactcttcaaccatcccaatatcgtgccatatcgagccacttttattgcagacaatgagctgtgggttgtcacatcattcatggcatacggttctgcaaaagatctcatctgtacacacttcatggatggcatgaatgagctggcgattgcttacatcctgcagggggtgctgaaggccctcgactacatccaccacatgggatatgtacacaggagtgtcaaagccagccacatcctgatctctgtggatgggaaggtctacctgtctggtttgcgcagcaacctcagcatgataagccatgggcagcggcagcgagtggtccacgattttcccaagtacagtgtcaaggttctgccgtggctcagccccgaggtcctccagcagaatctccagggttatgatgccaagtctgacatctacagtgtgggaatcacagcctgtgaactggccaacggccatgtcccctttaaggatatgcctgccacccagatgctgctagagaaactgaacggcacagtgccctgcctgttggataccagcaccatccccgctgaggagctgaccatgagcccttcgcgctcagtggccaactctggcctgagtgacagcctgaccaccagcaccccccggccctccaacggtgactcgccctcccacccctaccaccgaaccttctccccccacttccaccactttgtggagcagtgccttcagcgcaacccggatgccaggcccagtgccagcaccctcctgaaccactctttcttcaagcagatcaagcgacgtgcctcagaggctttgcccgaattgcttcgtcctgtcacccccatcaccaattttgagggcagccagtctcaggaccacagtggaatctttggcctggtaacaaacctggaagagctggaggtggacgattgggagttctgagcctctgcaaactgtgcgcattctccagccagggatgcagaggccacccagaggcccttcctgagggccggccacattcccgccctcctgggcagattgggtagaaaggacattcttccaggaaagttgactgctgactgattgggaaagaaaatcctggagagacacttcactgctccaaggcttttgagacacaagggaattctcagatgcctcagatgctataggtcagtgaaagggcaagtagtaagctgcctgcctcccttccctcagacctctccctcataattccagagaagggcatttctgtctttttaagcacagactaaggctggaacagtccatccttatccctcttctggcttgggccctgacacctaagtctttcccacggtttatgtgtgtgcctcattcctttcccaccaagaatccatcttagcgcctcctgccagctgccctggtgctttctccaagggccatcagtgtcttgcctagcttgagggcttaagtccttatgctgtgttagtttcgttgtcagaacaaattaaaattttcagagacgc

SEQ ID NO: 433824 - DNA, 2623 bp, Homo sapiens
ctgcgcatggcacgttgcgtactcccctcccagcaaccggtctggcggcggcgcggcagtaaaactgaggaggcggagccaagacggtcggggctgcttgctaactccaggaacaggtttaagtttttgaaactgaagtaggtctacacagtaggaactcatgtcatttcttgtaagtaaaccagagcgaatcaggcggtgggtctcggaaaagttcattgttgagggcttaagagatttggaactatttggagaccaatgatgcgagctcagagtcaatagcatccttctctaaacaggaggtcatgagtagctttctgccagagggagggtgttacgagctgctcactgtgataggcaaaggatttgaggacctgatgactgtgaatctagcaaggtacaaaccaacaggagagtacgtgactgtacggaggattaacctagaagcttgttccaatgagatggtaacattcttgcagggcgagctgcatgtctccaaactcttcaaccatcccaatatcgtgccatatcgagccacttttattgcagacaatgagctgtgggttgtcacatcattcatggcatacggttctgcaaaagatctcatctgtacacacttcatggatggcatgaatgagctggcgattgcttacatcctgcagggggtgctgaaggccctcgactacatccaccacatgggatatgtacacaggagtgtcaaagccagccacatcctgatctctgtggatgggaaggtctacctgtctggtttgcgcagcaacctcagcatgataagccatgggcagcggcagcgagtggtccacgattttcccaagtacagtgtcaaggttctgccgtggctcagccccgaggtcctccagcagggtgctttctccaagggccatcagtgtcttgcctagcttgagggcttaagtccttatgctgtgttagtttcgttgtcagaacaaattaaaattttcagagacgctgctggagaatggcattgtgtctgcgtcagctcaggggctacaggctgcttcctggtgtgtgtgcttgcagggatggccgtgctgccccaggtgagagctgtcccaccatccaagagcaggcccatgggtgctcactgaagctcagcagtgacctcttacactagatagaccagtttatttgaaaacctgtaacagatctgtctcttaactatctaaaattttaagactatgaattttagcctgtggtcatcaaaccactttggagctaaaaaggtccaaagattgagattgaggcagaggatgctggtggcctttggcaggaaaggaggtagaagggtttgtcttgcaaccggacatgggtgtctccttaccctgggtgctagcacccaaagagcaggaaacctaagaaccagccccgcccatccctgccatgctggctggcgccagcgagtgtgagccagggggtgcaaatctgaggctccctgcagtgcttccagggcacatggcttacccttctcccagtccctcagggggaaggccctcccccagctcaggcacctcaaatgcccctctaacctgaagctgcactgaaccatcaggtgcccttgctttccgtttcctcccaaattttaacagcagtttaaagaagaaaagtaagcctctttgggcagtgagaggctaaggtgaagggaatgacactgaccctgggctaggatggggcctggggcgagtgagtgtcgggggcggcggggagcatttccggccctcctccccctgctttaaacctcaagttcccttcgcctcgccccgccctcccccccccacacacacacaaacacagagtctgtcgcccaggctggcgtgcactggcttcatgttgactcactgtaggctccacctcccgggttcaagcgattcttctgcctcagcctcccgagtagctaggattacaggcacacaccaccacgcctggataatttttgtatttttagtagagacgggatttcaccatgttggccaggctggtcttggacttctgacctcgtgatccacctgtctctgcctcccaaagtgctgggactacaggcgtgagccaccgccgagccaagttccctttttttgtttgtttttgacgctggtcatcagtttcctttgcttctggatgccttctgcaccttgctgttggggcatcctcaatgcccatctgcagctcagcccacaggcccgtcctgggcagggtgccggggcctcaccatgcccaatggcagcaagccctgctcctagtacccccggggcttcccgtttcttgcatcaaacagcccctttggagaatctgatgacaggtgtggaagctttcccgagaggcagccactttagagggtctgacgctccccactagagagtcggcccacagtgcagacaaaacgcagatcttcctctagagagaacagaaggctggagaggagacgcggagccggtccgtggagtccgccagcctgggaaacagctggtcgctggggaagctgcagcctccctgctcccctgccaggcgtcgggcgagagctgttctgttccctgacaagcgcgtgggccgccagtgctattcctgccacagtgtgggaaggcgctgggct

SEQ ID NO: 433825 - DNA, 563 bp, Homo sapiens
actgatgctgtagtcgatctagagtatccccttgattgtcatcttggcggcagtcctgtgagctcaggtgacctcctccgcagaagagagatgctgctctggccctgggagctgaattccaagcccagggtttggctccttaaacccgaggaccgccacctcttcccagtgcttgcgaccagcctcattctatttaactttgctctcagatgcctcagatgctataggtcagtgaaagggcaagtagtaagctgcctgcctcccttccctcagacctctccctcataattccagagaagggcatttctgtctttttaagcacagactaaggctggaacagtccatccttatccctcttctggcttgggccctgacacctaagtctttcccacggtttatgtgtgtgcctcattcctttcccaccaagaatccatcttagcgcctcctgccagctgccctggtgctttctccaagggccatcagtgtcttgcctagcttgagggcttaagtccttatgctgtgttagtttcgttgtcagaacaaattaaaattttcagagacgc

SEQ ID NO: 433826 - DNA, 2526 bp, Homo sapiens
ctgcgcatggcacgttgcgtactcccctcccagcaaccggtctggcggcggcgcggcagtaaaactgaggaggcggagccaagacggtcggggctgcttgctaactccaggaacaggtttaagtttttgaaactgaagtaggtctacacagtaggaactcatgtcatttcttgtaagtaaaccagagcgaatcaggcggtgggtctcggaaaagttcattgttgagggcttaagagatttggaactatttggagaccaatgatgcgagctcagagtcaatagcatccttctctaaacaggaggtcatgagtagctttctgccagagggagggtgttacgagctgctcactgtgataggcaaaggatttgaggacctgatgactgtgaatctagcaaggtacaaaccaacaggagagtacgtgactgtacggaggattaacctagaagcttgttccaatgagatggtaacattcttgcagggcgagctgcatgtctccaaactcttcaaccatcccaatatcgtgccatatcgagccacttttattgcagacaatgagctgtgggttgtcacatcattcatggcatacggttctgcaaaagatctcatctgtacacacttcatggatggcatgaatgagctggcgattgcttacatcctgcagggggtgctgaaggccctcgactacatccaccacatgggatatgtacacaggagtgtcaaagccagccacatcctgatctctgtggatgggaaggtctacctgtctggtttgcgcagcaacctcagggtgctttctccaagggccatcagtgtcttgcctagcttgagggcttaagtccttatgctgtgttagtttcgttgtcagaacaaattaaaattttcagagacgctgctggagaatggcattgtgtctgcgtcagctcaggggctacaggctgcttcctggtgtgtgtgcttgcagggatggccgtgctgccccaggtgagagctgtcccaccatccaagagcaggcccatgggtgctcactgaagctcagcagtgacctcttacactagatagaccagtttatttgaaaacctgtaacagatctgtctcttaactatctaaaattttaagactatgaattttagcctgtggtcatcaaaccactttggagctaaaaaggtccaaagattgagattgaggcagaggatgctggtggcctttggcaggaaaggaggtagaagggtttgtcttgcaaccggacatgggtgtctccttaccctgggtgctagcacccaaagagcaggaaacctaagaaccagccccgcccatccctgccatgctggctggcgccagcgagtgtgagccagggggtgcaaatctgaggctccctgcagtgcttccagggcacatggcttacccttctcccagtccctcagggggaaggccctcccccagctcaggcacctcaaatgcccctctaacctgaagctgcactgaaccatcaggtgcccttgctttccgtttcctcccaaattttaacagcagtttaaagaagaaaagtaagcctctttgggcagtgagaggctaaggtgaagggaatgacactgaccctgggctaggatggggcctggggcgagtgagtgtcgggggcggcggggagcatttccggccctcctccccctgctttaaacctcaagttcccttcgcctcgccccgccctcccccccccacacacacacaaacacagagtctgtcgcccaggctggcgtgcactggcttcatgttgactcactgtaggctccacctcccgggttcaagcgattcttctgcctcagcctcccgagtagctaggattacaggcacacaccaccacgcctggataatttttgtatttttagtagagacgggatttcaccatgttggccaggctggtcttggacttctgacctcgtgatccacctgtctctgcctcccaaagtgctgggactacaggcgtgagccaccgccgagccaagttccctttttttgtttgtttttgacgctggtcatcagtttcctttgcttctggatgccttctgcaccttgctgttggggcatcctcaatgcccatctgcagctcagcccacaggcccgtcctgggcagggtgccggggcctcaccatgcccaatggcagcaagccctgctcctagtacccccggggcttcccgtttcttgcatcaaacagcccctttggagaatctgatgacaggtgtggaagctttcccgagaggcagccactttagagggtctgacgctccccactagagagtcggcccacagtgcagacaaaacgcagatcttcctctagagagaacagaaggctggagaggagacgcggagccggtccgtggagtccgccagcctgggaaacagctggtcgctggggaagctgcagcctccctgctcccctgccaggcgtcgggcgagagctgttctgttccctgacaagcgcgtgggccgccagtgctattcctgccacagtgtgggaaggcgctgggct

SEQ ID NO: 433827 - DNA, 2565 bp, Homo sapiens
ctgcgcatggcacgttgcgtactcccctcccagcaaccggtctggcggcggcgcggcagtaaaactgaggaggcggagccaagacggtcggggctgcttgctaactccaggaacaggtttaagtttttgaaactgaagtaggtctacacagtaggaactcatgtcatttcttgtaagtaaaccagagcgaatcaggaccaatgatgcgagctcagagtcaatagcatccttctctaaacaggaggtcatgagtagctttctgccagagggagggtgttacgagctgctcactgtgataggcaaaggatttgaggacctgatgactgtgaatctagcaaggtacaaaccaacaggagagtacgtgactgtacggaggattaacctagaagcttgttccaatgagatggtaacattcttgcagggcgagctgcatgtctccaaactcttcaaccatcccaatatcgtgccatatcgagccacttttattgcagacaatgagctgtgggttgtcacatcattcatggcatacggttctgcaaaagatctcatctgtacacacttcatggatggcatgaatgagctggcgattgcttacatcctgcagggggtgctgaaggccctcgactacatccaccacatgggatatgtacacaggagtgtcaaagccagccacatcctgatctctgtggatgggaaggtctacctgtctggtttgcgcagcaacctcagcatgataagccatgggcagcggcagcgagtggtccacgattttcccaagtacagtgtcaaggttctgccgtggctcagccccgaggtcctccagcagggtgctttctccaagggccatcagtgtcttgcctagcttgagggcttaagtccttatgctgtgttagtttcgttgtcagaacaaattaaaattttcagagacgctgctggagaatggcattgtgtctgcgtcagctcaggggctacaggctgcttcctggtgtgtgtgcttgcagggatggccgtgctgccccaggtgagagctgtcccaccatccaagagcaggcccatgggtgctcactgaagctcagcagtgacctcttacactagatagaccagtttatttgaaaacctgtaacagatctgtctcttaactatctaaaattttaagactatgaattttagcctgtggtcatcaaaccactttggagctaaaaaggtccaaagattgagattgaggcagaggatgctggtggcctttggcaggaaaggaggtagaagggtttgtcttgcaaccggacatgggtgtctccttaccctgggtgctagcacccaaagagcaggaaacctaagaaccagccccgcccatccctgccatgctggctggcgccagcgagtgtgagccagggggtgcaaatctgaggctccctgcagtgcttccagggcacatggcttacccttctcccagtccctcagggggaaggccctcccccagctcaggcacctcaaatgcccctctaacctgaagctgcactgaaccatcaggtgcccttgctttccgtttcctcccaaattttaacagcagtttaaagaagaaaagtaagcctctttgggcagtgagaggctaaggtgaagggaatgacactgaccctgggctaggatggggcctggggcgagtgagtgtcgggggcggcggggagcatttccggccctcctccccctgctttaaacctcaagttcccttcgcctcgccccgccctcccccccccacacacacacaaacacagagtctgtcgcccaggctggcgtgcactggcttcatgttgactcactgtaggctccacctcccgggttcaagcgattcttctgcctcagcctcccgagtagctaggattacaggcacacaccaccacgcctggataatttttgtatttttagtagagacgggatttcaccatgttggccaggctggtcttggacttctgacctcgtgatccacctgtctctgcctcccaaagtgctgggactacaggcgtgagccaccgccgagccaagttccctttttttgtttgtttttgacgctggtcatcagtttcctttgcttctggatgccttctgcaccttgctgttggggcatcctcaatgcccatctgcagctcagcccacaggcccgtcctgggcagggtgccggggcctcaccatgcccaatggcagcaagccctgctcctagtacccccggggcttcccgtttcttgcatcaaacagcccctttggagaatctgatgacaggtgtggaagctttcccgagaggcagccactttagagggtctgacgctccccactagagagtcggcccacagtgcagacaaaacgcagatcttcctctagagagaacagaaggctggagaggagacgcggagccggtccgtggagtccgccagcctgggaaacagctggtcgctggggaagctgcagcctccctgctcccctgccaggcgtcgggcgagagctgttctgttccctgacaagcgcgtgggccgccagtgctattcctgccacagtgtgggaaggcgctgggct

SEQ ID NO: 433828 - DNA, 2171 bp, Homo sapiens
ccaccatatactctccgggccatgaaccctaacccatactacccatccatactcatcattaataatcataatggctatagccataaaactaggaatagccccctttcacttctgagtcccgaggaccgccacctcttcccagtgcttgcgaccagcctcattctatttaactttgctctcagatgcctcagatgctataggtcagtgaaagggcaagtagtaagctgcctgcctcccttccctcagacctctccctcataattccagagaagggcatttctgtctttttaagcacagactaaggctggaacagtccatccttatccctcttctggcttgggccctgacacctaagtctttcccacggtttatgtgtgtgcctcattcctttcccaccaagaatccatcttagcgcctcctgccagctgccctggtgctttctccaagggccatcagtgtcttgcctagcttgagggcttaagtccttatgctgtgttagtttcgttgtcagaacaaattaaaattttcagagacgctgctggagaatggcattgtgtctgcgtcagctcaggggctacaggctgcttcctggtgtgtgtgcttgcagggatggccgtgctgccccaggtgagagctgtcccaccatccaagagcaggcccatgggtgctcactgaagctcagcagtgacctcttacactagatagaccagtttatttgaaaacctgtaacagatctgtctcttaactatctaaaattttaagactatgaattttagcctgtggtcatcaaaccactttggagctaaaaaggtccaaagattgagattgaggcagaggatgctggtggcctttggcaggaaaggaggtagaagggtttgtcttgcaaccggacatgggtgtctccttaccctgggtgctagcacccaaagagcaggaaacctaagaaccagccccgcccatccctgccatgctggctggcgccagcgagtgtgagccagggggtgcaaatctgaggctccctgcagtgcttccagggcacatggcttacccttctcccagtccctcagggggaaggccctcccccagctcaggcacctcaaatgcccctctaacctgaagctgcactgaaccatcaggtgcccttgctttccgtttcctcccaaattttaacagcagtttaaagaagaaaagtaagcctctttgggcagtgagaggctaaggtgaagggaatgacactgaccctgggctaggatggggcctggggcgagtgagtgtcgggggcggcggggagcatttccggccctcctccccctgctttaaacctcaagttcccttcgcctcgccccgccctcccccccccacacacacacaaacacagagtctgtcgcccaggctggcgtgcactggcttcatgttgactcactgtaggctccacctcccgggttcaagcgattcttctgcctcagcctcccgagtagctaggattacaggcacacaccaccacgcctggataatttttgtatttttagtagagacgggatttcaccatgttggccaggctggtcttggacttctgacctcgtgatccacctgtctctgcctcccaaagtgctgggactacaggcgtgagccaccgccgagccaagttccctttttttgtttgtttttgacgctggtcatcagtttcctttgcttctggatgccttctgcaccttgctgttggggcatcctcaatgcccatctgcagctcagcccacaggcccgtcctgggcagggtgccggggcctcaccatgcccaatggcagcaagccctgctcctagtacccccggggcttcccgtttcttgcatcaaacagcccctttggagaatctgatgacaggtgtggaagctttcccgagaggcagccactttagagggtctgacgctccccactagagagtcggcccacagtgcagacaaaacgcagatcttcctctagagagaacagaaggctggagaggagacgcggagccggtccgtggagtccgccagcctgggaaacagctggtcgctggggaagctgcagcctccctgctcccctgccaggcgtcgggcgagagctgttctgttccctgacaagcgcgtgggccgccagtgctattcctgccacagtgtgggaaggcgctgggct

SEQ ID NO: 433829 - DNA, 846 bp, Homo sapiens
ctgcgcatggcacgttgcgtactcccctcccagcaaccggtctggcggcggcgcggcagtaaaactgaggaggcggagccaagacggtcggggctgcttgctaactccaggaacaggtttaagtttttgaaactgaagtaggtctacacagtaggaactcatgtcatttcttgtaagtaaaccagagcgaatcaggcggtgggtctcggaaaagttcattgttgagggcttaagagatttggaactatttggagaccaatgatgcgagctcagagtcaatagcatccttctctaaacaggaggtcatgagtagctttctgccagagggagggtgttacgagctgctcactgtgataggcaaaggatttgaggacctgatgactgtgaatctagcaaggtacaaaccaacaggagagtacgtgactgtacggaggattaacctagaagcttgttccaatgagatggtaacattcttgcagggcgagctgcatgtctccaaactcttcaaccatcccaatatcgtgccatatcgagccacttttattgcagacaatgagctgtgggttgtcacatcattcatggcatacggttctgcaaaagatctcatctgtacacacttcatggatggcatgaatgagctggcgattgcttacatcctgcagggggtgctgaaggccctcgactacatccaccacatgggatatgtacacaggtgcgttcttaggcggcctttcccatgattacagtgggtagctatgcccctgagccttcaggtaaagtgaagtttgactgaagttaatgaagccagagtttaaaatcaaggatctggattcttgctgaagatct

SEQ ID NO: 433830 - DNA, 2213 bp, Homo sapiens
ctgcgcatggcacgttgcgtactcccctcccagcaaccggtctggcggcggcgcggcagtaaaactgaggaggcggagccaagacggtcggggctgcttgctaactccaggaacaggtttaagtttttgaaactgaagtaggtctacacagtaggaactcatgtcatttcttgtaagtaaaccagagcgaatcaggcggtgggtctcggaaaagttcattgttgagggcttaagagatttggaactatttggagagcagcctccgggtgacactcggagaaaaaccaatgatgcgagctcagagtcaatagcatccttctctaaacaggaggtcatgagtagctttctgccagagggagggtgttacgagctgctcactgtgataggcaaaggatttgaggacctgatgactgtgaatctagcaaggtacaaaccaacaggagagtacgtgactgtacggaggattaacctagaagcttgttccaatgagatggtaacattcttgcagggcgagctgcatgtctccaaactcttcaaccatcccaatatcgtgccatatcgagccacttttattgcagacaatgagctgtgggttgtcacatcattcatggcatacggttctgcaaaagatctcatctgtacacacttcatggatggcatgaatgagctggcgattgcttacatcctgcagggggtgctgaaggccctcgactacatccaccacatgggatatgtacacaggagtgtcaaagccagccacatcctgatctctgtggatgggaaggtctacctgtctggtttgcgcagcaacctcagcatgataagccatgggcagcggcagcgagtggtccacgattttcccaagtacagtgtcaaggttctgccgtggctcagccccgaggtcctccagcagaatctccagggttatgatgccaagtctgacatctacagtgtgggaatcacagcctgtgaactggccaacggccatgtcccctttaaggatatgcctgccacccagatgctgctagagaaactgaacggcacagtgccctgcctgttggataccagcaccatccccgctgaggagctgaccatgagcccttcgcgctcagtggccaactctggcctgagtgacagcctgaccaccagcaccccccggccctccaacggtgactcgccctcccacccctaccaccgaaccttctccccccacttccaccactttgtggagcagtgccttcagcgcaacccggatgccaggcccagtgccagcaccctcctgaaccactctttcttcaagcagatcaagcgacgtgcctcagaggctttgcccgaattgcttcgtcctgtcacccccatcaccaattttgagggcagccagtctcaggaccacagtggaatctttggcctggtaacaaacctggaagagctggaggtggacgattgggagttctgagcctctgcaaactgtgcgcattctccagccagggatgcagaggccacccagaggcccttcctgagggccggccacattcccgccctcctgggcagattgggtagaaaggacattcttccaggaaagttgactgctgactgattgggaaagaaaatcctggagagacacttcactgctccaaggcttttgagacacaagggaatctcaacaaccagggatcaggagggtccaaagccgacattcccagtcctgtgagctcaggtgacctcctccgcagaagagagatgctgctctggccctgggagctgaattccaagcccagggtttggctccttaaacccgaggaccgccacctcttcccagtgcttgcgaccagcctcattctatttaactttgctctcagatgcctcagatgctataggtcagtgaaagggcaagtagtaagctgcctgcctcccttccctcagacctctccctcataattccagagaagggcatttctgtctttttaagcacagactaaggctggaacagtccatccttatccctcttctggcttgggccctgacacctaagtctttcccacggtttatgtgtgtgcctcattcctttcccaccaagaatccatcttagcgcctcctgccagctgccctggtgctttctccaagggccatcagtgtcttgcctagcttgagggcttaagtccttatgctgtgttagtttcgttgtcagaacaaattaaaattttcagagacgc

SEQ ID NO: 433831 - DNA, 3848 bp, Homo sapiens
ctgcgcatggcacgttgcgtactcccctcccagcaaccggtctggcggcggcgcggcagtaaaactgaggaggcggagccaagacggtcggggctgcttgctaactccaggaacaggtttaagtttttgaaactgaagtaggtctacacagtaggaactcatgtcatttcttgtaagtaaaccagagcgaatcaggcggtgggtctcggaaaagttcattgttgagggcttaagagatttggaactatttggagagcagcctccgggtgacactcggagaaaaaccaatgatgcgagctcagagtcaatagcatccttctctaaacaggaggtcatgagtagctttctgccagagggagggtgttacgagctgctcactgtgataggcaaaggatttgaggacctgatgactgtgaatctagcaaggtacaaaccaacaggagagtacgtgactgtacggaggattaacctagaagcttgttccaatgagatggtaacattcttgcagggcgagctgcatgtctccaaactcttcaaccatcccaatatcgtgccatatcgagccacttttattgcagacaatgagctgtgggttgtcacatcattcatggcatacggttctgcaaaagatctcatctgtacacacttcatggatggcatgaatgagctggcgattgcttacatcctgcagggggtgctgaaggccctcgactacatccaccacatgggatatgtacacaggagtgtcaaagccagccacatcctgatctctgtggatgggaaggtctacctgtctggtttgcgcagcaacctcagcatgataagccatgggcagcggcagcgagtggtccacgattttcccaagtacagtgtcaaggttctgccgtggctcagccccgaggtcctccagcagaatctccagggttatgatgccaagtctgacatctacagtgtgggaatcacagcctgtgaactggccaacggccatgtcccctttaaggatatgcctgccacccagatgctgctagagaaactgaacggcacagtgccctgcctgttggataccagcaccatccccgctgaggagctgaccatgagcccttcgcgctcagtggccaactctggcctgagtgacagcctgaccaccagcaccccccggccctccaacggtgactcgccctcccacccctaccaccgaaccttctccccccacttccaccactttgtggagcagtgccttcagcgcaacccggatgccaggcccagtgccagcaccctcctgaaccactctttcttcaagcagatcaagcgacgtgcctcagaggctttgcccgaattgcttcgtcctgtcacccccatcaccaattttgagggcagccagtctcaggaccacagtggaatctttggcctggtaacaaacctggaagagctggaggtggacgattgggagttctgagcctctgcaaactgtgcgcattctccagccagggatgcagaggccacccagaggcccttcctgagggccggccacattcccgccctcctgggcagattgggtagaaaggacattcttccaggaaagttgactgctgactgattgggaaagaaaatcctggagagacacttcactgctccaaggcttttgagacacaagggaatctcaacaaccagggatcaggagggtccaaagccgacattcccagtcctgtgagctcaggtgacctcctccgcagaagagagatgctgctctggccctgggagctgaattccaagcccagggtttggctccttaaacccgaggaccgccacctcttcccagtgcttgcgaccagcctcattctatttaactttgctctcagatgcctcagatgctataggtcagtgaaagggcaagtagtaagctgcctgcctcccttccctcagacctctccctcataattccagagaagggcatttctgtctttttaagcacagactaaggctggaacagtccatccttatccctcttctggcttgggccctgacacctaagtctttcccacggtttatgtgtgtgcctcattcctttcccaccaagaatccatcttagcgcctcctgccagctgccctggtgctttctccaagggccatcagtgtcttgcctagcttgagggcttaagtccttatgctgtgttagtttcgttgtcagaacaaattaaaattttcagagacgctgctggagaatggcattgtgtctgcgtcagctcaggggctacaggctgcttcctggtgtgtgtgcttgcagggatggccgtgctgccccaggtgagagctgtcccaccatccaagagcaggcccatgggtgctcactgaagctcagcagtgacctcttacactagatagaccagtttatttgaaaacctgtaacagatctgtctcttaactatctaaaattttaagactatgaattttagcctgtggtcatcaaaccactttggagctaaaaaggtccaaagattgagattgaggcagaggatgctggtggcctttggcaggaaaggaggtagaagggtttgtcttgcaaccggacatgggtgtctccttaccctgggtgctagcacccaaagagcaggaaacctaagaaccagccccgcccatccctgccatgctggctggcgccagcgagtgtgagccagggggtgcaaatctgaggctccctgcagtgcttccagggcacatggcttacccttctcccagtccctcagggggaaggccctcccccagctcaggcacctcaaatgcccctctaacctgaagctgcactgaaccatcaggtgcccttgctttccgtttcctcccaaattttaacagcagtttaaagaagaaaagtaagcctctttgggcagtgagaggctaaggtgaagggaatgacactgaccctgggctaggatggggcctggggcgagtgagtgtcgggggcggcggggagcatttccggccctcctccccctgctttaaacctcaagttcccttcgcctcgccccgccctcccccccccacacacacacaaacacagagtctgtcgcccaggctggcgtgcactggcttcatgttgactcactgtaggctccacctcccgggttcaagcgattcttctgcctcagcctcccgagtagctaggattacaggcacacaccaccacgcctggataatttttgtatttttagtagagacgggatttcaccatgttggccaggctggtcttggacttctgacctcgtgatccacctgtctctgcctcccaaagtgctgggactacaggcgtgagccaccgccgagccaagttccctttttttgtttgtttttgacgctggtcatcagtttcctttgcttctggatgccttctgcaccttgctgttggggcatcctcaatgcccatctgcagctcagcccacaggcccgtcctgggcagggtgccggggcctcaccatgcccaatggcagcaagccctgctcctagtacccccggggcttcccgtttcttgcatcaaacagcccctttggagaatctgatgacaggtgtggaagctttcccgagaggcagccactttagagggtctgacgctccccactagagagtcggcccacagtgcagacaaaacgcagatcttcctctagagagaacagaaggctggagaggagacgcggagccggtccgtggagtccgccagcctgggaaacagctggtcgctggggaagctgcagcctccctgctcccctgccaggcgtcgggcgagagctgttctgttccctgacaagcgcgtgggccgccagtgctattcctgccacagtgtgggaaggcgctgggct

SEQ ID NO: 433832 - DNA, 2437 bp, Homo sapiens
ctgcgcatggcacgttgcgtactcccctcccagcaaccggtctggcggcggcgcggcagtaaaactgaggaggcggagccaagacggtcggggctgcttgctaactccaggaacaggtttaagtttttgaaactgaagtaggtctacacagtaggaactcatgtcatttcttgtaagtaaaccagagcgaatcaggcggtgggtctcggaaaagttcattgttgagggcttaagagatttggaactatttggagaccaatgatgcgagctcagagtcaatagcatccttctctaaacaggaggtcatgagtagctttctgccagagggagggtgttacgagctgctcactgtgataggcaaaggatttgaggacctgatgactgtgaatctagcaaggtacaaaccaacaggagagtacgtgactgtacggaggattaacctagaagcttgttccaatgagatggtaacattcttgcagggcgagctgcatgtctccaaactcttcaaccatcccaatatcgtgccatatcgagccacttttattgcagacaatgagctgtgggttgtcacatcattcatggcatacggttctgcaaaagatctcatctgtacacacttcatggatggcatgaatgagctggcgattgcttacatcctgcagggggtgctgaaggccctcgactacatccaccacatgggatatgtacacaggagtgtcaaagccagccacatcctgatctctgtggatgggaaggtctacctgtctggtttgcgcagcaacctcagcatgataagccatgggcagcggcagcgagtggtccacgattttcccaagtacagtgtcaaggttctgccgtggctcagccccgaggtcctccagcagaatctccagggttatgatgccaagtctgacatctacagtgtgggaatcacagcctgtgaactggccaacggccatgtcccctttaaggatatgcctgccacccagatgctgctagagaaactgaacggcacagtgccctgcctgttggataccagcaccatccccgctgaggagctgaccatgagcccttcgcgctcagtggccaactctggcctgagtgacagcctgaccaccagcaccccccggccctccaacggtgactcgccctcccacccctaccaccgaaccttctccccccacttccaccactttgtggagcagtgccttcagcgcaacccggatgccaggcccagtgccagcaccctcctgaaccactctttcttcaagcaggtatcgtagccccttcgttctggttctggttctagttctggttctaacaactcacaatccctttagctttctctcccctccctttgaatgagagaaactaccccgcttccgaagcccctgaaagacactgctccttcctctcatggagttggctccgacagcccgtctgccaccaggccatggttccttgccccatggtgtcctgggacccagagcaacaggatctgtcacccacctctctcttctcccccagatcaagcgacgtgcctcagaggctttgcccgaattgcttcgtcctgtcacccccatcaccaattttgagggcagccagtctcaggaccacagtggaatctttggcctggtaacaaacctggaagagctggaggtggacgattgggagttctgagcctctgcaaactgtgcgcattctccagccagggatgcagaggccacccagaggcccttcctgagggccggccacattcccgccctcctgggcagattgggtagaaaggacattcttccaggaaagttgactgctgactgattgggaaagaaaatcctggagagacacttcactgctccaaggcttttgagacacaagggaatctcaacaaccagggatcaggagggtccaaagccgacattcccagtcctgtgagctcaggtgacctcctccgcagaagagagatgctgctctggccctgggagctgaattccaagcccagggtttggctccttaaacccgaggaccgccacctcttcccagtgcttgcgaccagcctcattctatttaactttgctctcagatgcctcagatgctataggtcagtgaaagggcaagtagtaagctgcctgcctcccttccctcagacctctccctcataattccagagaagggcatttctgtctttttaagcacagactaaggctggaacagtccatccttatccctcttctggcttgggccctgacacctaagtctttcccacggtttatgtgtgtgcctcattcctttcccaccaagaatccatcttagcgcctcctgccagctgccctggtgctttctccaagggccatcagtgtcttgcctagcttgagggcttaagtccttatgctgtgttagtttcgttgtcagaacaaattaaaattttcagagacgc

SEQ ID NO: 433833 - DNA, 2447 bp, Homo sapiens
agttttctctactaacctatttttctttttcttttttagaccaatgatgcgagctcagagtcaatagcatccttctctaaacaggaggtcatgagtagctttctgccagagggagggtgttacgagctgctcactgtgataggtatgtgcaggggccgtccttactctcctgctttctgctccaggggctgctgcagctttctcagcagccccagatgtgtgtacagcagaggccatccactagttaggaggattcatgggcacagacttgcttctgtgggtcttctctgtttttttatgccaagtatgggaagagatcaaacttccaggaaagaagctcttttgccatctttcctttgtggctgccatgtttccggtgtcctggccatagtgagtcagaaaggttggctgagaaggaactgatgagagaaaaatcaagaaatgtgagccatgaacataacagttaaattctgctgggaaaaggaaaaaaaaaaaagtaacagtagtgaaaaatttaacattaagtttcttttgaaatcaagtcccttttttaaaggaaaattttcttaaaaccttttgttgttcttgtcgttgcgtatggcattccctttttcttttaggcaaaggatttgaggacctgatgactgtgaatctagcaaggtacaaaccaacaggagagtacgtgactgtacggaggattaacctagaagcttgttccaatgagatggtaacattcttgcagggcgagctgcatgtctccaaactcttcaaccatcccaatatcgtgccatatcgagccacttttattgcagacaatgagctgtgggttgtcacatcattcatggcatacggttctgcaaaagatctcatctgtacacacttcatggatggcatgaatgagctggcgattgcttacatcctgcagggggtgctgaaggccctcgactacatccaccacatgggatatgtacacaggagtgtcaaagccagccacatcctgatctctgtggatgggaaggtctacctgtctggtttgcgcagcaacctcagcatgataagccatgggcagcggcagcgagtggtccacgattttcccaagtacagtgtcaaggttctgccgtggctcagccccgaggtcctccagcagaatctccagggttatgatgccaagtctgacatctacagtgtgggaatcacagcctgtgaactggccaacggccatgtcccctttaaggatatgcctgccacccagatgctgctagagaaactgaacggcacagtgccctgcctgttggataccagcaccatccccgctgaggagctgaccatgagcccttcgcgctcagtggccaactctggcctgagtgacagcctgaccaccagcaccccccggccctccaacggtgactcgccctcccacccctaccaccgaaccttctccccccacttccaccactttgtggagcagtgccttcagcgcaacccggatgccaggcccagtgccagcaccctcctgaaccactctttcttcaagcagatcaagcgacgtgcctcagaggctttgcccgaattgcttcgtcctgtcacccccatcaccaattttgagggcagccagtctcaggaccacagtggaatctttggcctggtaacaaacctggaagagctggaggtggacgattgggagttctgagcctctgcaaactgtgcgcattctccagccagggatgcagaggccacccagaggcccttcctgagggccggccacattcccgccctcctgggcagattgggtagaaaggacattcttccaggaaagttgactgctgactgattgggaaagaaaatcctggagagacacttcactgctccaaggcttttgagacacaagggaatctcaacaaccagggatcaggagggtccaaagccgacattcccagtcctgtgagctcaggtgacctcctccgcagaagagagatgctgctctggccctgggagctgaattccaagcccagggtttggctccttaaacccgaggaccgccacctcttcccagtgcttgcgaccagcctcattctatttaactttgctctcagatgcctcagatgctataggtcagtgaaagggcaagtagtaagctgcctgcctcccttccctcagacctctccctcataattccagagaagggcatttctgtctttttaagcacagactaaggctggaacagtccatccttatccctcttctggcttgggccctgacacctaagtctttcccacggtttatgtgtgtgcctcattcctttcccaccaagaatccatcttagcgcctcctgccagctgccctggtgctttctccaagggccatcagtgtcttgcctagcttgagggcttaagtccttatgctgtgttagtttcgttgtcagaacaaattaaaattttcagagacgc

SEQ ID NO: 433834 - DNA, 2012 bp, Homo sapiens
ctgcgcatggcacgttgcgtactcccctcccagcaaccggtctggcggcggcgcggcagtaaaactgaggaggcggagccaagacggtcggggctgcttgctaactccaggaacaggtttaagtttttgaaactgaagtaggtctacacagtaggaactcatgtcatttcttgtaagtaaaccagagcgaatcaggcggtgggtctcggaaaagttcattgttgagggcttaagagatttggaactatttggagaccaatgatgcgagctcagagtcaatagcatccttctctaaacaggaggtcatgagtagctttctgccagagggagggtgttacgagctgctcactgtgataggcaaaggatttgaggacctgatgactgtgaatctagcaaggtacaaaccaacaggagagtacgtgactgtacggaggattaacctagaagcttgttccaatgagatggtaacattcttgcagggcgagctgcatgtctccaaactcttcaaccatcccaatatcgtgccatatcgagccacttttattgcagacaatgagctgtgggttgtcacatcattcatggcatacggttctgcaaaagatctcatctgtacacacttcatggatggcatgaatgagctggcgattgcttacatcctgcagggggtgctgaaggccctcgactacatccaccacatgggatatgtacacagaatctccagggttatgatgccaagtctgacatctacagtgtgggaatcacagcctgtgaactggccaacggccatgtcccctttaaggatatgcctgccacccagatgctgctagagaaactgaacggcacagtgccctgcctgttggataccagcaccatccccgctgaggagctgaccatgagcccttcgcgctcagtggccaactctggcctgagtgacagcctgaccaccagcaccccccggccctccaacggtgactcgccctcccacccctaccaccgaaccttctccccccacttccaccactttgtggagcagtgccttcagcgcaacccggatgccaggcccagtgccagcaccctcctgaaccactctttcttcaagcagatcaagcgacgtgcctcagaggctttgcccgaattgcttcgtcctgtcacccccatcaccaattttgagggcagccagtctcaggaccacagtggaatctttggcctggtaacaaacctggaagagctggaggtggacgattgggagttctgagcctctgcaaactgtgcgcattctccagccagggatgcagaggccacccagaggcccttcctgagggccggccacattcccgccctcctgggcagattgggtagaaaggacattcttccaggaaagttgactgctgactgattgggaaagaaaatcctggagagacacttcactgctccaaggcttttgagacacaagggaatctcaacaaccagggatcaggagggtccaaagccgacattcccagtcctgtgagctcaggtgacctcctccgcagaagagagatgctgctctggccctgggagctgaattccaagcccagggtttggctccttaaacccgaggaccgccacctcttcccagtgcttgcgaccagcctcattctatttaactttgctctcagatgcctcagatgctataggtcagtgaaagggcaagtagtaagctgcctgcctcccttccctcagacctctccctcataattccagagaagggcatttctgtctttttaagcacagactaaggctggaacagtccatccttatccctcttctggcttgggccctgacacctaagtctttcccacggtttatgtgtgtgcctcattcctttcccaccaagaatccatcttagcgcctcctgccagctgccctggtgctttctccaagggccatcagtgtcttgcctagcttgagggcttaagtccttatgctgtgttagtttcgttgtcagaacaaattaaaattttcagagacgc

SEQ ID NO: 433835 - DNA, 226 bp, Homo sapiens
tgtgtcttctgcaaagtgttttccccaaatctacacataattcttatgctccaagaataacaagaacaagaaaatgctgtctctaacagtgtcctctgtcagctccatatgtctaaatctgacacgttggcatgagccccactccatacccctgctcaagtcactgagattatgcctagtaaagtgaaaatctgttcccgtatttgccatctatagtaaataggct

SEQ ID NO: 433836 - DNA, 717 bp, Homo sapiens
tctgtagcccaagcttgagtgcagtcgtgtgatcctggctcactgcaacctccgccccctgggctcaagggattctcatgcttcagcctcctgaatagctggaattataggtgcccgccacaacgcctggctaagtttttgtattttactagagacggggtttcaccatgttgcccaaggtggtcttgaactcctgagctcaggcgatgtgcccgccttggcctcccaaagtgctgggattacaggcatcagccactgcacccggcctgaaaacacattttcttaatgggactaaacttttctagctgaattgatctattttaaaacttgccaatgaaagctccttagtagtatctgctaattaaatgcagtttttatacctaacggaccttttaaagaatgtgtgcactttgcaaaccccattgcttcttgccgtatctgagcacttgccacctggtggtaaggagaccattccatctccttcactagatggtagcacctggaagtcagggatcattgctgacttatcttgcctcccaacattgatcatgcagtaggtgtggatgagaaagagggagataagggaagaaagggggctgtgaataaacgctgttgctttctgcttcctttttagggagttaaaagtctcttcagctacctgtttagggagtatgaaagcaaatctagggaaatggccctctgccagttttcccgaat

SEQ ID NO: 433837 - DNA, 1233 bp, Homo sapiens
gagtttgcctaagaaagtacagcacctaatgtttgaggtaattaataattctgttaattggcgaagagaaggatagtctcagttttgatgtataacatcctatccacaaatacttgtaagtagtttaaacctttgtctcagaaattaagtgggtttaaacaaatcttagcctggccaggcgctgtggctcatgcctgtaatcccagcactttgggaggctgaggcaggtgaatcacctgaggttaggagtttgagaccagcctggccaacgtggtgaaaccctgtctctactaaaaatacaaaaaattacccgggcgtggtgccgggcacctgtaatcccagctactcaggaggctgaggcaggagaacagcttaaactgggaaggtggaggttgcagtgagccaagattgcgtcattgcactccagcctgggcaacaagagtgaaactccatctcaaaaaaaaaaaaaaaaagaaaaaagaaaaaaaaaaccttagcctttgaatagttggacaaatatttattttatctccatctccaggccctttttttattttttattttttggttgggcctaaaacccgtttatatttctccctagtgttgtaggttcattttgttggcctgtgatgggctcttcaaggtctttaccccagaagaagccgtgaacttcatcttgtcctgtctcgaggtgagaaatctcacacgggggtggtggttgtcccaattgtgtcttagttttcagagaagtagaagttctgagaccccatttcctcccattgtgggacagcccttgtgccctttttcagtgtgaactctgcctactgactcactggtcagtttgtcctgccagccctgatggagaccagagcagctcttcttcctggcagtcatgtctcaggaaagtgacagggtgcggggtcactccattcactcattccctttctcatctggtaggagatgaaaagatccagacccgggaagggaagtccgcagccgacgcccgctacgaagcagcctgcaacaggctggccaacaaggcggtgcagcggggctcggccgacaacgtcactgtgatggtggtgcggatagggcactgaggggtggcgcgcggccaggagcacgcatggtattgacttaaaaggttcattttgtgtgtgtgcacattgtgtgttttgtgtactcctgtgggactcccatggttgtaaataaaggtttctcttttttttccta

SEQ ID NO: 433838 - DNA, 1467 bp, Homo sapiens
ggtggcgtccgggactctccctgcaggtgactgacggcgccggccgcccctgcccgtcgcccgcccgctgctgccgcccgcccggggtgtggagcccggccgctgctcgcgggctgagtgtctgtcgctgctgccgcctccacccagcctccgccatggacctcttcggggacctgccggagcccgagcgctcgccgcgcccggctgccgggaaagaagctcagaaaggacccctgctctttgatgacctccctccggccagcagtactgactcaggatcagggggacctttgctttttgatgatctcccacccgctagcagtggcgattcaggttctcttgccacatcaatatcccagatggtaaagactgaagggaaaggagcaaagagaaaaacctccgaggaagagaagaatggcagtgaagagcttgtggaaaagaaagtttgtaaagcctcttcggtgatctttggtctgaagggctatgtggctgagcggaagggtgagagggaggagatgcaggatgcccacgtcatcctgaacgacatcaccgaggagtgtaggcccccatcgtccctcattactcgggtttcatattttgctgtttttgatggacatggaggaattcgagcctcaaaatttgctgcacagaatttgcatcaaaacttaatcagaaaatttcctaaaggagatgtaatcagtgtagagaaaaccgtgaagagatgccttttggacactttcaagcatactgatgaagagttccttaaacaagcttccagccagaagcctgcctggaaagatgggtccactgccacgtgtgttctggctgtagacaacattctttatattgccaacctcggagatagtcgggcaatcttgtgtcgttataatgaggagagtcaaaaacatgcagccttaagcctcagcaaagagcataatccaactcagtatgaagagcggatgaggatacagaaggctggaggaaacgtcagggatgggcgtgttttgggcgtgctagaggtgtcacgctccattggggacgggcagtacaagcgctgcggtgtcacctctgtgcccgacatcagacgctgccagctgacccccaatgacaggttcattttgttggcctgtgatgggctcttcaaggtctttaccccagaagaagccgtgaacttcatcttgtcctgtctcgaggatgaaaagatccagacccgggaagggaagtccgcagccgacgcccgctacgaagcagcctgcaacaggctggccaacaaggcggtgcagcggggctcggccgacaacgtcactgtgatggtggtgcggatagggcactgaggggtggcgcgcggccaggagcacgcatggtattgacttaaaaggttcattttgtgtgtgtgcacattgtgtgttttgtgtactcctgtgggactcccatggttgtaaataaaggtttctcttttttttccta

SEQ ID NO: 433839 - DNA, 1545 bp, Homo sapiens
  misc_feature (1510)..(1511): n is a, c, g, or t
  misc_feature (1514)..(1514): n is a, c, g, or t
  misc_feature (1525)..(1525): n is a, c, g, or t
  misc_feature (1534)..(1534): n is a, c, g, or t
  misc_feature (1537)..(1537): n is a, c, g, or t
ggtggcgtccgggactctccctgcaggtgactgacggcgccggccgcccctgcccgtcgcccgcccgctgctgccgcccgcccggggtgtggagcccggccgctgctcgcgggctgagtgtctgtcgctgctgccgcctccacccagcctccgccatggacctcttcggggacctgccggagcccgagcgctcgccgcgcccggctgccgggaaagaagctcagaaaggacccctgctctttgatgacctccctccggccagcagtactgactcaggatcagggggacctttgctttttgatgatctcccacccgctagcagtggcgattcaggttctcttgccacatcaatatcccagatggtaaagactgaagggaaaggagcaaagagaaaaacctccgaggaagagaagaatggcagtgaagagcttgtggaaaagaaagtttgtaaagcctcttcggtgatctttggtctgaagggctatgtggctgagcggaagggtgagagggaggagatgcaggatgcccacgtcatcctgaacgacatcaccgaggagtgtaggcccccatcgtccctcattactcgggtttcatattttgctgtttttgatggacatggaggaattcgagcctcaaaatttgctgcacagaatttgcatcaaaacttaatcagaaaatttcctaaaggagatgtaatcagtgtagagaaaaccgtgaagagatgccttttggacactttcaagcatactgatgaagagttccttaaacaagcttccagccagaagcctgcctggaaagatgggtccactgccacgtgtgttctggctgtagacaacattctttatattgccaacctcggagatagtcgggcaatcttgtgtcgttataatgaggagagtcaaaaacatgcagccttaagcctcagcaaagagcataatccaactcagtatgaagagcggatgaggatacagaaggctggaggaaacgtcagggatgggcgtgttttgggcgtgctagaggtgtcacgctccattggggacgggcagtacaagcgctgcggtgtcacctctgtgcccgacatcagacgctgccagctgacccccaatgacaggttcattttgttggcctgtgatgggctcttcaaggtctttaccccagaagaagccgtgaacttcatcttgtcctgtctcgaggatgaaaagatccagacccgggaagggaagtccgcagccgacgcccgctacgaagcagcctgcaacaggctggccaacaaggcggtgcagcggggctcggccgacaacgtcactgtgatggtggtgcggatagggcactgaggggtggcgcgcggccaggagcacgcatggtattgacttaaaaggttcattttgtgtgtgtgcacattgtgtgttttgtgtactcctgtgggactcccatggttgtaaataaaggtttctcttttttttcctaaaaaaaaaaaaaaaaagaaaaaaaaaaaaaaaaaaaaaaaaannaanacaaaaaaaanaagaagaanaanagaaaaaa

SEQ ID NO: 433840 - DNA, 328 bp, Homo sapiens
ggtggcgtccgggactctccctgcaggtgactgacggcgccggccgcccctgcccgtcgcccgcccgctgctgccgcccgcccggggtgtggagcccggccgtacgaagcagcctgcaacaggctggccaacaaggcggtgcagcggggctcggccgacaacgtcactgtgatggtggtgcggatagggcactgaggggtggcgcgcggccaggagcacgcatggtattgacttaaaaggttcattttgtgtgtgtgcacattgtgtgttttgtgtactcctgtgggactcccatggttgtaaataaaggtttctcttttttttccta

SEQ ID NO: 433841 - DNA, 815 bp, Homo sapiens
agagcttgcagctgcctaaggtgacagtgctgcagcctagaccagaattgttctttggggcagtaggcttccccaaatggtttttccttggcaataggactgtcccttagatgtctcttcccatttgtagatcactgccctatctcctccatatcccctcacctaaaatagaatgggtgaaactatgatgctatgcaggatactgtcatttacattaacattaaaccgtacctgtacttgatgcaaaggacatgtgctccacaatccaggaatagccactttcagggattttccaaatctaattagattgaaatgcaaaatatccctctgttctagctattgttaaccctggctgcatgtgggaaacactcaaggagctttaagatacaaaacactgccaggctcccttacccagtcagtcaaatccgattctggagttgggacctaggtgtgtgatgagaactgctgagtcctgtcgaaggttaagctgggcagcactgcttggcagccactggaggtgctgttcccacccatgtgcagctgggcagggtccctaccccagggcagcagttaatggccaaagaaacaggcccttgaaggtaatgtggagtgggtagcctccgtattgattaagaaggggacggacttaccctccactgtgagagttacccgaagctcagcatccgtgatggtctagggggcttctgaggcgatcgggcagcgtgagtcttcagccactaagccaagaagatctgggaaggagtcagtgagacagccttgggccagagttccaggggctctgggagtggctgcca

SEQ ID NO: 433842 - DNA, 1490 bp, Homo sapiens
ggtggcgtccgggactctccctgcaggtgactgacggcgccggccgcccctgcccgtcgcccgcccgctgctgccgcccgcccggggtgtggagcccggccgctgctcgcgggctgagtgtctgtcgctgctgccgcctccacccagcctccgccatggacctcttcggggacctgccggagcccgagcgctcgccgcgcccggctgccgggaaagaagctcagaaaggacccctgctctttgatgacctccctccggccagcagtactgactcaggtacagtcttcaggctctcccaggatcagggggacctttgctttttgatgatctcccacccgctagcagtggcgattcaggttctcttgccacatcaatatcccagatggtaaagactgaagggaaaggagcaaagagaaaaacctccgaggaagagaagaatggcagtgaagagcttgtggaaaagaaagtttgtaaagcctcttcggtgatctttggtctgaagggctatgtggctgagcggaagggtgagagggaggagatgcaggatgcccacgtcatcctgaacgacatcaccgaggagtgtaggcccccatcgtccctcattactcgggtttcatattttgctgtttttgatggacatggaggaattcgagcctcaaaatttgctgcacagaatttgcatcaaaacttaatcagaaaatttcctaaaggagatgtaatcagtgtagagaaaaccgtgaagagatgccttttggacactttcaagcatactgatgaagagttccttaaacaagcttccagccagaagcctgcctggaaagatgggtccactgccacgtgtgttctggctgtagacaacattctttatattgccaacctcggagatagtcgggcaatcttgtgtcgttataatgaggagagtcaaaaacatgcagccttaagcctcagcaaagagcataatccaactcagtatgaagagcggatgaggatacagaaggctggaggaaacgtcagggatgggcgtgttttgggcgtgctagaggtgtcacgctccattggggacgggcagtacaagcgctgcggtgtcacctctgtgcccgacatcagacgctgccagctgacccccaatgacaggttcattttgttggcctgtgatgggctcttcaaggtctttaccccagaagaagccgtgaacttcatcttgtcctgtctcgaggatgaaaagatccagacccgggaagggaagtccgcagccgacgcccgctacgaagcagcctgcaacaggctggccaacaaggcggtgcagcggggctcggccgacaacgtcactgtgatggtggtgcggatagggcactgaggggtggcgcgcggccaggagcacgcatggtattgacttaaaaggttcattttgtgtgtgtgcacattgtgtgttttgtgtactcctgtgggactcccatggttgtaaataaaggtttctcttttttttccta

SEQ ID NO: 433843 - DNA, 1720 bp, Homo sapiens
cagaggtatgtgaaaaaacccacttgtagctttgctgggaagatgtcatcttcaacttagcttgtcacttcccagaagacagctcttcacagtgttcattttattatttgtctggcattaggtatcagaaaataagcttaaatgagtctaaccattaaatgtaaatagatctctgcctgcattggaatcttttatccttttcttcctcagttgaagtaaaagcagctgatcttactgtttgttcaaattcttcaccagccttgagcatggaaatacatattttcagggcatcttaagggcttttgagataaactctcctgacttgcatttgtccttattcaattatcacaagactaatttgcacatgatccttttgcctgatttgaatctcacttctctgggatggcagcacatcccttgccctgatgctttgacttacaccctagacagagttgttttgtgctcactgactcctcttttgtgtccctgtgcaacctcttagagctcaccctgtccaacagtgctccgatttgagttatagacttgcagctgggggagatgccttaaggggtattgcttatttgtttgcgccattaggatattgctgagtcagacagtcatagttccctctcatttgctctgggactagggtttccagagggttgggcacagttttgtattggctcttttgttctcttttccttagcctcttcggtgatctttggtctgaagggctatgtggctgagcggaagggtgagagggaggagatgcaggatgcccacgtcatcctgaacgacatcaccgaggagtgtaggcccccatcgtccctcattactcgggtttcatattttgctgtttttgatggacatggaggaattcgagcctcaaaatttgctgcacagaatttgcatcaaaacttaatcagaaaatttcctaaaggagatgtaatcagtgtagagaaaaccgtgaagagatgccttttggacactttcaagcatactgatgaagagttccttaaacaagcttccagccagaagcctgcctggaaagatgggtccactgccacgtgtgttctggctgtagacaacattctttatattgccaacctcggagatagtcgggcaatcttgtgtcgttataatgaggagagtcaaaaacatgcagccttaagcctcagcaaagagcataatccaactcagtatgaagagcggatgaggatacagaaggctggaggaaacgtcagggatgggcgtgttttgggcgtgctagaggtgtcacgctccattggggacgggcagtacaagcgctgcggtgtcacctctgtgcccgacatcagacgctgccagctgacccccaatgacaggttcattttgttggcctgtgatgggctcttcaaggtctttaccccagaagaagccgtgaacttcatcttgtcctgtctcgaggatgaaaagatccagacccgggaagggaagtccgcagccgacgcccgctacgaagcagcctgcaacaggctggccaacaaggcggtgcagcggggctcggccgacaacgtcactgtgatggtggtgcggatagggcactgaggggtggcgcgcggccaggagcacgcatggtattgacttaaaaggttcattttgtgtgtgtgcacattgtgtgttttgtgtactcctgtgggactcccatggttgtaaataaaggtttctcttttttttccta

SEQ ID NO: 433844 - DNA, 1591 bp, Homo sapiens
  misc_feature (1469)..(1469): n is a, c, g, or t
  misc_feature (1556)..(1557): n is a, c, g, or t
  misc_feature (1560)..(1560): n is a, c, g, or t
  misc_feature (1571)..(1571): n is a, c, g, or t
  misc_feature (1580)..(1580): n is a, c, g, or t
  misc_feature (1583)..(1583): n is a, c, g, or t
ggtggcgtccgggactctccctgcaggtgactgacggcgccggccgcccctgcccgtcgcccgcccgctgctgccgcccgcccggggtgtggagcccggccgctgctcgcgggctgagtgtctgtcgctgctgccgcctccacccagcctccgccatggacctcttcggggacctgccggagcccgagcgctcgccgcgcccggctgccgggaaagaagctcagaaaggacccctgctctttgatgacctccctccggccagcagtactgactcaggatcagggggacctttgctttttgatgatctcccacccgctagcagtggcgattcaggttctcttgccacatcaatatcccagatggtaaagactgaagggaaaggagcaaagagaaaaacctccgaggaagagaagaatggcagtgaagagcttgtggaaaagaaagtttgtaaagcctcttcggtgatctttggtctgaagggctatgtggctgagcggaagggtgagagggaggagatgcaggatgcccacgtcatcctgaacgacatcaccgaggagtgtaggcccccatcgtccctcattactcgggtttcatattttgctgtttttgatggacatggaggaattcgagcctcaaaatttgctgcacagaatttgcatcaaaacttaatcagaaaatttcctaaaggagatgtaatcagtgtagagaaaaccgtgaagagatgccttttggacactttcaagcatactgatgaagagttccttaaacaagcttccagccagaagcctgcctggaaagatgggtccactgccacgtgtgttctggctgtagacaacattctttatattgccaacctcggagatagtcgggcaatcttgtgtcgttataatgaggagagtcaaaaacatgcagccttaagcctcagcaaagagcataatccaactcagtatgaagagcggatgaggatacagaaggctggaggaaacgtcagggatgggcgtgttttgggcgtgctagaggtgtcacgctccattggggacgggcagtacaagcgctgcggtgtcacctctgtgcccgacatcagacgctgccagctgacccccaatgacaggttcattttgttggcctgtgatgggctcttcaaggtctttaccccagaagaagccgtgaacttcatcttgtcctgtctcgaggatgaaaagatccagacccgggaagggaagtccgcagccgacgcccgctacgaagcagcctgcaacaggctggccaacaaggcggtgcagcggggctcggccgacaacgtcactgtgatggtggtgcggatagggcactgaggggtggcgcgcggccaggagcacgcatggtattgacttaaaaggttcattttgtgtgtgtgcacattgtgtgttttgtgtactcctgtgggactcccatggttgtaaataaaggtttctcttttttttcctaanaaaaaaagaaaaacaaacaacaacaaaaacaaacaaagaaaaacaaaaaaaaaaaaaaaagaaaaaaaaaaaaaaaaaaaaaaaaannaanacaaaaaaaanaagaagaanaanagaaaaaa

SEQ ID NO: 433845 - DNA, 1531 bp, Homo sapiens
ggtggcgtccgggactctccctgcaggtgactgacggcgccggccgcccctgcccgtcgcccgcccgctgctgccgcccgcccggggtgtggagcccggccgctgctcgcgggctgagtgtctgtcgctgctgccgcctccacccagcctccgccatggacctcttcggggacctgccggagcccgagcgctcgccgcgcccggctgccgggaaagaagctcagaaaggacccctgctctttgatgacctccctccggccagcagtactgactcaggatcagggggacctttgctttttgatgatctcccacccgctagcagtggcgattcaggttctcttgccacatcaatatcccagatggtaaagactgaagggaaaggagcaaagagaaaaacctccgaggaagagaagaatggcagtgaagagcttgtggaaaagaaagtttgtaaagcctcttcggtgatctttggtctgaagggctatgtggctgagcggaagggtgagagggaggagatgcaggatgcccacgtcatcctgaacgacatcaccgaggagtgtaggcccccatcgtccctcattactcgggtttcatattttgctgtttttgatggacatggaggaattcgagcctcaaaatttgctgcacagaatttgcatcaaaacttaatcagaaaatttcctaaaggagatgtaatcagtgtagagaaaaccgtgaagagatgccttttggacactttcaagcatactgatgaagagttccttaaacaagcttccagccagaagcctgcctggaaagatgggtccactgccacgtgtgttctggctgtagacaacattctttatattgccaacctcggagatagtcgggcaatcttgtgtcgttataatgaggagagtcaaaaacatgcagccttaagcctcagcaaagagcataatccaactcagtatgaagagcggatgaggatacagaaggctggaggaaacgtcagggatgggcgtgttttgggcgtgctagaggtgtcacgctccattggggacgggcagtacaagcgctgcggtgtcacctctgtgcccgacatcagacgctgccagctgacccccaatgacaggttcattttgttggcctgtgatgggctcttcaaggtctttaccccagaagaagccgtgaacttcatcttgtcctgtctcgaggatgaaaagatccagacccgggaagggaagtccgcagccgacgcccgctacgaagcagcctgcaacaggctggccaacaaggcggtgcagcggggctcggccgacaacgtcactgtgatggtggtgcggatagggcactgaggggtggcgcgcggccaggagcacgcatggtattgacttaaaaggttcattttgtgtgtgtgcacattgtgtgttttgtgtactcctgtgggactcccatggttgtaaataaaggtttctcttttttttcctaagaaacctttatttacaaccattggagtcccggggaatctctaaaattgaactggagggcttca

SEQ ID NO: 433846 - DNA, 1735 bp, Homo sapiens
ggtggcgtccgggactctccctgcaggtgactgacggcgccggccgcccctgcccgtcgcccgcccgctgctgccgcccgcccggggtgtggagcccggccgctgctcgcgggctgagtgtctgtcgctgctgccgcctccacccagcctccgccatggacctcttcggggacctgccggagcccgagcgctcgccgcgcccggctgccgggaaagaagctcagaaaggacccctgctctttgatgacctccctccggccagcagtactgactcaggatcagggggacctttgctttttgatgatctcccacccgctagcagtggcgattcaggttctcttgccacatcaatatcccagatggtaaagactgaagggaaaggagcaaagagaaaaacctccgaggaagagaagaatggcagtgaagagcttgtggaaaagaaagtttgtaaagcctcttcggtgatctttggtctgaagggctatgtggctgagcggaagggtgagagggaggagatgcaggatgcccacgtcatcctgaacgacatcaccgaggagtgtaggcccccatcgtccctcattactcgggtttcatattttgctgtttttgatggacatggaggaattcgagcctcaaaatttgctgcacagaatttgcatcaaaacttaatcagaaaatttcctaaaggagatgtaatcagtgtagagaaaaccgtgaagagatgccttttggacactttcaagcatactgatgaagagttccttaaacaagcttccagccagaagcctgcctggaaagatgggtccactgccacgtgtgttctggctgtagacaacattctttatattgccaacctcggagatagtcgggcaatcttgtgtcgttataatgaggagagtcaaaaacatgcagccttaagcctcagcaaagagcataatccaactcagtatgaagagcggatgaggatacagaaggctggaggaaacgtcagggatgggcgtgttttgggcgtgctagaggtgtcacgctccattggggacgggcagtacaagcgctgcggtgtcacctctgtgcccgacatcagacgctgccagctgacccccaatgacaggttcattttgttggcctgtgatgggctcttcaaggtctttaccccagaagaagccgtgaacttcatcttgtcctgtctcgaggtgagaaatctcacacgggggtggtggttgtcccaattgtgtcttagttttcagagaagtagaagttctgagaccccatttcctcccattgtgggacagcccttgtgccctttttcagtgtgaactctgcctactgactcactggtcagtttgtcctgccagccctgatggagaccagagcagctcttcttcctggcagtcatgtctcaggaaagtgacagggtgcggggtcactccattcactcattccctttctcatctggtaggagatgaaaagatccagacccgggaagggaagtccgcagccgacgcccgctacgaagcagcctgcaacaggctggccaacaaggcggtgcagcggggctcggccgacaacgtcactgtgatggtggtgcggatagggcactgaggggtggcgcgcggccaggagcacgcatggtattgacttaaaaggttcattttgtgtgtgtgcacattgtgtgttttgtgtactcctgtgggactcccatggttgtaaataaaggtttctcttttttttccta

SEQ ID NO: 433847 - DNA, 1347 bp, Homo sapiens
ggtggcgtccgggactctccctgcaggtgactgacggcgccggccgcccctgcccgtcgcccgcccgctgctgccgcccgcccggggtgtggagcccggccgctgctcgcgggctgagtgtctgtcgctgctgccgcctccacccagcctccgccatggacctcttcggggacctgccggagcccgagcgctcgccgcgcccggctgccgggaaagaagctcagaaaggacccctgctctttgatgacctccctccggccagcagtactgactcaggatcagggggacctttgctttttgatgatctcccacccgctagcagtggcgattcaggttctcttgccacatcaatatcccagatggtaaagactgaagggaaaggagcaaagagaaaaacctccgaggaagagaagaatggcagtgaagagcttgtggaaaagaaagtttgtaaagcctcttcggtgatctttggtctgaagggctatgtggctgagcggaagggtgagagggaggagatgcaggatgcccacgtcatcctgaacgacatcaccgaggagtgtaggcccccatcgtccctcattactcgggtttcatattttgctgtttttgatggacatggaggaattcgagcctcaaaatttgctgcacagaatttgcatcaaaacttaatcagaaaatttcctaaaggagatgtaatcagtgtagagaaaaccgtgaagagatgccttttggacactttcaagcatactgatgaagagttccttaaacaagcttccagccagaagcctgcctggaaagatgggtccactgccacgtgtgttctggctgtagacaacattctttatattgccaacctcggagatagtcgggcaatcttgtgtcgttataatgaggagagtcaaaaacatgcagccttaagcctcagcaaagagcataatccaactcagtatgaagagcggatgaggatacagaaggctggaggaaacgtcaggttcattttgttggcctgtgatgggctcttcaaggtctttaccccagaagaagccgtgaacttcatcttgtcctgtctcgaggatgaaaagatccagacccgggaagggaagtccgcagccgacgcccgctacgaagcagcctgcaacaggctggccaacaaggcggtgcagcggggctcggccgacaacgtcactgtgatggtggtgcggatagggcactgaggggtggcgcgcggccaggagcacgcatggtattgacttaaaaggttcattttgtgtgtgtgcacattgtgtgttttgtgtactcctgtgggactcccatggttgtaaataaaggtttctcttttttttccta

SEQ ID NO: 433848 - DNA, 1425 bp, Homo sapiens
ggtggcgtccgggactctccctgcaggtgactgacggcgccggccgcccctgcccgtcgcccgcccgctgctgccgcccgcccggggtgtggagcccggccgctgctcgcgggctgagtgtctgtcgctgctgccgcctccacccagcctccgccatggacctcttcggggacctgccggagcccgagcgctcgccgcgcccggctgccgggaaagaagctcagaaaggacccctgctctttgatgacctccctccggccagcagtactgactcaggatcagggggacctttgctttttgatgatctcccacccgctagcagtggcgattcaggttctcttgccacatcaatatcccagatggtaaagactgaagggaaaggagcaaagagaaaaacctccgaggaagagaagaatggcagtgaagagcttgtggaaaagaaagtttgtaaagcctcttcggtgatctttggtctgaagggctatgtggctgagcggaagggtgagagggaggagatgcaggatgcccacgtcatcctgaacgacatcaccgaggagtgtaggcccccatcgtccctcattactcgggtttcatattttgctgtttttgatggacatggaggaattcgagcctcaaaatttgctgcacagaatttgcatcaaaacttaatcagaaaatttcctaaaggagatgtaatcagtgtagagaaaaccgtgaagagatgccttttggacactttcaagcatactgatgaagagttccttaaacaagcttccagccagaagcctgcctggaaagatgggtccactgccacgtgtgttctggctgtagacaacattctttatattgccaacctcggagatagtcgggcaatcttgtgtcgttataatgaggagagtcaaaaacatgcagccttaagcctcagcaaagagcataatccaactcagtatgaagagcggatgaggatacagaaggctggaggaaacgtcaggtaaccaagggactgagaggagctcatgggaaggagggctgttagctgtagaagggtcccgagaccttcaaggagtagaacttcccctgttacgtagtcttcagtgtgacgaggctctgtctgagatctaacactggtgacataggtggatgacagttgtagatttcacatgtgtccacgtggaaggaaacttgcctccctacatttgcaaaaggacaaattcatatttaccattcacagtgttttctctgtgcctaggaagtttcttaaatactgtcacttttcgtggtggcgggcgcctgtagtcccagctactcgggaggctgaggcaggagaatggcgtgaacctgggaggcggagcttgcagtgagccaagatcgcaccactgcactccagcctgggcaacagagcgagactccatctcaaaaaaaaaa

SEQ ID NO: 433849 - DNA, 1226 bp, Homo sapiens
agagcttgcagctgcctaaggtgacagtgctgcagcctagaccagaattgttctttggggcagtaggcttccccaaatggtttttccttggcaataggactgtcccttagatgtctcttcccatttgtagatcactgccctatctcctccatatcccctcacctaaaatagaatgggtgaaactatgatgctatgcaggatactgtcatttacattaacattaaaccgtacctgtacttgatgcaaaggacatgtgctccacaatccaggaatagccactttcagggattttccaaatctaattagattgaaatgcaaaatatccctctgttctagctattgttaaccctggctgcatgtgggaaacactcaaggagctttaagatacaaaacactgccaggctcccttacccagtcagtcaaatccgattctggagttgggacctaggtgtgtgatgagaactgctgagtcctgtcgaaggttaagctgggcagcactgcttggcagccactggaggtgctgttcccacccatgtgcagctgggcagggtccctaccccagggcagcagttaatggcctagacacccctggcatatttgagatcaagaaatgtcagtagtggttaataatgtgaattccacagtctgtatctttcacacttccattctctgcttttaaggtgagattctaagtactgtggacccataatctgtcaggtagagtctgaaatgtttttcctctcattttagggatgggcgtgttttgggcgtgctagaggtgtcacgctccattggggacgggcagtacaagcgctgcggtgtcacctctgtgcccgacatcagacgctgccagctgacccccaatgacaggttcattttgttggcctgtgatgggctcttcaaggtctttaccccagaagaagccgtgaacttcatcttgtcctgtctcgaggatgaaaagatccagacccgggaagggaagtccgcagccgacgcccgctacgaagcagcctgcaacaggctggccaacaaggcggtgcagcggggctcggccgacaacgtcactgtgatggtggtgcggatagggcactgaggggtggcgcgcggccaggagcacgcatggtattgacttaaaaggttcattttgtgtgtgtgcacattgtgtgttttgtgtactcctgtgggactcccatggttgtaaataaaggtttctcttttttttccta

SEQ ID NO: 433850 - DNA, 1353 bp, Homo sapiens
ggtggcgtccgggactctccctgcaggtgactgacggcgccggccgcccctgcccgtcgcccgcccgctgctgccgcccgcccggggtgtggagcccggccgctgctcgcgggctgagtgtctgtcgctgctgccgcctccacccagcctccgccatggacctcttcggggacctgccggagcccgagcgctcgccgcgcccggctgccgggaaagaagctcagaaaggacccctgctctttgatgacctccctccggccagcagtactgactcaggatcagggggacctttgctttttgatgatctcccacccgctagcagtggcgattcaggttctcttgccacatcaatatcccagatggtaaagactgaagggaaaggagcaaagagaaaaacctccgaggaagagaagaatggcagtgaagagcttgtggaaaagaaagtttgtaaagcctcttcggtgatctttggtctgaagggctatgtggctgagcggaagggtgagagggaggagatgcaggatgcccacgtcatcctgaacgacatcaccgaggagtgtaggcccccatcgtccctcattactcgggtttcatattttgctgtttttgatggacatggaggaattcgagcctcaaaatttgctgcacagaatttgcatcaaaacttaatcagaaaatttcctaaaggagatgtaatcagtgtagagaaaaccgtgaagagatgccttttggacactttcaagcatactgatgaagagttccttaaacaagcttccagccagaagcctgcctggaaagatgggtccactgccacgtgtgttctggctgtagacaacattctttatattgccaacctcggagatagtcgggtatgtggctctggagccacccacttagatgacaatacgttttatggggaaaagactttagcacgtacttgttgaataagattaaagtgatggtgtctggttgaaacctttcttctggggttgctgcagagtgttctgctgcagtttaacttctgggtaagggaacagcaactcagctagaggctgtttgttctctggggaacttacgccctatgatagacttgtgctttaaaacccagatcccgtcttttttgtttcttttttcctcccgtggtttgtgtgtgtgatgctgtggatcagaatgtaatcagtatgcaagtagcctaaatcttcttttatttcctttctctgaccttagacagtaatgaatgaaaagctttaacccctgcctatcaaagttactgtgatttcagagtaacttgagagctgtagctagaaaataccagatgaggtgccattcatcacccgagcccggtccctggct

SEQ ID NO: 433851 - DNA, 965 bp, Homo sapiens
gagtttgcctaagaaagtacagcacctaatgtttgaggtaattaataattctgttaattggcgaagagaaggatagtctcagttttgatgtataacatcctatccacaaatacttgtaagtagtttaaacctttgtctcagaaattaagtgggtttaaacaaatcttagcctggccaggcgctgtggctcatgcctgtaatcccagcactttgggaggctgaggcaggtgaatcacctgaggttaggagtttgagaccagcctggccaacgtggtgaaaccctgtctctactaaaaatacaaaaaattacccgggcgtggtgccgggcacctgtaatcccagctactcaggaggctgaggcaggagaacagcttaaactgggaaggtggaggttgcagtgagccaagattgcgtcattgcactccagcctgggcaacaagagtgaaactccatctcaaaaaaaaaaaaaaaaagaaaaaagaaaaaaaaaaccttagcctttgaatagttggacaaatatttattttatctccatctccaggccctttttttattttttattttttggttgggcctaaaacccgtttatatttctccctagtgttgtaggttcattttgttggcctgtgatgggctcttcaaggtctttaccccagaagaagccgtgaacttcatcttgtcctgtctcgaggatgaaaagatccagacccgggaagggaagtccgcagccgacgcccgctacgaagcagcctgcaacaggctggccaacaaggcggtgcagcggggctcggccgacaacgtcactgtgatggtggtgcggatagggcactgaggggtggcgcgcggccaggagcacgcatggtattgacttaaaaggttcattttgtgtgtgtgcacattgtgtgttttgtgtactcctgtgggactcccatggttgtaaataaaggtttctcttttttttccta

SEQ ID NO: 433852 - DNA, 1350 bp, Homo sapiens
  misc_feature (1228)..(1228): n is a, c, g, or t
  misc_feature (1315)..(1316): n is a, c, g, or t
  misc_feature (1319)..(1319): n is a, c, g, or t
  misc_feature (1330)..(1330): n is a, c, g, or t
  misc_feature (1339)..(1339): n is a, c, g, or t
  misc_feature (1342)..(1342): n is a, c, g, or t
agagcttgcagctgcctaaggtgacagtgctgcagcctagaccagaattgttctttggggcagtaggcttccccaaatggtttttccttggcaataggactgtcccttagatgtctcttcccatttgtagatcactgccctatctcctccatatcccctcacctaaaatagaatgggtgaaactatgatgctatgcaggatactgtcatttacattaacattaaaccgtacctgtacttgatgcaaaggacatgtgctccacaatccaggaatagccactttcagggattttccaaatctaattagattgaaatgcaaaatatccctctgttctagctattgttaaccctggctgcatgtgggaaacactcaaggagctttaagatacaaaacactgccaggctcccttacccagtcagtcaaatccgattctggagttgggacctaggtgtgtgatgagaactgctgagtcctgtcgaaggttaagctgggcagcactgcttggcagccactggaggtgctgttcccacccatgtgcagctgggcagggtccctaccccagggcagcagttaatggcctagacacccctggcatatttgagatcaagaaatgtcagtagtggttaataatgtgaattccacagtctgtatctttcacacttccattctctgcttttaaggtgagattctaagtactgtggacccataatctgtcaggtagagtctgaaatgtttttcctctcattttagggatgggcgtgttttgggcgtgctagaggtgtcacgctccattggggacgggcagtacaagcgctgcggtgtcacctctgtgcccgacatcagacgctgccagctgacccccaatgacaggttcattttgttggcctgtgatgggctcttcaaggtctttaccccagaagaagccgtgaacttcatcttgtcctgtctcgaggatgaaaagatccagacccgggaagggaagtccgcagccgacgcccgctacgaagcagcctgcaacaggctggccaacaaggcggtgcagcggggctcggccgacaacgtcactgtgatggtggtgcggatagggcactgaggggtggcgcgcggccaggagcacgcatggtattgacttaaaaggttcattttgtgtgtgtgcacattgtgtgttttgtgtactcctgtgggactcccatggttgtaaataaaggtttctcttttttttcctaanaaaaaaagaaaaacaaacaacaacaaaaacaaacaaagaaaaacaaaaaaaaaaaaaaaagaaaaaaaaaaaaaaaaaaaaaaaaannaanacaaaaaaaanaagaagaanaanagaaaaaa

SEQ ID NO: 433853 - DNA, 476 bp, Homo sapiens
tcatcctgggattgtagttgtctcaatctttttccctttcccccattttcaacacacagatgttttaggtgttggactgtctttaagttttgaatccatggcatcaggtaaggcagaaaaatctgctagtcgctagccctgagaagtactgcgaggaaatgtggagcagttttctctggttcatttgagtatttattttactacctgaagtacaatttaactttttaaggcagatttttatttcctttgaaataataggactttaaaataggttcaagatattattcattgcagtatgagttgccactggattgacgcaaagttttgagtttatttcagtaacctacataggtgtcctggtgggatggattctgaaacttaagtcttacatattttttgtgggctcactaagtgttctgctgtgtttcaggatcagggggacctttgctttttgatgatctcccacccgctagcag

SEQ ID NO: 433854 - DNA, 501 bp, Homo sapiens
attcgagcctcaaaatttgctgcacagaatttgcatcaaaacttaatcagaaaatttcctaaaggtgagactgagaactaaatcagttgatactcaaattggttattgctgtttggttggctgtgtgaagcagtcagatgtgttattttggctttagcagagaatcattgatgagtcttaaaagagtggtgctgaggagtggatgccaaggcttccaggagtagcggccatgcaggtgtgacttagaatggcacttctcatgattctaagtgataggcaccttttgtcaatcgtctttgggttcagttagtgtcttgcctttactggaaaactagtaaaccaacttcaaatagcactgtgttatatgtgaggaaagaaacagagattgttctggctgggcacggtggctcacacagcactttgggaggccaaggccagaagatcactcaagcccaggagtttgagaccagcctggcaacatagggagactctatctctata

SEQ ID NO: 433855 - DNA, 1669 bp, Homo sapiens
gctgcttccgagccggacccaagggccggggcgtggaggagtagaggggcgagcgcatgcgcacaggactacacgtcccgacaggcgtcgggagcggcggcccagttccttgtgggagctgtagttctgcaggcgcggaagccgtggtgctcggccggcagagcactcggtttcccagagggctgagcgcgccgcacggaggtgcggcgccgaccaagatggagactgccgagcagccttgagccgttgagcagctgaacagaggccatgccggggcactccgaggcctgagacgaccacgcctgtgccgctgaggaccttcatcagggctccgtccacttggcccgcttggctgtccaatcacactccagtgtcaaccactggcacccagcagccaagagaggtgtggcgtggccctggggacgcatggctgaggcaggaacaggtgagccgtcccccagcgtggagggcgaacacgggacggagtatgacacgctgccttccgacacagtctccctcagtgactcggactctgacctcagcttgcccggtggtgctgaagtggaagcactgtccccgatggggctgcctggggaggaggattcaggtcctgatgagccgccctcacccccgtcaggcctcctcccagccacggtgcagccattccatctgagaggcatgagctccaccttctcccagcgcagccgtgacatctttgactgcctggagggggcggccagacgggctccatcctctgtggcccacaccagcatgagtgacaacggaggcttcaagcggcccctagcgccctcaggccggtctccagtggaaggcctgggcagggcccatcggagccctgcctcaccaagggtgcctccggtccccgactacgtggcacaccccgagcgctggaccaagtacagcctggaagatgtgaccgaggtcagcgagcagagcaatcaggccaccgccctggccttcctgggctcccagagcctggctgcccccactgactgcgtgtcctccttcaaccaggatccctccagctgtggggaggggagggtcatcttcaccaaaccagtccgaggggtcgaagccagacacgagaggaagagggtcctggggaaggtgggagagccaggcaggggcggccttgggaatcctgccacagacaggggcgagggccctgtggagctggcccatctggccgggcccgggagcccagaggctgaggagtggggcagcccccatggaggcctgcaggaggtggaggcactgtcagggtctgtccacagtgggtctgtgccaggtctcccgccggtggaaactgttggcttccatggcagcaggaagcggagtcgagaccacttccggaacaagagcagcagccccgaggacccaggtgctgaggtctgagagggagatggcccagcctgaccccactggccactgccatcctgctgccttcccagtggggctggtcagggggcagcctggccactgcctagctggaatgggaggaagcctgcaggtggcaccggtggccctggctgcagttctgggcagcatcctcccaagcagagaccttgctgaagctcctggggtgtggggtgtgggctggaagcactggctccctggtagggacaataaaggttttgggtctttctga

SEQ ID NO: 433856 - DNA, 2050 bp, Homo sapiens
gctgcttccgagccggacccaagggccggggcgtggaggagtagaggggcgagcgcatgcgcacaggactacacgtcccgacaggcgtcgggagcggcggcccagttccttgtgggagctgtagttctgcaggcgcggaagccgtggtgctcggccggcagagcactcggtttcccagagggctgagcgcgccgcacggaggtgcggcgccgaccaagatggagactgccgagcagccttgagccgttgagcagctgaacagaggccatgccggggcactccgaggcctgagacgaccacgcctgtgccgctgaggaccttcatcagggctccgtccacttggcccgcttggctgtccaatcacactccagtgtcaaccactggcacccagcagccaagagaggtgtggcgtggccctggggacgcatggctgaggcaggaacaggtgagccgtcccccagcgtggagggcgaacacgggacggagtatgacacgctgccttccgacacagtctccctcagtgactcggactctgacctcagcttgcccggtggtgctgaagtggaagcactgtccccgatggggctgcctggggaggaggattcaggtcctgatgagccgccctcacccccgtcaggcctcctcccagccacggtgcagccattccatctgagaggcatgagctccaccttctcccagcgcagccgtgacatctttgactgcctggagggggcggccagacgggctccatcctctgtggcccacaccagcatgagtgacaacggaggcttcaagcggcccctagcgccctcaggccggtctccagtggaaggcctgggcagggcccatcggagccctgcctcaccaagggtgcctccggtccccgactacgtggcacaccccgagcgctggaccaagtacagcctggaagatgtgaccgaggtcagcgagcagagcaatcaggccaccgccctggccttcctgggctcccagagcctggctgcccccactgactgcgtgtcctccttcaaccaggatccctccagctgtggggaggggagggtcatcttcaccaaaccagtccgaggggtcgaagccagacacgagaggaagagggtcctggggaaggtgggagagccaggcaggggcggccttgggaatcctgccacagacaggggcgagggccctgtggagctggcccatctggccgggcccgggagcccagaggctgaggagtggggcagcccccatggaggcctgcaggaggtggaggcactgtcagggtctgtccacagtgggtctgtgccaggtctcccgccggtggaaactgttggcttccatggcagcaggaagcggagtcgagaccacttccggaacaagagcagcagccccgaggacccaggtgctgaggtctgagagggagatggcccagcctgaccccactggccactgccatcctgctgccttcccagtggggctggtcagggggcagcctggccactgcctagctggaatgggaggaagcctgcaggtggcaccggtggccctggctgcagttctgggcagcatcctcccaagcagagaccttgctgaagctcctggggtgtggggtgtgggctggaagcactggctccctggtagggacaataaaggttttgggtctttctgaaaaaaaaaaaaaagaaaaaaaaaaaaattgggggccgcctgggcccgaaaaagttttaaaaccatcgtggggcgccgggcccaggtagggacctgggcccaagggcccaagaaacccggcgcgaccgggcgggttctcccccataaaaaaccgccggcggcacggcgtctgacaacccagaggggtccggggggcacgcgggctacccagggcgcagggaccgaaatacgagcgacgggggaggagcgaaccatcacaacaaacaaggatccagcacatgtgaagagcgcagcaaaacaacaccagaccgaacaaacaccaacaccaagagaaccaacagagacacaaagacaagaacgatcaaagaaactgacacacagc

SEQ ID NO: 433857 - DNA, 2356 bp, Homo sapiens
gctgcttccgagccggacccaagggccggggcgtggaggagtagaggggcgagcgcatgcgcacaggactacacgtcccgacaggcgtcgggagcggcggcccagttccttgtgggagctgtagttctgcaggcgcggaagccgtggtgctcggccggcagagcactcggtttcccagagggctgagcgcgccgcacggaggtgcggcgccgaccaagatggagactgccgagcagccttgagccggtaggtttgtggtgagggaggacgggccgcgcgggccggccgagcctccgggaggtcaccgagcgcagctttaatacctgagctcgaaggccccgctgtgctcgccgacccccgtacctcgcggccgggcccttgggacccacagcatccttgtgaggcccggaggcctgtccagcccgactggacagtgccgaggggcaccgagagccagcttggcaccgagagttcgtttgttctctggcggggaggtcttgctggcacatatagtggagaaaggccgggctctgcgttcatgtggagaaagagacggcttccttcagcctacggacatgaaggagtcaactctaccttccactcgttgccggctttcgccgagaaccccgagaaacggactaccggagtccctatcttgcagcccgatccccgctacccgtcggagtgccccgctgaccaggctgcttctggccgcggcggcgttccgctgcagaggacgggagtgcgaatctgggaagcagggttctggttgaactccagcttcgtctgcaacatactgtgtgacttgggcaaattatttcccccgccccgttcctgccagctttaaaacggtcatcagtggggggtgctgcgtatcccctttcactggggtggcttcttcactgaggagagtcgcgcctcagaggaactgagttgagcagctgaacagaggccatgccggggcactccgaggcctgagacgaccacgcctgtgccgctgaggaccttcatcagggctccgtccacttggcccgcttggctgtccaatcacactccagtgtcaaccactggcacccagcagccaagagaggtgtggcgtggccctggggacgcatggctgaggcaggaacaggtgagccgtcccccagcgtggagggcgaacacgggacggagtatgacacgctgccttccgacacagtctccctcagtgactcggactctgacctcagcttgcccggtggtgctgaagtggaagcactgtccccgatggggctgcctggggaggaggattcaggtcctgatgagccgccctcacccccgtcaggcctcctcccagccacggtgcagccattccatctgagaggcatgagctccaccttctcccagcgcagccgtgacatctttgactgcctggagggggcggccagacgggctccatcctctgtggcccacaccagcatgagtgacaacggaggcttcaagcggcccctagcgccctcaggccggtctccagtggaaggcctgggcagggcccatcggagccctgcctcaccaagggtgcctccggtccccgactacgtggcacaccccgagcgctggaccaagtacagcctggaagatgtgaccgaggtcagcgagcagagcaatcaggccaccgccctggccttcctgggctcccagagcctggctgcccccactgactgcgtgtcctccttcaaccaggatccctccagctgtggggaggggagggtcatcttcaccaaaccagtccgaggggtcgaagccagacacgagaggaagagggtcctggggaaggtgggagagccaggcaggggcggccttgggaatcctgccacagacaggggcgagggccctgtggagctggcccatctggccgggcccgggagcccagaggctgaggagtggggcagcccccatggaggcctgcaggaggtggaggcactgtcagggtctgtccacagtgggtctgtgccaggtctcccgccggtggaaactgttggcttccatggcagcaggaagcggagtcgagaccacttccggaacaagagcagcagccccgaggacccaggtgctgaggtctgagagggagatggcccagcctgaccccactggccactgccatcctgctgccttcccagtggggctggtcagggggcagcctggccactgcctagctggaatgggaggaagcctgcaggtggcaccggtggccctggctgcagttctgggcagcatcctcccaagcagagaccttgctgaagctcctggggtgtggggtgtgggctggaagcactggctccctggtagggacaataaaggttttgggtctttctga

SEQ ID NO: 433858 - DNA, 3164 bp, Homo sapiens
gctgcttccgagccggacccaagggccggggcgtggaggagtagaggggcgagcgcatgcgcacaggactacacgtcccgacaggcgtcgggagcggcggcccagttccttgtgggagctgtagttctgcaggcgcggaagccgtggtgctcggccggcagagcactcggtttcccagagggctgagcgcgccgcacggaggtgcggcgccgaccaagatggagactgccgagcagccttgagccggtaggtttgtggtgagggaggacgggccgcgcgggccggccgagcctccgggaggtcaccgagcgcagctttaatacctgagctcgaaggccccgctgtgctcgccgacccccgtacctcgcggccgggcccttgggacccacagcatccttgtgaggcccggaggcctgtccagcccgactggacagtgccgaggggcaccgagagccagcttggcaccgagagttcgtttgttctctggcggggaggtcttgctggcacatatagtggagaaaggccgggctctgcgttcatgtggagaaagagacggcttccttcagcctacggacatgaaggagtcaactctaccttccactcgttgccggctttcgccgagaaccccgagaaacggactaccggagtccctatcttgcagcccgatccccgctacccgtcggagtgccccgctgaccaggctgcttctggccgcggcggcgttccgctgcagaggacgggagtgcgaatctgggaagcagggttctggttgaactccagcttcgtctgcaacatactgtgtgacttgggcaaattatttcccccgccccgttcctgccagctttaaaacggtcatcagtggggggtgctgcgtatcccctttcactggggtggcttcttcactgaggagagtcgcgcctcagaggaactgaggtcctgcctgtgttcgacctggtggggggcactaagagcccctgatagtacccctgaccccatccttattgggtgcacaagacacaggtcactctgggcgggcaaggagttttggtagcaggagaggagtcggtggatggatggctgaggacagtgcagaagggtgtggctgggccgtctttttttgcctggaaattcaagttctgaggcacccagtcactccagcactaaatgggtgcaggaggcagcacttgtctgcccagctggaaaggcagggtatgtgctgagtgttacaggtggaaggccactggaggtcgctccaggagccgcggggatttacctctgcctaacagggctgctcaaggtgatggtcgacaccccactttcctgagagcttgaccctcagatgccagggccttggctgcagattccttgggagctcccggggatcttccagcaaataggagcaaatcttttccccgtggatcaggaaggtgcacgctctttgtggaatacgactgctcaccccgcacagcaagcagcttataagtggccctcctgcctgatttcagccctgggttcaagccctgggtggctgcttactaccaaaatcgctcagtagctccaagcctgcctgcagagggttggcaccattaaatgaggtaacgagtcaaaagtccctaccctgggtcctagcctgtcaggggctccgaaaacccaggctcaggtcggtcctgcccggcacctgtttcacacatgtacactccggtctgaggttggtcctctcccccaccccacccacctgcagttgagcagctgaacagaggccatgccggggcactccgaggcctgagacgaccacgcctgtgccgctgaggaccttcatcagggctccgtccacttggcccgcttggctgtccaatcacactccagtgtcaaccactggcacccagcagccaagagaggtgtggcgtggccctggggacgcatggctgaggcaggaacaggtgagccgtcccccagcgtggagggcgaacacgggacggagtatgacacgctgccttccgacacagtctccctcagtgactcggactctgacctcagcttgcccggtggtgctgaagtggaagcactgtccccgatggggctgcctggggaggaggattcaggtcctgatgagccgccctcacccccgtcaggcctcctcccagccacggtgcagccattccatctgagaggcatgagctccaccttctcccagcgcagccgtgacatctttgactgcctggagggggcggccagacgggctccatcctctgtggcccacaccagcatgagtgacaacggaggcttcaagcggcccctagcgccctcaggccggtctccagtggaaggcctgggcagggcccatcggagccctgcctcaccaagggtgcctccggtccccgactacgtggcacaccccgagcgctggaccaagtacagcctggaagatgtgaccgaggtcagcgagcagagcaatcaggccaccgccctggccttcctgggctcccagagcctggctgcccccactgactgcgtgtcctccttcaaccaggatccctccagctgtggggaggggagggtcatcttcaccaaaccagtccgaggggtcgaagccagacacgagaggaagagggtcctggggaaggtgggagagccaggcaggggcggccttgggaatcctgccacagacaggggcgagggccctgtggagctggcccatctggccgggcccgggagcccagaggctgaggagtggggcagcccccatggaggcctgcaggaggtggaggcactgtcagggtctgtccacagtgggtctgtgccaggtctcccgccggtggaaactgttggcttccatggcagcaggaagcggagtcgagaccacttccggaacaagagcagcagccccgaggacccaggtgctgaggtctgagagggagatggcccagcctgaccccactggccactgccatcctgctgccttcccagtggggctggtcagggggcagcctggccactgcctagctggaatgggaggaagcctgcaggtggcaccggtggccctggctgcagttctgggcagcatcctcccaagcagagaccttgctgaagctcctggggtgtggggtgtgggctggaagcactggctccctggtagggacaataaaggttttgggtctttctga

SEQ ID NO: 433859 - DNA, 1978 bp, Homo sapiens
gctgcttccgagccggacccaagggccggggcgtggaggagtagaggggcgagcgcatgcgcacaggactacacgtcccgacaggcgtcgggagcggcggcccagttccttgtgggagctgtagttctgcaggcgcggaagccgtggtgctcggccggcagagcactcggtttcccagagggctgagcgcgccgcacggaggtgcggcgccgaccaagatggagactgccgagcagccttgagccgggctgctcaaggtgatggtcgacaccccactttcctgagagcttgaccctcagatgccagggccttggctgcagattccttgggagctcccggggatcttccagcaaataggagcaaatcttttccccgtggatcaggaaggtgcacgctctttgtggaatacgactgctcaccccgcacagcaagcagcttataagtggccctcctgcctgatttcagccctgggttcaagccctgggtggctgcttactaccaaaatcgctcagtagctccaagcctgcctgcagagggttggcaccattaaatgagttgagcagctgaacagaggccatgccggggcactccgaggcctgagacgaccacgcctgtgccgctgaggaccttcatcagggctccgtccacttggcccgcttggctgtccaatcacactccagtgtcaaccactggcacccagcagccaagagaggtgtggcgtggccctggggacgcatggctgaggcaggaacaggtgagccgtcccccagcgtggagggcgaacacgggacggagtatgacacgctgccttccgacacagtctccctcagtgactcggactctgacctcagcttgcccggtggtgctgaagtggaagcactgtccccgatggggctgcctggggaggaggattcaggtcctgatgagccgccctcacccccgtcaggcctcctcccagccacggtgcagccattccatctgagaggcatgagctccaccttctcccagcgcagccgtgacatctttgactgcctggagggggcggccagacgggctccatcctctgtggcccacaccagcatgagtgacaacggaggcttcaagcggcccctagcgccctcaggccggtctccagtggaaggcctgggcagggcccatcggagccctgcctcaccaagggtgcctccggtccccgactacgtggcacaccccgagcgctggaccaagtacagcctggaagatgtgaccgaggtcagcgagcagagcaatcaggccaccgccctggccttcctgggctcccagagcctggctgcccccactgactgcgtgtcctccttcaaccaggatccctccagctgtggggaggggagggtcatcttcaccaaaccagtccgaggggtcgaagccagacacgagaggaagagggtcctggggaaggtgggagagccaggcaggggcggccttgggaatcctgccacagacaggggcgagggccctgtggagctggcccatctggccgggcccgggagcccagaggctgaggagtggggcagcccccatggaggcctgcaggaggtggaggcactgtcagggtctgtccacagtgggtctgtgccaggtctcccgccggtggaaactgttggcttccatggcagcaggaagcggagtcgagaccacttccggaacaagagcagcagccccgaggacccaggtgctgaggtctgagagggagatggcccagcctgaccccactggccactgccatcctgctgccttcccagtggggctggtcagggggcagcctggccactgcctagctggaatgggaggaagcctgcaggtggcaccggtggccctggctgcagttctgggcagcatcctcccaagcagagaccttgctgaagctcctggggtgtggggtgtgggctggaagcactggctccctggtagggacaataaaggttttgggtctttctga

SEQ ID NO: 433860 - DNA, 1485 bp, Homo sapiens
  misc_feature (53)..(54): n is a, c, g, or t
aaacaggctggtaccggccgggatttaggatcaagatggagactgccgagcgnnttgagccgttgagcagctgaacagaggccatgccggggcactccgaggcctgagacgaccacgcctgtgccgctgaggaccttcatcagggctccgtccacttggcccgcttggctgtccaatcacactccagtgtcaaccactggcacccagcagccaagagaggtgtggcgtggccctggggacgcatggctgaggcaggaacaggtgagccgtcccccagcgtggagggcgaacacgggacggagtatgacacgctgccttccgacacagtctccctcagtgactcggactctgacctcagcttgcccggtggtgctgaagtggaagcactgtccccgatggggctgcctggggaggaggattcaggtcctgatgagccgccctcacccccgtcaggcctcctcccagccacggtgcagccattccatctgagaggcatgagctccaccttctcccagcgcagccgtgacatctttgactgcctggagggggcggccagacgggctccatcctctgtggcccacaccagcatgagtgacaacggaggcttcaagcggcccctagcgccctcaggccggtctccagtggaaggcctgggcagggcccatcggagccctgcctcaccaagggtgcctccggtccccgactacgtggcacaccccgagcgctggaccaagtacagcctggaagatgtgaccgaggtcagcgagcagagcaatcaggccaccgccctggccttcctgggctcccagagcctggctgcccccactgactgcgtgtcctccttcaaccaggatccctccagctgtggggaggggagggtcatcttcaccaaaccagtccgaggggtcgaagccagacacgagaggaagagggtcctggggaaggtgggagagccaggcaggggcggccttgggaatcctgccacagacaggggcgagggccctgtggagctggcccatctggccgggcccgggagcccagaggctgaggagtggggcagcccccatggaggcctgcaggaggtggaggcactgtcagggtctgtccacagtgggtctgtgccaggtctcccgccggtggaaactgttggcttccatggcagcaggaagcggagtcgagaccacttccggaacaagagcagcagccccgaggacccaggtgctgaggtctgagagggagatggcccagcctgaccccactggccactgccatcctgctgccttcccagtggggctggtcagggggcagcctggccactgcctagctggaatgggaggaagcctgcaggtggcaccggtggccctggctgcagttctgggcagcatcctcccaagcagagaccttgctgaagctcctggggtgtggggtgtgggctggaagcactggctccctggtagggacaataaaggttttgggtctttctga

SEQ ID NO: 433861 - DNA, 1813 bp, Homo sapiens
gctgcttccgagccggacccaagggccggggcgtggaggagtagaggggcgagcgcatgcgcacaggactacacgtcccgacaggcgtcgggagcggcggcccagttccttgtgggagctgtagttctgcaggcgcggaagccgtggtgctcggccggcagagcactcggtttcccagagggctgagcgcgccgcacggaggtgcggcgccgaccaagatggagactgccgagcagccttgagccgggctgctcaaggtgatggtcgacaccccactttcctgagagcttgaccctcagatgccagggccttggctgcagattccttgggagctcccggggatcttccagcaaataggagcaaatcttttccccgtggatcaggaaggtgttgagcagctgaacagaggccatgccggggcactccgaggcctgagacgaccacgcctgtgccgctgaggaccttcatcagggctccgtccacttggcccgcttggctgtccaatcacactccagtgtcaaccactggcacccagcagccaagagaggtgtggcgtggccctggggacgcatggctgaggcaggaacaggtgagccgtcccccagcgtggagggcgaacacgggacggagtatgacacgctgccttccgacacagtctccctcagtgactcggactctgacctcagcttgcccggtggtgctgaagtggaagcactgtccccgatggggctgcctggggaggaggattcaggtcctgatgagccgccctcacccccgtcaggcctcctcccagccacggtgcagccattccatctgagaggcatgagctccaccttctcccagcgcagccgtgacatctttgactgcctggagggggcggccagacgggctccatcctctgtggcccacaccagcatgagtgacaacggaggcttcaagcggcccctagcgccctcaggccggtctccagtggaaggcctgggcagggcccatcggagccctgcctcaccaagggtgcctccggtccccgactacgtggcacaccccgagcgctggaccaagtacagcctggaagatgtgaccgaggtcagcgagcagagcaatcaggccaccgccctggccttcctgggctcccagagcctggctgcccccactgactgcgtgtcctccttcaaccaggatccctccagctgtggggaggggagggtcatcttcaccaaaccagtccgaggggtcgaagccagacacgagaggaagagggtcctggggaaggtgggagagccaggcaggggcggccttgggaatcctgccacagacaggggcgagggccctgtggagctggcccatctggccgggcccgggagcccagaggctgaggagtggggcagcccccatggaggcctgcaggaggtggaggcactgtcagggtctgtccacagtgggtctgtgccaggtctcccgccggtggaaactgttggcttccatggcagcaggaagcggagtcgagaccacttccggaacaagagcagcagccccgaggacccaggtgctgaggtctgagagggagatggcccagcctgaccccactggccactgccatcctgctgccttcccagtggggctggtcagggggcagcctggccactgcctagctggaatgggaggaagcctgcaggtggcaccggtggccctggctgcagttctgggcagcatcctcccaagcagagaccttgctgaagctcctggggtgtggggtgtgggctggaagcactggctccctggtagggacaataaaggttttgggtctttctga

SEQ ID NO: 433862 - DNA, 1302 bp, Homo sapiens
gctgcttccgagccggacccaagggccggggcgtggaggagtagaggggcgagcgcatgcgcacaggactacacgtcccgacaggcgtcgggagcggcggcccagttccttgtgggagctgtagttctgcaggcgcggaagccgtggtgctcggccggcagagcactcggtttcccagagggctgagcgcgccgcacggaggtgcggcgccgaccaagatggagactgccgagcagccttgagccgttgagcagctgaacagaggccatgccggggcactccgaggcctgagacgaccacgcctgtgccgctgaggaccttcatcagggctccgtccacttggcccgcttggctgtccaatcacactccagtgtcaaccactggcacccagcagccaagagaggtgtggcgtggccctggggacgcatggctgaggcaggaacaggtgagccgtcccccagcgtggagggcgaacacgggacggagtatgacacgctgccttccgacacagtctccctcagtgactcggactctgacctcagcttgcccggtggtgctgaagtggaagcactgtccccgatggggctgcctggggaggaggattcaggtcctgatgagccgccctcacccccgtcaggcctcctcccagccacggtgcagccattccatctgagaggcatgagctccaccttctcccagcgcagccgtgacatctttgactgcctggagggggcggccagacgggctccatcctctgtggcccacaccagcatgagtgacaacggaggcttcaagcggcccctagcgccctcaggccggtctccagtggaaggcctgggcagggcccatcggagccctgcctcaccaagggtgcctccggtccccgactacgtggcacaccccgagcgctggaccaagtacagcctggaagatgtgaccgaggtctcccgccggtggaaactgttggcttccatggcagcaggaagcggagtcgagaccacttccggaacaagagcagcagccccgaggacccaggtgctgaggtctgagagggagatggcccagcctgaccccactggccactgccatcctgctgccttcccagtggggctggtcagggggcagcctggccactgcctagctggaatgggaggaagcctgcaggtggcaccggtggccctggctgcagttctgggcagcatcctcccaagcagagaccttgctgaagctcctggggtgtggggtgtgggctggaagcactggctccctggtagggacaataaaggttttgggtctttctga

SEQ ID NO: 433863 - DNA, 1477 bp, Homo sapiens
gctgcttccgagccggacccaagggccggggcgtggaggagtagaggggcgagcgcatgcgcacaggactacacgtcccgacaggcgtcgggagcggcggcccagttccttgtgggagctgtagttctgcaggcgcggaagccgtggtgctcggccggcagagcactcggtttcccagagggctgagcgcgccgcacggaggtgcggcgccgaccaagatggagactgccgagcagccttgagccgttgagcagctgaacagaggccatgccggggcactccgaggcctgagacgaccacgcctgtgccgctgaggaccttcatcagggctccgtccacttggcccgcttggctgtccaatcacactccagtgtcaaccactggcacccagcagccaagagaggtgtggcgtggccctggggacgcatggctgaggcaggaacaggcctcctcccagccacggtgcagccattccatctgagaggcatgagctccaccttctcccagcgcagccgtgacatctttgactgcctggagggggcggccagacgggctccatcctctgtggcccacaccagcatgagtgacaacggaggcttcaagcggcccctagcgccctcaggccggtctccagtggaaggcctgggcagggcccatcggagccctgcctcaccaagggtgcctccggtccccgactacgtggcacaccccgagcgctggaccaagtacagcctggaagatgtgaccgaggtcagcgagcagagcaatcaggccaccgccctggccttcctgggctcccagagcctggctgcccccactgactgcgtgtcctccttcaaccaggatccctccagctgtggggaggggagggtcatcttcaccaaaccagtccgaggggtcgaagccagacacgagaggaagagggtcctggggaaggtgggagagccaggcaggggcggccttgggaatcctgccacagacaggggcgagggccctgtggagctggcccatctggccgggcccgggagcccagaggctgaggagtggggcagcccccatggaggcctgcaggaggtggaggcactgtcagggtctgtccacagtgggtctgtgccaggtctcccgccggtggaaactgttggcttccatggcagcaggaagcggagtcgagaccacttccggaacaagagcagcagccccgaggacccaggtgctgaggtctgagagggagatggcccagcctgaccccactggccactgccatcctgctgccttcccagtggggctggtcagggggcagcctggccactgcctagctggaatgggaggaagcctgcaggtggcaccggtggccctggctgcagttctgggcagcatcctcccaagcagagaccttgctgaagctcctggggtgtggggtgtgggctggaagcactggctccctggtagggacaataaaggttttgggtctttctga

SEQ ID NO: 433864 - DNA, 1757 bp, Homo sapiens
gctgcttccgagccggacccaagggccggggcgtggaggagtagaggggcgagcgcatgcgcacaggactacacgtcccgacaggcgtcgggagcggcggcccagttccttgtgggagctgtagttctgcaggcgcggaagccgtggtgctcggccggcagagcactcggtttcccagagggctgagcgcgccgcacggaggtgcggcgccgaccaagatggagactgccgagcagccttgagccggtaggtttgtggtgagggaggacgggccgcgcgggccggccgagcctccgggaggtcaccgagcgcagctttaatacctgagctcgaaggccccgctgtgctcgccgacccccgtacctcgcggccgggcccttgggacccacagcatccttgtgaggcccggaggcctgtccagcccgactggacagtgccgaggggcaccgagagccagcttggcaccgagagttcgtttgttctctggcggggaggtcttgctggcacatatagtggagaaaggccgggctctgcgttcatgtggagaaagagacggcttccttcagcctacggacatgaaggagtcaactctaccttccactcgttgccggctttcgccgagaaccccgagaaacggactaccggagtccctatcttgcagcccgatccccgctacccgtcggagtgccccgctgaccaggctgcttctggccgcggcggcgttccgctgcagaggacgggagtgcgaatctgggaagcagggttctggttgaactccagcttcgtctgcaacatactgtgtgacttgggcaaattatttcccccgccccgttcctgccagctttaaaacggtcatcagtggggggtgctgcgtatcccctttcactggggtggcttcttcactgaggagagtcgcgcctcagaggaactgaggtcctgcctgtgttcgacctggtggggggcactaagagcccctgatagtacccctgaccccatccttattgggtgcacaagacacaggtcactctgggcgggcaaggagttttggtagcaggagaggagtcggtggatggatggctgaggacagtgcagaagggtgtggctgggccgtctttttttgcctggaaattcaagttctgaggcacccagtcactccagcactaaatgggtgcaggaggcagcacttgtctgcccagctggaaaggcagggtatgtgctgagtgttacaggtggaaggccactggaggtcgctccaggagccgcggggatttacctctgcctaacagggctgctcaaggtgatggtcgacaccccactttcctgagagcttgaccctcagatgccagggccttggctgcagattccttgggagctcccggggatcttccagcaaataggagcaaatcttttccccgtggatcaggaaggtgcacgctctttgtggaatacgactgctcaccccgcacagcaagcagcttataagtggccctcctgcgaggtctgagagggagatggcccagcctgaccccactggccactgccatcctgctgccttcccagtggggctggtcagggggcagcctggccactgcctagctggaatgggaggaagcctgcaggtggcaccggtggccctggctgcagttctgggcagcatcctcccaagcagagaccttgctgaagctcctggggtgtggggtgtgggctggaagcactggctccctggtagggacaataaaggttttgggtctttctga

SEQ ID NO: 433865 - DNA, 1692 bp, Homo sapiens
gctgcttccgagccggacccaagggccggggcgtggaggagtagaggggcgagcgcatgcgcacaggactacacgtcccgacaggcgtcgggagcggcggcccagttccttgtgggagctgtagttctgcaggcgcggaagccgtggtgctcggccggcagagcactcggtttcccagagggctgagcgcgccgcacggaggtgcggcgccgaccaagatggagactgccgagcagccttgagccggtaggtttgtggtgagggaggacgggccgcgcgggccggccgagcctccgggaggtcaccgagcgcagctttaatacctgagctcgaaggccccgctgtgctcgccgacccccgtacctcgcggccgggcccttgggacccacagcatccttgtgaggcccggaggcctgtccagcccgactggacagtgccgaggggcaccgagagccagcttggcaccgagagttcgtttgttctctggcggggaggtcttgctggcacatatagtggagaaaggccgggctctgcgttcatgtggagaaagagacggcttccttcagcctacggacatgaaggagtcaactctaccttccactcgttgccggctttcgccgagaaccccgagaaacggactaccggagtccctatcttgcagcccgatccccgctacccgtcggagtgccccgctgaccaggctgcttctggccgcggcggcgttccgctgcagaggacgggagtgcgaatctgggaagcagggttctggttgaactccagcttcgtctgcaacatactgtgtgacttgggcaaattatttcccccgccccgttcctgccagctttaaaacggtcatcagtggggggtgctgcgtatcccctttcactggggtggcttcttcactgaggagagtcgcgcctcagaggaactgaggtcctgcctgtgttcgacctggtggggggcactaagagcccctgatagtacccctgaccccatccttattgggtgcacaagacacaggtcactctgggcgggcaaggagttttggtagcaggagaggagtcggtggatggatggctgaggacagtgcagaagggtgtggctgggccgtctttttttgcctggaaattcaagttctgaggcacccagtcactccagcactaaatgggtgcaggaggcagcacttgtctgcccagctggaaaggcagggtatgtgctgagtgttacaggtggaaggccactggaggtcgctccaggagccgcggggatttacctctgcctaacagggctgctcaaggtgatggtcgacaccccactttcctgagagcttgaccctcagatgccagggccttggctgcagattccttgggagctcccggggatcttccagcaaataggagcaaatcttttccccgtggatcaggaaggtggaggtctgagagggagatggcccagcctgaccccactggccactgccatcctgctgccttcccagtggggctggtcagggggcagcctggccactgcctagctggaatgggaggaagcctgcaggtggcaccggtggccctggctgcagttctgggcagcatcctcccaagcagagaccttgctgaagctcctggggtgtggggtgtgggctggaagcactggctccctggtagggacaataaaggttttgggtctttctga

SEQ ID NO: 433866 - DNA, 1711 bp, Homo sapiens
gctgcttccgagccggacccaagggccggggcgtggaggagtagaggggcgagcgcatgcgcacaggactacacgtcccgacaggcgtcgggagcggcggcccagttccttgtgggagctgtagttctgcaggcgcggaagccgtggtgctcggccggcagagcactcggtttcccagagggctgagcgcgccgcacggaggtgcggcgccgaccaagatggagactgccgagcagccttgagccggtaggtttgtggtgagggaggacgggccgcgcgggccggccgagcctccgggaggtcaccgagcgcagctttaatacctgagctcgaaggccccgctgtgctcgccgacccccgtacctcgcggccgggcccttgggacccacagcatccttgtgaggcccggaggcctgtccagcccgactggacagtgccgaggggcaccgagagccagcttggcaccgagagttcgtttgttctctggcggggaggtcttgctggcacatatagtggagaaaggccgggctctgcgttcatgtggagaaagagacggcttccttcagcctacggacatgaaggagtcaactctaccttccactcgttgccggctttcgccgagaaccccgagaaacggactaccggagtccctatcttgcagcccgatccccgctacccgtcggagtgccccgctgaccaggctgcttctggccgcggcggcgttccgctgcagaggacgggagtgcgaatctgggaagcagggttctggttgaactccagcttcgtctgcaacatactgtgtgacttgggcaaattatttcccccgccccgttcctgccagctttaaaacggtcatcagtggggggtgctgcgtatcccctttcactggggtggcttcttcactgaggagagtcgcgcctcagaggaactgaggtcctgcctgtgttcgacctggtggggggcactaagagcccctgatagtacccctgaccccatccttattgggtgcacaagacacaggtcactctgggcgggcaaggagttttggtagcaggagaggagtcggtggatggatggctgaggacagtgcagaagggtgtggctgggccgtctttttttgcctggaaattcaagttctgaggcacccagtcactccagcactaaatgggtgcaggaggcagcacttgtctgcccagctggaaaggcagggtatgtgctgagtgttacaggtggaaggccactggaggtcgctccaggagccgcggggatttacctctgcctaacagggctgctcaaggtgatggtcgacaccccactttcctgagagcttgaccctcagatgccagggccttggctgcagattccttgggagctcccggggatcttccagcaaataggagcaaatcttttccccgtggatcaggaaggtgcacgctctttgtggaatacgactgctcaccccgcacagcaagcagcttataagtggccctcctgcctgatttcagccctgggttcaagccctgggtggctgcttactaccaaaatcgctcagtagctccaagcctgcctgcagagggttggcaccattaaatgaggtaacgagtcaaaagtccctaccctgggtcctagcctgtcaggggctccgaaaacccaggctcagaccggagtgtacatgtgtgaaacaggtgccgggcaggaccggtcgaccggc

SEQ ID NO: 433867 - DNA, 510 bp, Homo sapiens
ttgagcagctgaacagaggccatgccggggcactccgaggcctgagacgaccacgcctgtgccgctgaggaccttcatcagggctccgtccacttggcccgcttggctgtccaatcacactccagtgtcaaccactggcacccagcagccaagagaggtgagaggagggcttggagggggaggcgggactccaccctgtgtgggacagttctgtcagttgaccctccacttgtccaggggcagtggatctgcagggggaactcattctcaatactgttcctcctgagaaacaaattttctgggctgttttggtttaggtgtggcgtggccctggggacgcatggctgaggcaggaacaggtgagccgtcccccagcgtggagggcgaacacgggacggagtatgacacgctgccttccgacacagtctccctcagtgactcggactctgacctcagcttgcccggtggtgctgaagtggaagcactgtccccgatggggctgcctgggga

SEQ ID NO: 433868 - DNA, 259 bp, Homo sapiens
ccaaagccaggctcatgcctgacacagtgtatacactgcagcccccgtgggaaactatgtgccaatagactgcttaaagaactggggcaaatagaaagccgagaaatagcctggcacaacaaggagcccgtgtacagcctggacttccagcatgggacggctgggaggatccacagactggcgtctgccggcgtggacaccaatgtcagggtaaactggggcagagatagacatccgggaacactgcttgaagcaatag

SEQ ID NO: 433869 - DNA, 2279 bp, Homo sapiens
cgggaagcggcgcgcgctgcgcgggaggtgacggtgcctctgactgtccgggtccctccagcattttgcagctttctcctgtcttgaagaagtagaacggtgcccgagaaacgtttttccccttcgagactcaggaggatgaaagtcatcacttgtgaaatagcctggcacaacaaggagcccgtgtacagcctggacttccagcatgggacggctgggaggatccacagactggcgtctgccggcgtggacaccaatgtcaggatctggaaggtagaaaagggaccagatggaaaagccatcgtggaatttttgtccaatcttgctcgtcataccaaagccgtcaatgttgtgcgtttttctccaactggggaaattttagcatcgggaggagatgatgctgtcatcctattgtggaaggtgaatgataacaaggagccggagcagatcgcttttcaggatgaggacgaggcccagctgaacaaggagaactggacggttgtgaagactctgcggggccacttagaagatgtgtatgatatttgctgggcaactgatgggaatttaatggcttctgcctctgtggataacacagccatcatatgggatgtcagcaaaggacaaaagatatcaatttttaatgaacataaaagttatgtccaaggagtaacctgggaccctttgggtcaatatgttgctactctgagctgtgacagggtgctgcgagtatacagtatacagaagaagcgtgtggctttcaatgtttcgaagatgctgtctggaataggggctgaaggagaggcaagaagctaccggatgtttcacgacgacagcatgaagtctttcttccgtagactgagtttcactcccgacggatctttgcttctcacgccagctggatgtgtggaatctggtgaaaatgtaatgaataccacttatgttttctccaggaagaatcttaaaaggcccatcgctcatcttccatgtcctggaaaagccactcttgctgttcgctgctgtccggtctactttgaactgaggccagtggtggaaacaggtgtggagctgatgagtctgccctaccgcctggtgtttgctgtggcctcggaggattccgtgcttctgtatgacacccagcagtccttcccttttggttacgtgtctaatatacattaccacaccctcagtgacatttcatggtccagcgatggtgccttcctggccatttcttccacggacggttactgctcatttgtgacatttgagaaagatgaacttggaattcctttgaaagagaagccagttttgaacatgagaactcctgatacagcaaagaaaaccaagagtcagacacatcgagggtcttcgccaggacccagaccggtagagggaacccctgccagcagaacccaagaccccagcagccccggcacgactccccctcaggccagacaggccccagccccaacagtcatcagggaccctccctccatcactcctgctgtcaaaagccccttgccggggccttcggaggagaagaccctgcagcccagtagtcaaaacacaaaagcccacccatcccggagggtcactctgaacacactgcaagcctggagcaagacaacaccccggagaataaacttaacacccttaaagacggacactccaccaagttctgtaccaaccagtgtgatttccaccccttctacagaagaaattcagtcagagacgcctggagacgctcagggcagtcccccagagctaaagcggcccagactcgatgaaaacaaaggaggcacggaaagtctggacccttgatgggacctcggcttctgctcgaagcctaccaggctcccggtgtgtgcagggagacggtaaagctggaggtgcctgagaccagggcttccatggagcgggacacactgtaaatggatttctataacagaagtgacatgtgtactgatttttctccagaaatatggatgctgttgtattcagtatccatttttaacttgggacatgaacgttttaacgtagtaaatcctctttttgatgagtttctgaaactggagcggttcaacgttatccagtgtgaaaatcagtgagtcctccctggcatcctcgtgaaagtgcacacacttcatggagggactccttttcaataagaattaggaagatgagaaagtaatttgagattttactctgtcgaattttagagtatttgaagtgattgttagatttcacttctaaggagttgattgattaaactttggaaggta

SEQ ID NO: 433870 - DNA, 2247 bp, Homo sapiens
gttaacactgttgtttaatccatcaccagcattttgcagctttctcctgtcttgaagaagtagaacggtgcccgagaaacgtttttccccttcgagactcaggaggatgaaagtcatcacttgtgaaatagcctggcacaacaaggagcccgtgtacagcctggacttccagcatgggacggctgggaggatccacagactggcgtctgccggcgtggacaccaatgtcaggatctggaaggtagaaaagggaccagatggaaaagccatcgtggaatttttgtccaatcttgctcgtcataccaaagccgtcaatgttgtgcgtttttctccaactggggaaattttagcatcgggaggagatgatgctgtcatcctattgtggaaggtgaatgataacaaggagccggagcagatcgcttttcaggatgaggacgaggcccagctgaacaaggagaactggacggttgtgaagactctgcggggccacttagaagatgtgtatgatatttgctgggcaactgatgggaatttaatggcttctgcctctgtggataacacagccatcatatgggatgtcagcaaaggacaaaagatatcaatttttaatgaacataaaagttatgtccaaggagtaacctgggaccctttgggtcaatatgttgctactctgagctgtgacagggtgctgcgagtatacagtatacagaagaagcgtgtggctttcaatgtttcgaagatgctgtctggaataggggctgaaggagaggcaagaagctaccggatgtttcacgacgacagcatgaagtctttcttccgtagactgagtttcactcccgacggatctttgcttctcacgccagctggatgtgtggaatctggtgaaaatgtaatgaataccacttatgttttctccaggaagaatcttaaaaggcccatcgctcatcttccatgtcctggaaaagccactcttgctgttcgctgctgtccggtctactttgaactgaggccagtggtggaaacaggtgtggagctgatgagtctgccctaccgcctggtgtttgctgtggcctcggaggattccgtgcttctgtatgacacccagcagtccttcccttttggttacgtgtctaatatacattaccacaccctcagtgacatttcatggtccagcgatggtgccttcctggccatttcttccacggacggttactgctcatttgtgacatttgagaaagatgaacttggaattcctttgaaagagaagccagttttgaacatgagaactcctgatacagcaaagaaaaccaagagtcagacacatcgagggtcttcgccaggacccagaccggtagagggaacccctgccagcagaacccaagaccccagcagccccggcacgactccccctcaggccagacaggccccagccccaacagtcatcagggaccctccctccatcactcctgctgtcaaaagccccttgccggggccttcggaggagaagaccctgcagcccagtagtcaaaacacaaaagcccacccatcccggagggtcactctgaacacactgcaagcctggagcaagacaacaccccggagaataaacttaacacccttaaagacggacactccaccaagttctgtaccaaccagtgtgatttccaccccttctacagaagaaattcagtcagagacgcctggagacgctcagggcagtcccccagagctaaagcggcccagactcgatgaaaacaaaggaggcacggaaagtctggacccttgatgggacctcggcttctgctcgaagcctaccaggctcccggtgtgtgcagggagacggtaaagctggaggtgcctgagaccagggcttccatggagcgggacacactgtaaatggatttctataacagaagtgacatgtgtactgatttttctccagaaatatggatgctgttgtattcagtatccatttttaacttgggacatgaacgttttaacgtagtaaatcctctttttgatgagtttctgaaactggagcggttcaacgttatccagtgtgaaaatcagtgagtcctccctggcatcctcgtgaaagtgcacacacttcatggagggactccttttcaataagaattaggaagatgagaaagtaatttgagattttactctgtcgaattttagagtatttgaagtgattgttagatttcacttctaaggagttgattgattaaactttggaaggta

SEQ ID NO: 433871 - DNA, 2377 bp, Homo sapiens
cgggaagcggcgcgcgctgcgcgggaggtgacggtgcctctgactgtccgggtccctccagcattttgcagctttctcctgtcttgaagaagtagaacggtgcccgagaaacgtttttccccttcgagactcaggaggatgaaagtcatcacttgtgaaatagcctggcacaacaaggagcccgtgtacagcctggacttccagcatgggacggctgggaggatccacagactggcgtctgccggcgtggacaccaatgtcaggatctggaaggtagaaaagggaccagatggaaaagccatcgtggaatttttgtccaatcttgctcgtcataccaaagccgtcaatgttgtgcgtttttctccaactggggaaattttagcatcgggaggagatgatgctgtcatcctattgtggaaggtgaatgataacaaggagccggagcagatcgcttttcaggatgaggacgaggcccagctgaacaaggagaactggacggttgtgaagactctgcggggccacttagaagatgtgtatgatatttgctgggcaactgatgggaatttaatggcttctgcctctgtggataacacagccatcatatgggatgtcagcaaaggacaaaagatatcaatttttaatgaacataaaagttatgtccaaggagtaacctgggaccctttgggtcaatatgttgctactctgagctgtgacagggtgctgcgagtatacagtatacagaagaagcgtgtggctttcaatgtttcgaagatgctgtctggaataggggctgaaggagaggcaagaagctaccggatgtttcacgacgacagcatgaagtctttcttccgtagactgagtttcactcccgacggatctttgcttctcacgccagctggatgtgtggaatctggtgaaaatgtaatgaataccacttatgttttctccaggaagaatcttaaaaggcccatcgctcatcttccatgtcctggaaaagccactcttgctgttcgctgctgtccggtctactttgaactgaggccagtggtggaaacaggtgtggagctgatgagtctgccctaccgcctggtgtttgctgtggcctcggaggattccgtgcttctgtatgacacccagcagtccttcccttttggttacgtgtctaatatacattaccacaccctcagtgacatttcatggtccagcgatggtgccttcctggccatttcttccacggacggttactgctcatttgtgacatttgagaaagatgaacttggaattcctttgaaagagaagccagttttgaacatgagaactcctgatacagcaaagaaaaccaagagtcagacacatcgagggtcttcgccaggacccagaccggtagagggaacccctgccagcagaacccaagaccccagcagccccggcacgactccccctcaggccagacaggccccagccccaacagtcatcagggaccctccctccatcactcctgctgtcaaaagccccttgccggggccttcggaggagaagaccctgcagcccagtagtcaaaacacaaaagcccacccatcccggagggtcactctgaacacactgcaagcctggagcaagacaacaccccggagaataaacttaacacccttaaagacggacactccaccaagttctgtaccaaccagtgtgatttccaccccttctacagaagaaattcagtcagagacgcctggagacgctcagggcagtcccccagagctaaagcggcccagactcgatgaaaacaaaggaggcacggaaagtctggacccttgatgggacctcggcttctgctcgaagcctaccaggctcccggtgtgtgcagggagacggtaaagctggaggtgcctgagaccagggcttccatggagcgggacacactgtaaatggatttctataacagaagtgacatgtgtactgatttttctccagaaatatggatgctgttgtattcagtatccatttttaacttgggacatgaacgttttaacgtagtaaatcctctttttgatgagtttctgaaactggagcggttcaacgttatccagtgtgaaaatcagtgagtcctccctggcatcctcgtgaaagtgcacacacttcatggagggactccttttcaataagaattaggaagatgagaaagtaatttgagattttaactctgtctcaaaaaaaaaaaaaaagagaaaaagaagaacagtattaggttttacaaatctgtttcttgtgcattgattgtgggagttggggtgggggacccctgatggcctgcctgttctcagccatcatccttaaatataaatcaaaattggcaataaaagaccaagtgaagtca

SEQ ID NO: 433872 - DNA, 1744 bp, Homo sapiens
  misc_feature (161)..(161): n is a, c, g, or t
gtgaaccgggatatggatcaggagaacgtggttactagcacagagagttctcccagtaggttaatagtggggggtaaggcgaggttagcgaggcttgctagaagtcatcaaaaagctattagtgggagtagagtttgaagtccttgagagaggattatgtngctactctgagctgtgacagggtgctgcgagtatacagtatacagaagaagcgtgtggctttcaatgtttcgaagatgctgtctggaataggggctgaaggagaggcaagaagctaccggatgtttcacgacgacagcatgaagtctttcttccgtagactgagtttcactcccgacggatctttgcttctcacgccagctggatgtgtggaatctggtgaaaatgtaatgaataccacttatgttttctccaggaagaatcttaaaaggcccatcgctcatcttccatgtcctggaaaagccactcttgctgttcgctgctgtccggtctactttgaactgaggccagtggtggaaacaggtgtggagctgatgagtctgccctaccgcctggtgtttgctgtggcctcggaggattccgtgcttctgtatgacacccagcagtccttcccttttggttacgtgtctaatatacattaccacaccctcagtgacatttcatggtccagcgatggtgccttcctggccatttcttccacggacggttactgctcatttgtgacatttgagaaagatgaacttggaattcctttgaaagagaagccagttttgaacatgagaactcctgatacagcaaagaaaaccaagagtcagacacatcgagggtcttcgccaggacccagaccggtagagggaacccctgccagcagaacccaagaccccagcagccccggcacgactccccctcaggccagacaggccccagccccaacagtcatcagggaccctccctccatcactcctgctgtcaaaagccccttgccggggccttcggaggagaagaccctgcagcccagtagtcaaaacacaaaagcccacccatcccggagggtcactctgaacacactgcaagcctggagcaagacaacaccccggagaataaacttaacacccttaaagacggacactccaccaagttctgtaccaaccagtgtgatttccaccccttctacagaagaaattcagtcagagacgcctggagacgctcagggcagtcccccagagctaaagcggcccagactcgatgaaaacaaaggaggcacggaaagtctggacccttgatgggacctcggcttctgctcgaagcctaccaggctcccggtgtgtgcagggagacggtaaagctggaggtgcctgagaccagggcttccatggagcgggacacactgtaaatggatttctataacagaagtgacatgtgtactgatttttctccagaaatatggatgctgttgtattcagtatccatttttaacttgggacatgaacgttttaacgtagtaaatcctctttttgatgagtttctgaaactggagcggttcaacgttatccagtgtgaaaatcagtgagtcctccctggcatcctcgtgaaagtgcacacacttcatggagggactccttttcaataagaattaggaagatgagaaagtaatttgagattttactctgtcgaattttagagtatttgaagtgattgttagatttcacttctaaggagttgattgattaaactttggaaggta

SEQ ID NO: 433873 - DNA, 1143 bp, Homo sapiens
cgggaagcggcgcgcgctgcgcgggaggtgacggtgcctctgactgtccgggtccctccagcattttgcagctttctcctgtcttgaagaagtagaacggtgcccgagaaacgtttttccccttcgagactcaggaggatgaaagtcatcacttgtgaaatagcctggcacaacaaggagcccgtgtacagcctggacttccagcatgggacggctgggaggatccacagactggcgtctgccggcgtggacaccaatgtcaggatctggaaggtagaaaagggaccagatggaaaagccatcgtggaatttttgtccaatcttgctcgtcataccaaagccgtcaatgttgtgcgtttttctccaactggggaaattttagcatcgggaggagatgatgctgtcatcctattgtggaaggtgaatgataacaaggagccggagcagatcgcttttcaggatgaggacgaggcccagctgaacaaggagaactggacggttgtgaagactctgcggggccacttagaagatgtgtatgatatttgctgggcaactgatgggaatttaatggcttctgcctctgtggataacacagccatcatatgggatgtcagcaaaggacaaaagatatcaatttttaatgaacataaaagttatgtccaaggagtaacctgggaccctttgggtcaatatgttgctactctgagctgtgacagggtgctgcgagtatacagtatacagaagaagcgtgtggctttcaatgtttcgaagatgctgtctggaataggggctgaaggagaggcaagaagctaccggatgtttcacgacgacagcatgaagtctttcttccgtagactgagtttcactcccgacggatctttgcttctcacgccaggtgtggagctgatgagtctgccctaccgcctggtgtttgctgtggcctcggaggattccgtgcttctgtatgacacccagcagtccttcccttttggttacgtgtctaatatacattaccacaccctcagtgacatttcatgttgtatcttttcccgggtttttgccttcaaacaagcttgtgatttttgctcgaacttccctcttctaagtagatgtgagagtgttggtaaggtctgttaacttttc

SEQ ID NO: 433874 - DNA, 1070 bp, Homo sapiens
cgggaagcggcgcgcgctgcgcgggaggtgacggtgcctctgactgtccgggtccctccagcattttgcagctttctcctgtcttgaagaagtagaacggtgcccgagaaacgtttttccccttcgagactcaggaggatgaaagtcatcacttgtgaaatagcctggcacaacaaggagcccgtgtacagcctggacttccagcatgggacggctgggaggatccacagactggcgtctgccggcgtggacaccaatgtcaggatctggaaggtagaaaagggaccagatggaaaagccatcgtggaatttttgtccaatcttgctcgtcataccaaagccgtcaatgttgtgcgtttttctccaactggggaaattttagcatcgggaggagatgatgctgtcatcctattgtggaaggtgaatgataacaaggagccggagcagatcgcttttcaggatgaggacgaggcccagctgaacaaggagaactggacggttgtgaagactctgcggggccacttagaagatgtgtatgatatttgctgggcaactgatgggaatttaatggcttctgcctctgtggataacacagccatcatatgggatgtcagcaaaggacaaaagatatcaatttttaatgaacataaaagttatgtccaaggagtaacctgggaccctttgggtcaatatgttgctactctgagctgtgacagacacagtctcactctgtcacccaggcaggtgttgtggcgcaatctcacaatctcagctcactgcaacctctgcctcctggtttcaagcgattctcctgtctcagcttccctattagctgggattacaggcacatgccaccatgcccggttaatttttgtgtttttagtagagacagggtttcaccacgttggtcaagctgttctcaaactcctaacctcaaatgatctgcctgccttggccaatgtgctgggattacaggcatgagccaccatgccccgccctgaacttagtaaatctttattattattactatttttttttttttttgagagaggggcttactctgtcaccca

SEQ ID NO: 433875 - DNA, 301 bp, Homo sapiens
  misc_feature (11)..(11): n is a, c, g, or t
tgacataaganaaataatcagtttgaaattccacagctgcctccagaaacattaaccacccctctctagtcttactggtattttttgtttccttaataaagctccagtctccctcatttgagcaatactctcatttcctctgatgtctggatgatcggcagggcaggaatctgagcgctggccccgtggtgaggccatgttctcataatcaggctccagccagaaaaataagaaacaccgcaacaggcttcagtatcagggctgaaactgctggatgaataaactatttattaaaaacgga

SEQ ID NO: 433876 - DNA, 2949 bp, Homo sapiens
ggcggggggcggcgtcctggccatggccggcctgtcggacctggaactgcggcgggagctgcaggccctgggcttccagccaggacccatcaccgacaccacccgggatgtctaccgcaacaagctgcgccgcctgcggggcgaggcccggctgcgcgacgaggagcggctgcgggaggaggcccggccgcggggcgaggagcggttacgggaagaggcccggttacgcgaggatgcgccgctgcgcgcccggcccgccgcggcctctccgcgggcggagccctggctctcccagccggcctcgggctcggcctacgcgacccctggggcctacggtgatatccggccctccgcggcttcctgggtagggagccgcggcctcgcctatcctgcccgcccggcgcaactcaggcgccgcgcctcggtccggggcagctccgaggaggacgaggacgcccggacgcccgacagggccacgcagggcccgggtctcgcggcccgccgctggtgggcagcgtctcccgccccggcgcggctgccttcctccctcctcggtcccgacccgcgcccgggcctgcgggcgactcgagcgggccctgctggcgcggcgagggcccggcctgaggtggggcgccggctggagcgctggctctctcggcttctgctctgggccagcctagggctactgctcgtcttcctgggcatcctttgggtgaagatgggcaagccctcagcgccgcaggaggcggaggacaacatgaagttattgccagtggactgtgagagaaaaacagatgagttctgtcaggccaagcagaaggcagccttgctggagctgctgcatgaactctacaatttcctggccatccaagctggtaattttgagtgtggaaatccagagaatctaaaaagcaaatgcattcctgttatggaagcccaagaatatatagccaatgtgaccagcagctcctccgccaagtttgaagccgcactgacctggatactgagcagtaacaaggacgtgggcatctggttgaaaggagaagaccagtctgaattggtgacgactgtggacaaggtggtctgcctggaatctgcccacccccgcatgggtgttggctgccgcctgagccgggccttgctcactgctgtcaccaacgtgctcatcttcttctggtgcttggcttttttgtgggggctcctaattctcctaaaatatcggtggcgaaagttagaagaggaggaacaagccatgtatgagatggtgaagaagattatagacgtggtccaggaccattacgtggactgggagcaggacatggagcgctatccatatgtaggcatcctgcacgtgcgcgacagcttgatccctccacagagccggaggcgcatgaagcgtgtctgggaccgagctgtggagttcctggcctccaacgaatcccggatccagacggagtcccaccgcgttgcaggagaggacatgctggtgtggagatggactaagccctcttccttctctgactcagagcgataagccccgggcggggacttgttcctggtcagcctgtcccaggacagcccactccagaggcacaggagggtcaccaggcctgcggtgctgaattcacacttgccttgactttcagtctcgtcctgacacgattccaaaggtctgccatactcttcagaggagttcggctcgcaggaaaatgtgggcttcctttaaagggagggggagaagccagggtgatagcccagactctgccctgttgtgctggcagaaacggggagaagggttgagttttcatgaatagaaaacaagagcagcagctgtcaggcccagctgacaagcgtggggctggtgggctggggcatggccacgccagggagtctgtcacctgggaggtggggcaaggatggtgtttcgggtggcgggatggggagcagcttggtccatgtgccttcagggggttgttacctgagagctccagggtgaagggagaaagcctgtgctctggctggctgggcctctatcctgaagagggaaggtgctagaaattagaacaagtgactgtaggggggaccgtctagaaacaccaggcccagacacacggtccctcaggtcaggaggagtgagcagccggcacagcctcctgggaggatcccgaagtagggactggggctgagagcagagaggagggtcgggcagccccagggcgggcgggcccgcctcagtgttgcttctcacagaagctgcgactctagaccaggcctgcagccagaacgccgattccgggagcttgggagccctgcgtcagggcccagagcctcgcacttgctgtgtgcgaagatcgccttgctttactgtgaccacagccccgacgcggggctgtttaacaagaacttcagcgcagccggcgtttctgttaccccggccgcggctcttggcggcgggagaggcgcagtggctgcaggctgccccctgccggccacaagggagcagcgtccgcgccgccgcccaccggccctcccgccagctcctcagcctgctccctgggaggcaggctccagaagcaccccgacggggggccttattaagtgcgagaagcctctccagcgagtcttccccgtgtgtcctcatctgcggcaggcaggagagggggagcaaacaggaaattccacagctgcctccagaaacattaaccacccctctctagtcttactggtattttttgtttccttaataaagctccagtctccctcatttgagcaatactctcatttcctctgatgtctggatgatcggcagggcaggaatctgagcgctggccccgtggtgaggccatgttctcataatcaggctccagccagaaaaataagaaacaccgcaacaggcttcagtatcagggctgaaactgctggatgaataaactatttattaaaaacgga

SEQ ID NO: 433877 - DNA, 2555 bp, Homo sapiens
ggcggggggcggcgtcctggccatggccggcctgtcggacctggaactgcggcgggagctgcaggccctgggcttccagccaggacccatcaccgacaccacccgggatgtctaccgcaacaagctgcgccgcctgcggggcgaggcccggctgcgcgacgaggagcggctgcgggaggaggcccggccgcggggcgaggagcggttacgggaagaggcccggttacgcgaggatgcgccgctgcgcgcccggcccgccgcggcctctccgcgggcggagccctggctctcccagccggcctcgggctcggcctacgcgacccctggggcctacggtgatatccggccctccgcggcttcctggtgaagttattgccagtggactgtgagagaaaaacagatgagttctgtcaggccaagcagaaggcagccttgctggagctgctgcatgaactctacaatttcctggccatccaagctggtaattttgagtgtggaaatccagagaatctaaaaagcaaatgcattcctgttatggaagcccaagaatatatagccaatgtgaccagcagctcctccgccaagtttgaagccgcactgacctggatactgagcagtaacaaggacgtgggcatctggttgaaaggagaagaccagtctgaattggtgacgactgtggacaaggtggtctgcctggaatctgcccacccccgcatgggtgttggctgccgcctgagccgggccttgctcactgctgtcaccaacgtgctcatcttcttctggtgcttggcttttttgtgggggctcctaattctcctaaaatatcggtggcgaaagttagaagaggaggaacaagccatgtatgagatggtgaagaagattatagacgtggtccaggaccattacgtggactgggagcaggacatggagcgctatccatatgtaggcatcctgcacgtgcgcgacagcttgatccctccacagagccggaggcgcatgaagcgtgtctgggaccgagctgtggagttcctggcctccaacgaatcccggatccagacggagtcccaccgcgttgcaggagaggacatgctggtgtggagatggactaagccctcttccttctctgactcagagcgataagccccgggcggggacttgttcctggtcagcctgtcccaggacagcccactccagaggcacaggagggtcaccaggcctgcggtgctgaattcacacttgccttgactttcagtctcgtcctgacacgattccaaaggtctgccatactcttcagaggagttcggctcgcaggaaaatgtgggcttcctttaaagggagggggagaagccagggtgatagcccagactctgccctgttgtgctggcagaaacggggagaagggttgagttttcatgaatagaaaacaagagcagcagctgtcaggcccagctgacaagcgtggggctggtgggctggggcatggccacgccagggagtctgtcacctgggaggtggggcaaggatggtgtttcgggtggcgggatggggagcagcttggtccatgtgccttcagggggttgttacctgagagctccagggtgaagggagaaagcctgtgctctggctggctgggcctctatcctgaagagggaaggtgctagaaattagaacaagtgactgtaggggggaccgtctagaaacaccaggcccagacacacggtccctcaggtcaggaggagtgagcagccggcacagcctcctgggaggatcccgaagtagggactggggctgagagcagagaggagggtcgggcagccccagggcgggcgggcccgcctcagtgttgcttctcacagaagctgcgactctagaccaggcctgcagccagaacgccgattccgggagcttgggagccctgcgtcagggcccagagcctcgcacttgctgtgtgcgaagatcgccttgctttactgtgaccacagccccgacgcggggctgtttaacaagaacttcagcgcagccggcgtttctgttaccccggccgcggctcttggcggcgggagaggcgcagtggctgcaggctgccccctgccggccacaagggagcagcgtccgcgccgccgcccaccggccctcccgccagctcctcagcctgctccctgggaggcaggctccagaagcaccccgacggggggccttattaagtgcgagaagcctctccagcgagtcttccccgtgtgtcctcatctgcggcaggcaggagagggggagcaaacaggaaattccacagctgcctccagaaacattaaccacccctctctagtcttactggtattttttgtttccttaataaagctccagtctccctcatttgagcaatactctcatttcctctgatgtctggatgatcggcagggcaggaatctgagcgctggccccgtggtgaggccatgttctcataatcaggctccagccagaaaaataagaaacaccgcaacaggcttcagtatcagggctgaaactgctggatgaataaactatttattaaaaacgga

SEQ ID NO: 433878 - DNA, 2832 bp, Homo sapiens
ggcggggggcggcgtcctggccatggccggcctgtcggacctggaactgcggcgggagctgcaggccctgggcttccagccaggacccatcaccgacaccacccgggatgtctaccgcaacaagctgcgccgcctgcggggcgaggcccggctgcgcgacgaggagcggctgcgggaggaggcccggccgcggggcgaggagcggttacgggaagaggcccggttacgcgaggatgcgccgctgcgcgcccggcccgccgcggcctctccgcgggcggagccctggctctcccagccggcctcgggctcggcctacgcgacccctggggcctacggtgatatccggccctccgcggcttcctgggtagggagccgcggcctcgcctatcctgcccgcccggcgcaactcaggcgccgcgcctcggtccggggcagctccgaggaggacgaggacgcccggacgcccgacagggccacgcagggcccgggtctcgcggcccgccgctggtgggcagcgtctcccgccccggcgcggctgccttcctccctcctcggtcccgacccgcgcccgggcctgcgggcgactcgagcgggccctgctggcgcggcgagggcccggcctgaggtggggcgccggctggagcgctggctctctcggcttctgctctgggccagcctagggctactgctcgtcttcctgggcatcctttgggtgaagatgggcaagccctcagcgccgcaggaggcggaggacaacagtaattttgagtgtggaaatccagagaatctaaaaagcaaatgcattcctgttatggaagcccaagaatatatagccaatgtgaccagcagctcctccgccaagtttgaagccgcactgacctggatactgagcagtaacaaggacgtgggcatctggttgaaaggagaagaccagtctgaattggtgacgactgtggacaaggtggtctgcctggaatctgcccacccccgcatgggtgttggctgccgcctgagccgggccttgctcactgctgtcaccaacgtgctcatcttcttctggtgcttggcttttttgtgggggctcctaattctcctaaaatatcggtggcgaaagttagaagaggaggaacaagccatgtatgagatggtgaagaagattatagacgtggtccaggaccattacgtggactgggagcaggacatggagcgctatccatatgtaggcatcctgcacgtgcgcgacagcttgatccctccacagagccggaggcgcatgaagcgtgtctgggaccgagctgtggagttcctggcctccaacgaatcccggatccagacggagtcccaccgcgttgcaggagaggacatgctggtgtggagatggactaagccctcttccttctctgactcagagcgataagccccgggcggggacttgttcctggtcagcctgtcccaggacagcccactccagaggcacaggagggtcaccaggcctgcggtgctgaattcacacttgccttgactttcagtctcgtcctgacacgattccaaaggtctgccatactcttcagaggagttcggctcgcaggaaaatgtgggcttcctttaaagggagggggagaagccagggtgatagcccagactctgccctgttgtgctggcagaaacggggagaagggttgagttttcatgaatagaaaacaagagcagcagctgtcaggcccagctgacaagcgtggggctggtgggctggggcatggccacgccagggagtctgtcacctgggaggtggggcaaggatggtgtttcgggtggcgggatggggagcagcttggtccatgtgccttcagggggttgttacctgagagctccagggtgaagggagaaagcctgtgctctggctggctgggcctctatcctgaagagggaaggtgctagaaattagaacaagtgactgtaggggggaccgtctagaaacaccaggcccagacacacggtccctcaggtcaggaggagtgagcagccggcacagcctcctgggaggatcccgaagtagggactggggctgagagcagagaggagggtcgggcagccccagggcgggcgggcccgcctcagtgttgcttctcacagaagctgcgactctagaccaggcctgcagccagaacgccgattccgggagcttgggagccctgcgtcagggcccagagcctcgcacttgctgtgtgcgaagatcgccttgctttactgtgaccacagccccgacgcggggctgtttaacaagaacttcagcgcagccggcgtttctgttaccccggccgcggctcttggcggcgggagaggcgcagtggctgcaggctgccccctgccggccacaagggagcagcgtccgcgccgccgcccaccggccctcccgccagctcctcagcctgctccctgggaggcaggctccagaagcaccccgacggggggccttattaagtgcgagaagcctctccagcgagtcttccccgtgtgtcctcatctgcggcaggcaggagagggggagcaaacaggaaattccacagctgcctccagaaacattaaccacccctctctagtcttactggtattttttgtttccttaataaagctccagtctccctcatttgagcaatactctcatttcctctgatgtctggatgatcggcagggcaggaatctgagcgctggccccgtggtgaggccatgttctcataatcaggctccagccagaaaaataagaaacaccgcaacaggcttcagtatcagggctgaaactgctggatgaataaactatttattaaaaacgga

SEQ ID NO: 433879 - DNA, 2469 bp, Homo sapiens
catgagtcagaatccccgtggtgcccatggcctccctgcctttcttttttctcaggctgtgtttatttatagtgccattccggtaccttccgaagctatctgtctgattcttttagggatcaattgcaaagagaccttgctattgggcagctttttagtcatttaatgcaaaatcgccacactgctttgcaggtcaggttttaatgatctggaatcgatccaagctaagtggcttttgatcttgctgcagagtgaagatgccccacagaagccaggagccgctgggcaacatgctccttattagagctgatggcttgattcttgctgcattttttagtctgtttcagagtgatttttcctttgtgtttgagcatgtgtggttttttttctcctaggtaattttgagtgtggaaatccagagaatctaaaaagcaaatgcattcctgttatggaagcccaagaatatatagccaatgtgaccagcagctcctccgccaagtttgaagccgcactgacctggatactgagcagtaacaaggacgtgggcatctggttgaaaggagaagaccagtctgaattggtgacgactgtggacaaggtggtctgcctggaatctgcccacccccgcatgggtgttggctgccgcctgagccgggccttgctcactgctgtcaccaacgtgctcatcttcttctggtgcttggcttttttgtgggggctcctaattctcctaaaatatcggtggcgaaagttagaagaggaggaacaagccatgtatgagatggtgaagaagattatagacgtggtccaggaccattacgtggactgggagcaggacatggagcgctatccatatgtaggcatcctgcacgtgcgcgacagcttgatccctccacagagccggaggcgcatgaagcgtgtctgggaccgagctgtggagttcctggcctccaacgaatcccggatccagacggagtcccaccgcgttgcaggagaggacatgctggtgtggagatggactaagccctcttccttctctgactcagagcgataagccccgggcggggacttgttcctggtcagcctgtcccaggacagcccactccagaggcacaggagggtcaccaggcctgcggtgctgaattcacacttgccttgactttcagtctcgtcctgacacgattccaaaggtctgccatactcttcagaggagttcggctcgcaggaaaatgtgggcttcctttaaagggagggggagaagccagggtgatagcccagactctgccctgttgtgctggcagaaacggggagaagggttgagttttcatgaatagaaaacaagagcagcagctgtcaggcccagctgacaagcgtggggctggtgggctggggcatggccacgccagggagtctgtcacctgggaggtggggcaaggatggtgtttcgggtggcgggatggggagcagcttggtccatgtgccttcagggggttgttacctgagagctccagggtgaagggagaaagcctgtgctctggctggctgggcctctatcctgaagagggaaggtgctagaaattagaacaagtgactgtaggggggaccgtctagaaacaccaggcccagacacacggtccctcaggtcaggaggagtgagcagccggcacagcctcctgggaggatcccgaagtagggactggggctgagagcagagaggagggtcgggcagccccagggcgggcgggcccgcctcagtgttgcttctcacagaagctgcgactctagaccaggcctgcagccagaacgccgattccgggagcttgggagccctgcgtcagggcccagagcctcgcacttgctgtgtgcgaagatcgccttgctttactgtgaccacagccccgacgcggggctgtttaacaagaacttcagcgcagccggcgtttctgttaccccggccgcggctcttggcggcgggagaggcgcagtggctgcaggctgccccctgccggccacaagggagcagcgtccgcgccgccgcccaccggccctcccgccagctcctcagcctgctccctgggaggcaggctccagaagcaccccgacggggggccttattaagtgcgagaagcctctccagcgagtcttccccgtgtgtcctcatctgcggcaggcaggagagggggagcaaacaggaaattccacagctgcctccagaaacattaaccacccctctctagtcttactggtattttttgtttccttaataaagctccagtctccctcatttgagcaatactctcatttcctctgatgtctggatgatcggcagggcaggaatctgagcgctggccccgtggtgaggccatgttctcataatcaggctccagccagaaaaataagaaacaccgcaacaggcttcagtatcagggctgaaactgctggatgaataaactatttattaaaaacgga

SEQ ID NO: 433880 - DNA, 2934 bp, Homo sapiens
ggcggggggcggcgtcctggccatggccggcctgtcggacctggaactgcggcgggagctgcaggccctgggcttccagccaggacccatcaccgacaccacccgggatgtctaccgcaacaagctgcgccgcctgcggggcgaggcccggctgcgcgacgaggagcggctgcgggaggaggcccggccgcggggcgaggagcggttacgggaagaggcccggttacgcgaggatgcgccgctgcgcgcccggcccgccgcggcctctccgcgggcggagccctggctctcccagccggcctcgggctcggcctacgcgacccctggggcctacggtgatatccggccctccgcggcttcctgggtagggagccgcggcctcgcctatcctgcccgcccggcgcaactcaggcgccgcgcctcggtccggggcagctccgaggaggacgaggacgcccggacgcccgacagggccacgcagggcccgggtctcgcggcccgccgctggtgggcagcgtctcccgccccggcgcggctgccttcctccctcctcggtcccgacccgcgcccgggcctgcgggcgactcgagcgggccctgctggcgcggcgagggcccggcctgaggtggggcgccggctggagcgctggctctctcggcttctgctctgggccagcctagggctactgctcgtcttcctgggcatcctttgggtgaagatgggcaagccctcagcgccgcaggaggcggaggacaacatgaagttattgccagtggactgtgagagaaaaacagatgagttctgtcaggccaagcagaaggcagccttgctggagctgctgcatgaactctacaatttcctggccatccaagctggtaattttgagtgtggaaatccagagaatctaaaaagcaaatgcattcctgttatggaagcccaagaatatatagccaatgtgaccagcagctcctccgccaagtttgaagccgcactgacctggatactgagcagtaacaaggacgtgggcatctggttgaaaggagaagaccagtctgaattggtgacgactgtggacaaggtggtctgcctggaatctgcccacccccgcatgggtgttggctgccgcctgagccgggccttgctcactgctgtcaccaacgtgctcatcttcttctggtgcttggcttttttgtgggggctcctaattctcctaaaatatcggtggcgaaagttagaagaggaggaacaagccatgtatgagatggtgaagaagattatagacgtggtccaggaccattacgtggactgggagcaggacatggagcgctatccatatgtaggcatcctgcacgtgcgcgacagcttgatccctccacagagccggaggcgcatgaagcgtgtctgggaccgagctgtggagttcctggcctccaacgaatcccggatccagacggagtcccaccgcgttgcaggagaggacatgctggtgtggagatggactaagccctcttccttctctgactcagagcgataagccccgggcggggacttgttcctggtcagcctgtcccaggacagcccactccagaggcacaggagggtcaccaggcctgcggtgctgaattcacacttgccttgactttcagtctcgtcctgacacgattccaaaggtctgccatactcttcagaggagttcggctcgcaggaaaatgtgggcttcctttaaagggagggggagaagccagggtgatagcccagactctgccctgttgtgctggcagaaacggggagaagggttgagttttcatgaatagaaaacaagagcagcagctgtcaggcccagctgacaagcgtggggctggtgggctggggcatggccacgccagggagtctgtcacctgggaggtggggcaaggatggtgtttcgggtggcgggatggggagcagcttggtccatgtgccttcagggggttgttacctgagagctccagggtgaagggagaaagcctgtgctctggctggctgggcctctatcctgaagagggaaggtgctagaaattagaacaagtgactgtaggggggaccgtctagaaacaccaggcccagacacacggtccctcaggtcaggaggagtgagcagccggcacagcctcctgggaggatcccgaagtagggactggggctgagagcagagaggaggggcgggcgggcccgcctcagtgttgcttctcacagaagctgcgactctagaccaggcctgcagccagaacgccgattccgggagcttgggagccctgcgtcagggcccagagcctcgcacttgctgtgtgcgaagatcgccttgctttactgtgaccacagccccgacgcggggctgtttaacaagaacttcagcgcagccggcgtttctgttaccccggccgcggctcttggcggcgggagaggcgcagtggctgcaggctgccccctgccggccacaagggagcagcgtccgcgccgccgcccaccggccctcccgccagctcctcagcctgctccctgggaggcaggctccagaagcaccccgacggggggccttattaagtgcgagaagcctctccagcgagtcttccccgtgtgtcctcatctgcggcaggcaggagagggggagcaaacaggaaattccacagctgcctccagaaacattaaccacccctctctagtcttactggtattttttgtttccttaataaagctccagtctccctcatttgagcaatactctcatttcctctgatgtctggatgatcggcagggcaggaatctgagcgctggccccgtggtgaggccatgttctcataatcaggctccagccagaaaaataagaaacaccgcaacaggcttcagtatcagggctgaaactgctggatgaataaactatttattaaaaacgga

SEQ ID NO: 433881 - DNA, 1756 bp, Homo sapiens
ttgaggaatcatttctctatggcccaagacgttttctcctctgcagttgtcatgttagtacctgccagcttttcctctcttacataaattccatgccagagcctggaaatgtgtgccctttgtaggaggggcatccacaggctggctcacctcagcagtgccaggcagagccccgtccctctcattgcaggaggcgcatgaagcgtgtctgggaccgagctgtggagttcctggcctccaacgaatcccggatccagacggagtcccaccgcgttgcaggagaggacatgctggtgtggagatggactaagccctcttccttctctgactcagagcgataagccccgggcggggacttgttcctggtcagcctgtcccaggacagcccactccagaggcacaggagggtcaccaggcctgcggtgctgaattcacacttgccttgactttcagtctcgtcctgacacgattccaaaggtctgccatactcttcagaggagttcggctcgcaggaaaatgtgggcttcctttaaagggagggggagaagccagggtgatagcccagactctgccctgttgtgctggcagaaacggggagaagggttgagttttcatgaatagaaaacaagagcagcagctgtcaggcccagctgacaagcgtggggctggtgggctggggcatggccacgccagggagtctgtcacctgggaggtggggcaaggatggtgtttcgggtggcgggatggggagcagcttggtccatgtgccttcagggggttgttacctgagagctccagggtgaagggagaaagcctgtgctctggctggctgggcctctatcctgaagagggaaggtgctagaaattagaacaagtgactgtaggggggaccgtctagaaacaccaggcccagacacacggtccctcaggtcaggaggagtgagcagccggcacagcctcctgggaggatcccgaagtagggactggggctgagagcagagaggagggtcgggcagccccagggcgggcgggcccgcctcagtgttgcttctcacagaagctgcgactctagaccaggcctgcagccagaacgccgattccgggagcttgggagccctgcgtcagggcccagagcctcgcacttgctgtgtgcgaagatcgccttgctttactgtgaccacagccccgacgcggggctgtttaacaagaacttcagcgcagccggcgtttctgttaccccggccgcggctcttggcggcgggagaggcgcagtggctgcaggctgccccctgccggccacaagggagcagcgtccgcgccgccgcccaccggccctcccgccagctcctcagcctgctccctgggaggcaggctccagaagcaccccgacggggggccttattaagtgcgagaagcctctccagcgagtcttccccgtgtgtcctcatctgcggcaggcaggagagggggagcaaacaggaaattccacagctgcctccagaaacattaaccacccctctctagtcttactggtattttttgtttccttaataaagctccagtctccctcatttgagcaatactctcatttcctctgatgtctggatgatcggcagggcaggaatctgagcgctggccccgtggtgaggccatgttctcataatcaggctccagccagaaaaataagaaacaccgcaacaggcttcagtatcagggctgaaactgctggatgaataaactatttattaaaaacgga

SEQ ID NO: 433882 - DNA, 1310 bp, Homo sapiens
ggcggggggcggcgtcctggccatggccggcctgtcggacctggaactgcggcgggagctgcaggccctgggcttccagccaggacccatcaccgacaccacccgggatgtctaccgcaacaagctgcgccgcctgcggggcgaggcccggctgcgcgacgaggagcggctgcgggaggaggcccggccgcggggcgaggagcggttacgggaagaggcccggttacgcgaggatgcgccgctgcgcgcccggcccgccgcggcctctccgcgggcggagccctggctctcccagccggcctcgggctcggcctacgcgacccctggggcctacggtgatatccggccctccgcggcttcctgggtagggagccgcggcctcgcctatcctgcccgcccggcgcaactcaggcgccgcgcctcggtccggggcagctccgaggaggacgaggacgcccggacgcccgacagggccacgcagggcccgggtctcgcggcccgccgctggtgggcagcgtctcccgccccggcgcggctgccttcctccctcctcggtcccgacccgcgcccgggcctgcgggcgactcgagcgggccctgctggcgcggcgagggcccggcctgaggtggggcgccggctggagcgctggctctctcggcttctgctctgggccagcctagggctactgctcgtcttcctgggcatcctttgggtgaagatgggcaagccctcagcgccgcaggaggcggaggacaacatgaagttattgccagtggactgtgagagaaaaacagatgagttctgtcaggccaagcagaaggcagccttgctggagctgctgcatgaactctacaatttcctggccatccaagctggtaattttgagtgtggaaatccagagaatctaaaaagcaaatgcattcctgttatggaagcccaagaatatatagccttattaagtgcgagaagcctctccagcgagtcttccccgtgtgtcctcatctgcggcaggcaggagagggggagcaaacaggaaattccacagctgcctccagaaacattaaccacccctctctagtcttactggtattttttgtttccttaataaagctccagtctccctcatttgagcaatactctcatttcctctgatgtctggatgatcggcagggcaggaatctgagcgctggccccgtggtgaggccatgttctcataatcaggctccagccagaaaaataagaaacaccgcaacaggcttcagtatcagggctgaaactgctggatgaataaactatttattaaaaacgga

SEQ ID NO: 433883 - DNA, 1867 bp, Homo sapiens
ggcggggggcggcgtcctggccatggccggcctgtcggacctggaactgcggcgggagctgcaggccctgggcttccagccaggacccatcaccgacaccacccgggatgtctaccgcaacaagctgcgccgcctgcggggcgaggcccggctgcgcgacgaggagcggctgcgggaggaggcccggccgcggggcgaggagcggttacgggaagaggcccggttacgcgaggatgcgccgctgcgcgcccggcccgccgcggcctctccgcgggcggagccctggctctcccagccggcctcgggctcggcctacgcgacccctggggcctacggtgatatccggccctccgcggcttcctgggtagggagccgcggcctcgcctatcctgcccgcccggcgcaactcaggcgccgcgcctcggtccggggcagctccgaggaggacgaggacgcccggacgcccgacagggccacgcagggcccgggtctcgcggcccgccgctggtgggcagcgtctcccgccccggcgcggctgccttcctccctcctcggtcccgacccgcgcccgggcctgcgggcgactcgagcgggccctgctggcgcggcgagggcccggcctgaggtggggcgccggctggagcgctggctctctcggcttctgctctgggccagcctagggctactgctcgtcttcctgggcatcctttgggtgaagatgggcaagccctcagcgccgcaggaggcggaggacaacatgaagttattgccagtggactgtgagagaaaaacagatgagttctgtcaggccaagcagaaggcagccttgctggagctgctgcatgaactctacaatttcctggccatccaagctggtaattttgagtgtggaaatccagagaatctaaaaagcaaatgcattcctgttatggaagcccaagaatatatagccaatgtgaccagcagctcctccgccaagtttgaagccgcactgacctggatactgagcagtaacaaggacgtgggcatctggttgaaaggagaagaccagtctgaattggtgacgactgtggacaaggtggtctgcctggaatctgcccacccccgcatgggtgttggctgccgcctgagccgggccttgctcactgctgtcaccaacgtgctcatcttcttctggtgcttggcttttttgtgggggctcctaattctcctaaaatatcggtggcgaaagttagaagaggaggaacaagccatgtatgagatggtgaagaagattatagacgtggtccaggaccattacgtggactgggagcaggacatggagcgctatccatatgtaggcatcctgcacgtgcgcgacagcttgatccctccacagagccggaggcgcatgaagcgtgtctgggaccgagctgtggagttcctggcctccaacgaatcccggatccagacggagtcccaccgcgttgcaggagaggacatgctggtgtggagatggactaagccctcttccttctctgactcagagcgataagccccgggcggggacttgttcctggtcagcctgtcccaggacagcccactccagaggcacaggagggtcaccaggcctgcggtgctgaattcacacttgccttgactttcagtctcgtcctgacacgattccaaaggtctgtccctcatttgagcaatactctcatttcctctgatgtctggatgatcggcagggcaggaatctgagcgctggccccgtggtgaggccatgttctcataatcaggctccagccagaaaaataagaaacaccgcaacaggcttcagtatcagggctgaaactgctggatgaataaactatttattaaaaacgga

SEQ ID NO: 433884 - DNA, 3136 bp, Homo sapiens
attttggctaacctttgccctagacactctaccagatgttaatgcagtatcaagtgtaaattgtgtcaccctattctgttctacccttttccctgctgccgaaatatcttgctctcctctacctcatccccaaagagcctataaattcagagtatccaaccttttcatggattcactcactgttgttcagtaatacaacttccatattttaaataaatcataaaagatttttgccttctatcaaagtaggaaactttatatttatacatgatacagaaattgaactatttctatcgttcagaatttagcatataacaggattttaaagtgattgaattgccatcctaacttggatttgtattaggttatgaatgaatactgttgttagtccaagctatttgaatgtaaagttaaaattctccagcaatccagaatgacttgtaacccttcagtggaatgggaaatttctggtatgcaaatagggtggtgttccagacatttgttttattggtggtgtttgggccttgaaacacatttctaatagaatgacatatggcaaagggtatttagatggtcctatgggatcacagaagcccatatgatttaaaatatagataaaataacacaaaattgggtacataagggtttaaccaggctttcctgggttagactaagcctctaacctctgttcctatcctgttcttatgggaggaaaaaaaatgttccatgggatgaaaagaaaatgcattgactttgtagtctttattctcctagccgcacttcgggtatatccagaaggaagaggaaatgcaaagaggaagaagatgtaatagttcttctctccagctaggtgcacttgaggttgttcataaatgtaaaattatgtcaggtttctaacatgggacactgcacacagttgtctgacctgatgaaccatcccatttgaaagtatagattattattatttcttgtagtatttggttgttttccatctcattcatgaacaactcaacctgatagtagtatccaataaatgcctttcagggctcaggaatgaattgacatcctagttaagaaatgagacttaataatggagactgaggcggtttgtattaaattatatgccatgaagtgttcattttagctttaacctaattatgactgtaccaccatgaagtacagaatgaaaaattatatatatgggggggaaacagaatgaatatctgattcttttgaatgcttgtggaaatctttgagatcgtgcagggcataccacaaaatagcctttagaacagatacccaattttacagttcataggacaacatcaaacattagtaagtctaaataagatgaatagaatttttgttatgtaaattttgctagaacagtctattttcttgcacccctcaagttaacctcttaaaaaaatgaatgtataatttctaccgaaagaatatcagagagaatctctctggcctatagtgttaaaatattgttcacaaatcctgattagttaagtgcatacattatgaaacttacagaataaaacttattatacatctctttcttaaattaatatctttacacattttcaactggctccccaagtctgataaggaaggattaaaagaaaaaagaaatgtattagttgggtggccaaggagtttcctttgtaatgttgagagacttccgctttctgaatttcgctggttctctaaggtaaaagagttaaatagtacccttgttcaccaaggaaagtgatccaaactatatatctagtgcagatatttcctttgcattatttagtcttctctggagagaaaatacagtttccccttcctctttctcttcacatttactcttttcaacccaaaataagagacatagaaagcaaaccacagccagtttggcatcttctcagtgctactagtataggcacatacacatacacagtctcagcaaggttataaagaaccctgtcaggtccacttgcaacatggccttgctacttggattagctcctttaagcctgaaaataactttcctggtcatggaagaactggacgcatcttttaacttatgaaatagaagttgaacttgaaaactctttttaaaaaatcctggttttgcaggacagctacataatgaatgtatatattaagactgtagctgaattgcacatgaaatcagattgccaacttcttgactttcaatgttagacatttatccttaagttgtgagcgatatatgtagcatgctgtgaaatgtctgttatagctctttaattcatcagtattaatacagaattatcatttgcgtttcttggtactttttattcaatgtaatcagaagctgtgatgttttgcctttgtagtcctgtgctttgttactgtaatttttttttttttttacgaagcacgtgactggactaatgtaaggcagatgacgtgatctttaagactgctatatatatcagtctcttactctataaggttttaaattagaataagcttttatcaaatagataattgatgcaatttaggattcacgcaagtttcagtgtcaaatggcggtcttatagtttcaattctgaaaatagcaaacttaataaacagccactttaaacttgttctggcaaaccagaccctgctgtagatatagtctaaggtagttaaccatataagccttttcaactcttaatgccctccacatgaatcagcagttaagaaggttctagaacccatgaaagcttttgtatgtattactaggttttgtttttcttatgtttgctgattttacagttctgactaaagctgacctaaatggatcagtttatgtgtaatattctagtgctttaatgactctttttttctttggagggagggtaacattatttggacagatgcagaaggaactgttagtgagtcaagacaaacacatctgaaataaaggaactgtgtattaacatgttaacaattcataactgcactttttatgacattttgaaaatctatttataggtacagaacaatgggttttgttaaactgtatcacatttatacttgcagaaatttatttcattgttattagtaggaattttattggttcaataaaattggcaaaactgaacaccaa

SEQ ID NO: 433885 - DNA, 3082 bp, Homo sapiens
attttggctaacctttgccctagacactctaccagatgttaatgcagtatcaagtgtaaattgtgtcaccctattctgttctacccttttccctgctgccgaaatatcttgctctcctctacctcatccccaaagagcctataaattcagagtatccaaccttttcatggattcactcactgttgttcagtaatacaacttccatattttaaataaatcataaaagatttttgccttctatcaaagtaggaaactttatatttatacatgatacagaaattgaactatttctatcgttcagaatttagcatataacaggattttaaagtgattgaattgccatcctaacttggatttgtattaggttatgaatgaatactgttgttagtccaagctatttgaatgtaaagttaaaattctccagcaatccagaatgacttgtaacccttcagtggaatgggaaatttctggtatgcaaatagggtggtgttccagacatttgttttattggtggtgtttgggccttgaaacacatttctaatagaatgacatatggcaaagggtatttagatggtcctatgggatcacagaagcccatatgatttaaaatatagataaaataacacaaaattgggtacataagggtttaaccaggctttcctgggttagactaagcctctaacctctgttcctatcctgttcttatgggaggaaaaaaaatgttccatgggatgaaaagaaaatgcattgactttgtagtctttattctcctagccgcacttcgggtatatccagaaggaagaggaaatgcaaagaggaagaagatgtaatagttcttctctccagctaggtgcacttgaggttgttcataaatgtaaaattatgtcaggtttctaacatgggacactgcacacagttgtctgacctgatgaaccatcccatttgaaagtatagattattattatttcttgtagtatttggttgttttccatctcattcatgaacaactcaacctgatagtagtatccaataaatgcctttcagggctcaggaatgaattgacatcctagttaagaaatgagacttaataatggagactgaggcggtttgtattaaattatatgccatgaagtgttcattttagctttaacctaattatgactgtaccaccatgaagtacagaatgaaaaattatatatatgggggggaaacagaatgaatatctgattcttttgaatgcttgtggaaatctttgagatcgtgcagggcataccacaaaatagcctttagaacagatacccaattttacagttcataggacaacatcaaacattagtaagtctaaataagatgaatagaatttttgttatgtaaattttgctagaacagtctattttcttgcacccctcaagttaacctcttaaaaaaatgaatgtataatttctaccgaaagaatatcagagagaatctctctggcctatagtgttaaaatattgttcacaaatcctgattagttaagtgcatacattatgaaacttacagaataaaacttattatacatctctttcttaaattaatatctttacacattttcaactggctccccaagtctgataaggaaggattaaaagaaaaaagaaatgtattagttgggtggccaaggagtttcctttgtaatgttgagagacttccgctttctgaatttcgctggttctctaaggtaaaagagttaaatagtacccttgttcaccaaggaaagtgatccaaactatatatctagtgcagatatttcctttgcattatttagtcttctctggagagaaaatacagtttccccttcctctttctcttcacatttactcttttcaacccaaaataagagacatagaaagcaaaccacagccagtttggcatcttctcagtgctactagtataggcacatacacatacacagtctcagcaaggttataaagaaccctgtcaggtccacttgcaacatggccttgctacttggattagctcctttaagcctgaaaataactttcctggtcatggaagaactggacgcatcttttaacttatgaaatagaagttgaacttgaaaactctttttaaactgaattgcacatgaaatcagattgccaacttcttgactttcaatgttagacatttatccttaagttgtgagcgatatatgtagcatgctgtgaaatgtctgttatagctctttaattcatcagtattaatacagaattatcatttgcgtttcttggtactttttattcaatgtaatcagaagctgtgatgttttgcctttgtagtcctgtgctttgttactgtaatttttttttttttttacgaagcacgtgactggactaatgtaaggcagatgacgtgatctttaagactgctatatatatcagtctcttactctataaggttttaaattagaataagcttttatcaaatagataattgatgcaatttaggattcacgcaagtttcagtgtcaaatggcggtcttatagtttcaattctgaaaatagcaaacttaataaacagccactttaaacttgttctggcaaaccagaccctgctgtagatatagtctaaggtagttaaccatataagccttttcaactcttaatgccctccacatgaatcagcagttaagaaggttctagaacccatgaaagcttttgtatgtattactaggttttgtttttcttatgtttgctgattttacagttctgactaaagctgacctaaatggatcagtttatgtgtaatattctagtgctttaatgactctttttttctttggagggagggtaacattatttggacagatgcagaaggaactgttagtgagtcaagacaaacacatctgaaataaaggaactgtgtattaacatgttaacaattcataactgcactttttatgacattttgaaaatctatttataggtacagaacaatgggttttgttaaactgtatcacatttatacttgcagaaatttatttcattgttattagtaggaattttattggttcaataaaattggcaaaactgaacaccaa

SEQ ID NO: 433886 - DNA, 3083 bp, Homo sapiens
attttggctaacctttgccctagacactctaccagatgttaatgcagtatcaagtgtaaattgtgtcaccctattctgttctacccttttccctgctgccgaaatatcttgctctcctctacctcatccccaaagagcctataaattcagagtatccaaccttttcatggattcactcactgttgttcagtaatacaacttccatattttaaataaatcataaaagatttttgccttctatcaaagtaggaaactttatatttatacatgatacagaaattgaactatttctatcgttcagaatttagcatataacaggattttaaagtgattgaattgccatcctaacttggatttgtattaggttatgaatgaatactgttgttagtccaagctatttgaatgtaaagttaaaattctccagcaatccagaatgacttgtaacccttcagtggaatgggaaatttctggtatgcaaatagggtggtgttccagacatttgttttattggtggtgtttgggccttgaaacacatttctaatagaatgacatatggcaaagggtatttagatggtcctatgggatcacagaagcccatatgatttaaaatatagataaaataacacaaaattgggtacataagggtttaaccaggctttcctgggttagactaagcctctaacctctgttcctatcctgttcttatgggaggaaaaaaaatgttccatgggatgaaaagaaaatgcattgactttgtagtctttattctcctagccgcacttcgggtatatccagaaggaagaggaaatgcaaagaggaagaagatgtaatagttcttctctccagctaggtgcacttgaggttgttcataaatgtaaaattatgtcaggtttctaacatgggacactgcacacagttgtctgacctgatgaaccatcccatttgaaagtatagattattattatttcttgtagtatttggttgttttccatctcattcatgaacaactcaacctgatagtagtatccaataaatgcctttcagggctcaggaatgaattgacatcctagttaagaaatgagacttaataatggagactgaggcggtttgtattaaattatatgccatgaagtgttcattttagctttaacctaattatgactgtaccaccatgaagtacagaatgaaaaattatatatatgggggggaaacagaatgaatatctgattcttttgaatgcttgtggaaatctttgagatcgtgcagggcataccacaaaatagcctttagaacagatacccaattttacagttcataggacaacatcaaacattagtaagtctaaataagatgaatagaatttttgttatgtaaattttgctagaacagtctattttcttgcacccctcaagttaacctcttaaaaaaatgaatgtataatttctaccgaaagaatatcagagagaatctctctggcctatagtgttaaaatattgttcacaaatcctgattagttaagtgcatacattatgaaacttacagaataaaacttattatacatctctttcttaaattaatatctttacacattttcaactggctccccaagtctgataaggaaggattaaaagaaaaaagaaatgtattagttgggtggccaaggagtttcctttgtaatgttgagagacttccgctttctgaatttcgctggttctctaaggtaaaagagttaaatagtacccttgttcaccaaggaaagtgatccaaactatatatctagtgcagatatttcctttgcattatttagtcttctctggagagaaaatacagtttccccttcctctttctcttcacatttactcttttcaacccaaaataagagacatagaaagcaaaccacagccagtttggcatcttctcagtgctactagtataggcacatacacatacacagtctcagcaaggttataaagaaccctgtcaggtccacttgcaacatggccttgctacttggattagctcctttaagcctgaaaataactttcctggtcatggaagaactggacgcatcttttaacttatgaaatagaagttgaacttgaaaactctttttaaaaaatcctggttttgcaggacagctacataatgaatgtatatattaagactgtagctgaattgcacatgaaatcagattgccaacttcttgactttcaatgttagacatttatccttaagttgtgagcgatatatgtagcatgctgtgaaatgtctgttatagctctttaattcatcagtattaatacagaattatcatttgcgtttcttggtactttttattcaatgtaatcagaagctgtgatgttttgcctttgtagtcctgtgctttgttactgtaatttttttttttttttacgaagcacgtgactggactaatgtaaggcagatgacgtgatctttaagactgctatatatatcagtctcttactctataaggttttaaattagaataagcttttatcaaatagataattgatgcaatttaggattcacgcaagtttcagtgtcaaatggcggtcttatagtttcaattctgcctgctgtagatatagtctaaggtagttaaccatataagccttttcaactcttaatgccctccacatgaatcagcagttaagaaggttctagaacccatgaaagcttttgtatgtattactaggttttgtttttcttatgtttgctgattttacagttctgactaaagctgacctaaatggatcagtttatgtgtaatattctagtgctttaatgactctttttttctttggagggagggtaacattatttggacagatgcagaaggaactgttagtgagtcaagacaaacacatctgaaataaaggaactgtgtattaacatgttaacaattcataactgcactttttatgacattttgaaaatctatttataggtacagaacaatgggttttgttaaactgtatcacatttatacttgcagaaatttatttcattgttattagtaggaattttattggttcaataaaattggcaaaactgaacaccaa

SEQ ID NO: 433887 - DNA, 3082 bp, Homo sapiens
attttggctaacctttgccctagacactctaccagatgttaatgcagtatcaagtgtaaattgtgtcaccctattctgttctacccttttccctgctgccgaaatatcttgctctcctctacctcatccccaaagagcctataaattcagagtatccaaccttttcatggattcactcactgttgttcagtaatacaacttccatattttaaataaatcataaaagatttttgccttctatcaaagtaggaaactttatatttatacatgatacagaaattgaactatttctatcgttcagaatttagcatataacaggattttaaagtgattgaattgccatcctaacttggatttgtattaggttatgaatgaatactgttgttagtccaagctatttgaatgtaaagttaaaattctccagcaatccagaatgacttgtaacccttcagtggaatgggaaatttctggtatgcaaatagggtggtgttccagacatttgttttattggtggtgtttgggccttgaaacacatttctaatagaatgacatatggcaaagggtatttagatggtcctatgggatcacagaagcccatatgatttaaaatatagataaaataacacaaaattgggtacataagggtttaaccaggctttcctgggttagactaagcctctaacctctgttcctatcctgttcttatgggaggaaaaaaaatgttccatgggatgaaaagaaaatgcattgactttgtagtctttattctcctagccgcacttcgggtatatccagaaggaagaggaaatgcaaagaggaagaagatgtaatagttcttctctccagctaggtgcacttgaggttgttcataaatgtaaaattatgtcaggtttctaacatgggacactgcacacagttgtctgacctgatgaaccatcccatttgaaagtatagattattattatttcttgtagtatttggttgttttccatctcattcatgaacaactcaacctgatagtagtatccaataaatgcctttcagggctcaggaatgaattgacatcctagttaagaaatgagacttaataatggagactgaggcggtttgtattaaattatatgccatgaagtgttcattttagctttaacctaattatgactgtaccaccatgaagtacagaatgaaaaattatatatatgggggggaaacagaatgaatatctgattcttttgaatgcttgtggaaatctttgagatcgtgcagggcataccacaaaatagcctttagaacagatacccaattttacagttcataggacaacatcaaacattagtaagtctaaataagatgaatagaatttttgttatgtaaattttgctagaacagtctattttcttgcacccctcaagttaacctcttaaaaaaatgaatgtataatttctaccgaaagaatatcagagagaatctctctggcctatagtgttaaaatattgttcacaaatcctgattagttaagtgcatacattatgaaacttacagaataaaacttattatacatctctttcttaaattaatatctttacacattttcaactggctccccaagtctgataaggaaggattaaaagaaaaaagaaatgtattagttgggtggccaaggagtttcctttgtaatgttgagagacttccgctttctgaatttcgctggttctctaaggtaaaagagttaaatagtacccttgttcaccaaggaaagtgatccaaactatatatctagtgcagatatttcctttgcattatttagtcttctctggagagaaaatacagtttccccttcctctttctcttcacatttactcttttcaacccaaaataagagacatagaaagcaaaccacagccagtttggcatcttctcagtgctactagtataggcacatacacatacacagtctcagcaaggttataaagaaccctgtcaggtccacttgcaacatggccttgctacttggattagctcctttaagcctgaaaataactttcctggtcatggaagaactggacgcatcttttaacttatgaaatagaagttgaacttgaaaactctttttaaaaaatcctggttttgcaggacagctacataatgaatgtatatattaagactgtagctgaattgcacatgaaatcagattgccaacttcttgactttcaatgttagacatttatccttaagttgtgagcgatatatgtagcatgctgtgaaatgtctgttatagctctttaattcatcagtattaatacagaattatcatttgcgtttcttggtactttttattcaatgtaatcagaagctgtgatgttttgcctttgtagtcctgtgctttgttactgtaatttttttttttttttacgaagcacgtgactggactaatgtaaggcagatgacgtgatctttaagactgctatatatatcagtctcttactctataaggttttaaattagaataagcttttatcaaatagataattgatgcaatttaggattcacgcaagtttcagtgtcaaatggcggtcttatagtttcaattctgaaaatagcaaacttaataaacagccactttcatataagccttttcaactcttaatgccctccacatgaatcagcagttaagaaggttctagaacccatgaaagcttttgtatgtattactaggttttgtttttcttatgtttgctgattttacagttctgactaaagctgacctaaatggatcagtttatgtgtaatattctagtgctttaatgactctttttttctttggagggagggtaacattatttggacagatgcagaaggaactgttagtgagtcaagacaaacacatctgaaataaaggaactgtgtattaacatgttaacaattcataactgcactttttatgacattttgaaaatctatttataggtacagaacaatgggttttgttaaactgtatcacatttatacttgcagaaatttatttcattgttattagtaggaattttattggttcaataaaattggcaaaactgaacaccaa

SEQ ID NO: 433888 - DNA, 3560 bp, Homo sapiens
attttggctaacctttgccctagacactctaccagatgttaatgcagtatcaagtgtaaattgtgtcaccctattctgttctacccttttccctgctgccgaaatatcttgctctcctctacctcatccccaaagagcctataaattcagagtatccaaccttttcatggattcactcactgttgttcagtaatacaacttccatattttaaataaatcataaaagatttttgccttctatcaaagtaggaaactttatatttatacatgatacagaaattgaactatttctatcgttcagaatttagcatataacaggattttaaagtgattgaattgccatcctaacttggatttgtattaggttatgaatgaatactgttgttagtccaagctatttgaatgtaaagttaaaattctccagcaatccagaatgacttgtaacccttcagtggaatgggaaatttctggtatgcaaatagggtggtgttccagacatttgttttattggtggtgtttgggccttgaaacacatttctaatagaatgacatatggcaaagggtatttagatggtcctatgggatcacagaagcccatatgatttaaaatatagataaaataacacaaaattgggtacataagggtttaaccaggctttcctgggttagactaagcctctaacctctgttcctatcctgttcttatgggaggaaaaaaaatgttccatgggatgaaaagaaaatgcattgactttgtagtctttattctcctagccgcacttcgggtatatccagaaggaagaggaaatgcaaagaggaagaagatgtaatagttcttctctccagctaggtgcacttgaggttgttcataaatgtaaaattatgtcaggtttctaacatgggacactgcacacagttgtctgacctgatgaaccatcccatttgaaagtatagattattattatttcttgtagtatttggttgttttccatctcattcatgaacaactcaacctgatagtagtatccaataaatgcctttcagggctcaggaatgaattgacatcctagttaagaaatgagacttaataatggagactgaggcggtttgtattaaattatatgccatgaagtgttcattttagctttaacctaattatgactgtaccaccatgaagtacagaatgaaaaattatatatatgggggggaaacagaatgaatatctgattcttttgaatgcttgtggaaatctttgagatcgtgcagggcataccacaaaatagcctttagaacagatacccaattttacagttcataggacaacatcaaacattagtaagtctaaataagatgaatagaatttttgttatgtaaattttgctagaacagtctattttcttgcacccctcaagttaacctcttaaaaaaatgaatgtataatttctaccgaaagaatatcagagagaatctctctggcctatagtgttaaaatattgttcacaaatcctgattagttaagtgcatacattatgaaacttacagaataaaacttattatacatctctttcttaaattaatatctttacacattttcaactggctccccaagtctgataaggaaggattaaaagaaaaaagaaatgtattagttgggtggccaaggagtttcctttgtaatgttgagagacttccgctttctgaatttcgctggttctctaaggtaaaagagttaaatagtacccttgttcaccaaggaaagtgatccaaactatatatctagtgcagatatttcctttgcattatttagtcttctctggagagaaaatacagtttccccttcctctttctcttcacatttactcttttcaacccaaaataagagacatagaaagcaaaccacagccagtttggcatcttctcagtgctactagtataggcacatacacatacacagtctcagcaaggttataaagaaccctgtcaggtccacttgcaacatggccttgctacttggattagctcctttaagcctgaaaataactttcctggtcatggaagaactggacgcatcttttaacttatgaaatagaagttgaacttgaaaactctttttaaaaaatcctggttttgcaggacagctacataatgaatgtatatattaagactgtagctgaattgcacatgaaatcagattgccaacttcttgactttcaatgttagacatttatccttaagttgtgagcgatatatgtagcatgctgtgaaatgtctgttatagctctttaattcatcagtattaatacagaattatcatttgcgtttcttggtactttttattcaatgtaatcagaagctgtgatgttttgcctttgtagtcctgtgctttgttactgtaatttttttttttttttacgaagcacgtgactggactaatgtaaggcagatgacgtgatctttaagactgctatatatatcagtctcttactctataaggttttaaattagaataagcttttatcaaatagataattgatgcaatttaggattcacgcaagtttcagtgtcaaatggcggtcttatagtttcaattctgaaaatagcaaacttaataaacagccactttaaacttgttctggcaaaccagaccctgctgtagatatagtctaaggtagttaaccatataagccttttcaactcttaatgccctccacatgaatcagcagttaagaaggttctagaacccatgaaagcttttgtatgtattactaggttttgtttttcttatgtttgctgattttacagttctgactaaagctgacctaaatggatcagtttatgtgtaatattctagtgctttaatgactctttttttctttggagggagggtaacattatttggacagatgcagaaggaactgttagtgagtcaagacaaacacatctgaaataaaggaactgtgtattaacatgttaacaattcataactgcactttttatgacattttgaaaatctatttataggtacagaacaatgggttttgttaaactgtatcacatttatacttgcagaaatttatttcattgttattagtaggaattttattggttcaataaaattggcaaaactgaacaccaaaaaaaaaaaaaaaaaaaaaaaaaaaaaaaaaaaaaaaaaaaacagaacacagcaaaaaaaaacaacaacagccacgagaggcgacacaaaaagaagcagagaaacacgccgcaaacgctaagggggcagcccacaaaagaacagatagcaacaacgagcaacagagagcacaaaggcaacacgagcggcagggaagaacaatttcggaaggagaagcataagaacagggaatccacaaatcaagtgggacaacgccagcaccaaaacagataacgaaacccaccgatactatatattatagacacataaacggaaatcaaagcaaagacaaggatgagacaacaaacgagaaccaccaaacgaaaaaaacgagagaaaaaagagcgagacagcaacaaagagcaccaagcacatgacaaggcaa

SEQ ID NO: 433889 - DNA, 3166 bp, Homo sapiens
attttggctaacctttgccctagacactctaccagatgttaatgcagtatcaagtgtaaattgtgtcaccctattctgttctacccttttccctgctgccgaaatatcttgctctcctctacctcatccccaaagagcctataaattcagagtatccaaccttttcatggattcactcactgttgttcagtaatacaacttccatattttaaataaatcataaaagatttttgccttctatcaaagtaggaaactttatatttatacatgatacagaaattgaactatttctatcgttcagaatttagcatataacaggattttaaagtgattgaattgccatcctaacttggatttgtattaggttatgaatgaatactgttgttagtccaagctatttgaatgtaaagttaaaattctccagcaatccagaatgacttgtaacccttcagtggaatgggaaatttctggtatgcaaatagggtggtgttccagacatttgttttattggtggtgtttgggccttgaaacacatttctaatagaatgacatatggcaaagggtatttagatggtcctatgggatcacagaagcccatatgatttaaaatatagataaaataacacaaaattgggtacataagggtttaaccaggctttcctgggttagactaagcctctaacctctgttcctatcctgttcttatgggaggaaaaaaaatgttccatgggatgaaaagaaaatgcattgactttgtagtctttattctcctagccgcacttcgggtatatccagaaggaagaggaaatgcaaagaggaagaagatgtaatagttcttctctccagctaggtgcacttgaggttgttcataaatgtaaaattatgtcaggtttctaacatgggacactgcacacagttgtctgacctgatgaaccatcccatttgaaagtatagattattattatttcttgtagtatttggttgttttccatctcattcatgaacaactcaacctgatagtagtatccaataaatgcctttcagggctcaggaatgaattgacatcctagttaagaaatgagacttaataatggagactgaggcggtttgtattaaattatatgccatgaagtgttcattttagctttaacctaattatgactgtaccaccatgaagtacagaatgaaaaattatatatatgggggggaaacagaatgaatatctgattcttttgaatgcttgtggaaatctttgagatcgtgcagggcataccacaaaatagcctttagaacagatacccaattttacagttcataggacaacatcaaacattagtaagtctaaataagatgaatagaatttttgttatgtaaattttgctagaacagtctattttcttgcacccctcaagttaacctcttaaaaaaatgaatgtataatttctaccgaaagaatatcagagagaatctctctggcctatagtgttaaaatattgttcacaaatcctgattagttaagtgcatacattatgaaacttacagaataaaacttattatacatctctttcttaaattaatatctttacacattttcaactggctccccaagtctgataaggaaggattaaaagaaaaaagaaatgtattagttgggtggccaaggagtttcctttgtaatgttgagagacttccgctttctgaatttcgctggttctctaaggtaaaagagttaaatagtacccttgttcaccaaggaaagtgatccaaactatatatctagtgcagatatttcctttgcattatttagtcttctctggagagaaaatacagtttccccttcctctttctcttcacatttactcttttcaacccaaaataagagacatagaaagcaaaccacagccagtttggcatcttctcagtgctactagtataggcacatacacatacacagtctcagcaaggttataaagaaccctgtcaggtccacttgcaacatggccttgctacttggattagctcctttaagcctgaaaataactttcctggtcatggaagaactggacgcatcttttaacttatgaaatagaagttgaacttgaaaactctttttaaaaaatcctggttttgcaggacagctacataatgaatgtatatattaagactgtagctgaattgcacatgaaatcagattgccaacttcttgactttcaatgttagacatttatccttaagttgtgagcgatatatgtagcatgctgtgaaatgtctgttatagctctttaattcatcagtattaatacagaattatcatttgcgtttcttggtactttttattcaatgtaatcagaagctgtgatgttttgcctttgtagtcctgtgctttgttactgtaatttttttttttttttacgaagcacgtgactggactaatgtaaggcagatgacgtgatctttaagactgctatatatatcagtctcttactctataaggttttaaattagaataagcttttatcaaatagataattgatgcaatttaggattcacgcaagtttcagtgtcaaatggcggtcttatagtttcaattctgaaaatagcaaacttaataaacagccactttaaacttgttctggcaaaccagaccctgctgtagatatagtctaaggtagttaaccatataagccttttcaactcttaatgccctccacatgaatcagcagttaagaaggttctagaacccatgaaagcttttgtatgtattactaggttttgtttttcttatgtttgctgattttacagttctgactaaagctgacctaaatggatcagtttatgtgtaatattctagtgctttaatgactctttttttctttggagggagggtaacattatttggacagatgcagaaggaactgttagtgagtcaagacaaacacatctgaaataaaggaactgtgtattaacatgttaacaattcataactgcactttttatgacattttgaaaatctatttataggtacagaacaatgggttttgttaaactgtatcacatttatacttgcagaaatttatttcattgttattagtaggaattttattggttcaataaaattggcaaaactgaacaccaatcatttgcctactttgtttatactggagta

SEQ ID NO: 433890 - DNA, 442 bp, Homo sapiens
actttcaggctctgatcgcggccgcagtttttccttttttcttctgccgtcgccttctctgcctcttctcatcctttctcgctctgctgctctgcagtgtgacgagtccgaatcctcttcccacccagcccgcgcctttcttcttttgcctgcgctgttctatttctccttcggccgccgccgccactgctgcacacagctggtgtcggtgccgcgcttttacccccaagtcgttcccgcagcctatggcccaggccgccttgggtatttctgctcaaggtaaccacatccctctttaaaaattccgccgaaaaagagaagacgctttacccgactctttgggccgttatctcacgtgagtaccgagccgaggagcgcgggaggggccaggacgcggggctggccttggggggcggctggggggctccggctgggccccgcc

SEQ ID NO: 433891 - DNA, 2658 bp, Homo sapiens
actttcaggctctgatcgcggccgcagtttttccttttttcttctgccgtcgccttctctgcctcttctcatcctttctcgctctgctgctctgcagtgtgacgagtccgaatcctcttcccacccagcccgcgcctttcttcttttgcctgcgctgttctatttctccttcggccgccgccgccactgctgcacacagctggtgtcggtgccgcgcttttacccccaagtcgttcccgcagcctatggcccaggccgccttgggtatttctgctcaaggtaaccacatccctctttaaaaattccgccgaaaaagagaagacgctttacccgactctttgggccgttatctcacggcgaactttctgaccaagtatacaactacccagagggcctaggagaagtgctgtatagagagcagttcgacttcaacgctgagccaccttgggaacctagctgatgataggggggttccatctcccaacttgtccatggaggtcttcacttcagaaatccaagactcatattcatccagcttggtgtcaagtgggctgttgctgccagaattatcttgtgattatttgagagatgtatcagtttcttctgaagtacaatcaactgtagaagcctttgtagcagtttgttgcatattctaaggacccagacataggcttggtggcccgtctcttgtctttcctggtttatgactttcggctttgtggaatacggctgagatgaaaggatttattgatgatgcaaactactccgttggcctgttggatgaaggaacaaaccttggaaatgttattgataactatgtttatgaacataccctgacagggaaaaatgcattttttgtgggagatcttggaaagattgtgaagaaacacagtcaatggcagaatgtagtggctcagataaagccattctacacagtgaagtgcaactctgctccagctgtacttgagattttggcagctcttggaaccggatttgcttgttccagtaaaaatgaaatggctttagtgcaagagttgggtgtacctccagaaaacattatttacataagtccttgcaagcaagtgtctcagataaagtatgcagcaaaagttggagtgaatatcctgacatgtgacaatgaaattgaattgaagaaaattgcacgtaatcacccaaatgccaaggtcttactacatattgcaacagaagataatattggaggtgaagagggtaacatgaagtttggcactaccctgaagaactgtaggcatctcttggaatgtgctaaggaacttgatgtccaaataattggggttaaatttcatgtttcgagtgcttgcaaagaatctcaagtatatgtacatgctctatctgatgctcgatgtgtgtttgacatggctggagaaattggctttacgatgaacatgttagacattggtggaggattcacgggaactgaatttcaattggaagaggttaatcatgttatcagccctctgttggatatctactttcctgaaggatctggtgttaagataatttcagaacccggaagctactatgtgtcttctgcatttacactcgcagttaatatcatagcaaagaaagttgttgaaaatgataaatttccctctggagtagaaaaaaccggaagtgatgaaccagccttcatgtattatatgaatgatggtgtttatggttcttttgcaagtaaactgtctgaggacttaaataccattccagaggttcacaagaaatacaaggaagatgagcctctgtttacaagcagcctttggggtccatcctgtgatgagcttgatcaaattgtggaaagctgtcttcttcctgagctgaatgtgggagattggcttatctttgataacatgggagcagattctttccatgaaccatctgcttttaatgattttcagaggccagccatttattacatgatgtcattcagtgattggtatgagatgcaagatgctggaattacttcagactcaatgatgaagaacttcttctttgtgccttcttgcattcagctgagccaagaagacagcttttccgctgaagcttaaacaggcattaacgcttctttagatctgaagttgcaggttaagcttgtctggtcaacattccagtgtggaaaaataatttaaacaatcttattctcttaattcttttggcaacaaaaactattagtaatagctatttgggaccagacaaaatcagctttcatctataattcattggggataatgggagatttagataatgtatccagatttaaacctaccagtttgtcctaccccttaagcgtttaaaataaaatatgcaacaaaatggatgacttagtggagatggaagcccattaattgggttccccattaaatcgtttacatacaagaacacagtttttatactaaggatttgtgtttaaagtcttgtaaagttcatgtctttcacccagatatatcaaatgttagaagaccagtgtgacttcattagataacgtttagtgtatttagaatgtgtaaatttgtgctttgaactgtagtttaataaatgtaaaattgcatcatagtatttgttgacctaatgtaacccttgtatgattgcaataaaattttgtgtagattttactgttttttcagg

SEQ ID NO: 433892 - DNA, 425 bp, Homo sapiens
aggttgcatccacaaaacagtaacacagtgctatgcaaaaagaacattcagaggagaaaagaaccggtcctgaaataagatagcagaaattgaaagatcagtagaagagttggaagataaaattgaagaaatctcaaacgtggaacaaaaagacaagaaaattggagaaaacgataggagaaaatttaaaacaacaataaaaagaaccaggtcaggaaatccagcctccaggtaatgggtttcaacaagagagatcagagaaaaggaacagggattacaaagtaaggagtctgttataatattgtaatctcagttcaaaagttaactgcaaatataaaacccaatgatttctatatagtaaattgaactgtaaaggtaacttgtgtgtgattctgaatacatagataaatgtttttattcctcat

SEQ ID NO: 433893 - DNA, 362 bp, Homo sapiens
actttcaggctctgatcgcggccgcagtttttccttttttcttctgccgtcgccttctctgcctcttctcatcctttctcgctctgctgctctgcagtgtgacgagtccgaatcctcttcccacccagcccgcgcctttcttcttttgcctgcgctgctgctgaacggcggcacggtagggggcggcggagcggcggcggaggagtggggggcggcgagcagagacgatgtcggagccgagcccgagagcgccacgcaggccggggaggacgaagacgaggaggaggacgacgaggaggaggaagatgagagcagcagcagcgacgggtggtgaggaggagagtagcgccgagagcctggtg

SEQ ID NO: 433894 - DNA, 228 bp, Homo sapiens
  misc_feature (180)..(180): n is a, c, g, or t
  misc_feature (191)..(191): n is a, c, g, or t
  misc_feature (193)..(193): n is a, c, g, or t
  misc_feature (201)..(201): n is a, c, g, or t
  misc_feature (208)..(208): n is a, c, g, or t
  misc_feature (212)..(213): n is a, c, g, or t
  misc_feature (222)..(222): n is a, c, g, or t
actttcaggctctgatcgcggccgcagtttttccttttttcttctgccgtcgccttctctgcctcttctcatcctttctcgctctgctgctctgcagtgtgacgagtccgaatcctccccagcccattccttgctgtcaaacaaacaaaaacccttgcaaaaaaaaaaaaaaaaaaaaanaaacaaaaaananaaagaaanacaaaanaaannaaaaacaanaaaaaa

SEQ ID NO: 433895 - DNA, 4146 bp, Homo sapiens
actttcaggctctgatcgcggccgcagtttttccttttttcttctgccgtcgccttctctgcctcttctcatcctttctcgctctgctgctctgcagtgtgacgagtccgaatcctcttcccacccagcccgcgcctttcttcttttgcctgcgctgttctatttctccttcggccgccgccgccactgctgcacacagctggtgtcggtgccgcgcttttacccccaagtcgttcccgcagcctatggcccaggccgccttgggtatttctgctcaaggtaaccacatccctctttaaaaattccgccgaaaaagagaagacgctttacccgactctttgggccgttatctcacggcgaactttctgaccaagtatacaactacccagagggcctaggagaagtgctgtatagagagcagttcgacttcaacgctgagccaccttgggaacctagctgatgataggggggttccatctcccaacttgtccattttgttgcatattctaaggacccagacataggcttggtggcccgtctcttgtctttcctggtttatgactttcggctttgtggaatacggctgagatgaaaggatttattgatgatgcaaactactccgttggcctgttggatgaaggaacaaaccttggaaatgttattgataactatgtttatgaacataccctgacagggaaaaatgcattttttgtgggagatcttggaaagattgtgaagaaacacagtcaatggcagaatgtagtggctcagataaagccattctacacagtgaagtgcaactctgctccagctgtacttgagattttggcagctcttggaaccggatttgcttgttccagtaaaaatgaaatggctttagtgcaagagttgggtgtacctccagaaaacattatttacataagtccttgcaagcaagtgtctcagataaagtatgcagcaaaagttggagtgaatatcctgacatgtgacaatgaaattgaattgaagaaaattgcacgtaatcacccaaatgccaaggtcttactacatattgcaacagaagataatattggaggtgaagagggtaacatgaagtttggcactaccctgaagaactgtaggcatctcttggaatgtgctaaggaacttgatgtccaaataattggggttaaatttcatgtttcgagtgcttgcaaagaatctcaagtatatgtacatgctctatctgatgctcgatgtgtgtttgacatggctggagaaattggctttacgatgaacatgttagacattggtggaggattcacgggaactgaatttcaattggaagaggttaatcatgttatcagccctctgttggatatctactttcctgaaggatctggtgttaagataatttcagaacccggaagctactatgtgtcttctgcatttacactcgcagttaatatcatagcaaagaaagttgttgaaaatgataaatttccctctggagtagaaaaaaccggaagtgatgaaccagccttcatgtattatatgaatgatggtgtttatggttcttttgcaagtaaactgtctgaggacttaaataccattccagaggttcacaagaaatacaaggaagatgagcctctgtttacaagcagcctttggggtccatcctgtgatgagcttgatcaaattgtggaaagctgtcttcttcctgagctgaatgtgggagattggcttatctttgataacatgggagcagattctttccatgaaccatctgcttttaatgattttcagaggccagccatttattacatgatgtcattcagtgattggtatgagatgcaagatgctggaattacttcagactcaatgatgaagaacttcttctttgtgccttcttgcattcagctgagccaagaagacagcttttccgctgaagcttaaacaggcattaacgcttctttagatctgaagttgcaggttaagcttgtctggtcaacattccagtgtggaaaaataatttaaacaatcttattctcttaattcttttggcaacaaaaactattagtaatagctatttgggaccagacaaaatcagctttcatctataattcattggggataatgggagatttagataatgtatccagatttaaacctaccagtttgtcctaccccttaagcgtttaaaataaaatatgcaacaaaatggatgacttagtggagatggaagcccattaattgggttccccattaaatcgtttacatacaagaacacagtttttatactaaggatttgtgtttaaagtcttgtaaagttcatgtctttcacccagatatatcaaatgttagaagaccagtgtgacttcattagataacgtttagtgtatttagaatgtgtaaatttgtgctttgaactgtagtttaataaatgtaaaattgcatcatagtatttgttgacctaatgtaacccttgtatgattgcaataaaattttgtgtagattttactgttttttcaggctaaaactttgggaaaggggctagctagcaaaggtagttttgaaatagatgtgtatatggactgttttgaagggtttttttctttatagcccagttaagttttgtttggctcggtgcatttttcatttatttaattagtaatttaagtaaagtgtttggtaaatcattgtgaagttcagattcattatggagagttgatgtgcagtaagcatgatgtttaacaattttaacaccaaaaatgttaatcctgcataaatcaactgtaataataaataggtgtttctgtatagatagaatgcatagagtaccttagtaaatctttgaatcacaatcttttggctgaaatggaagattctgttaaatactttgaataaacttggggggagggaaataaaattgcagaaaactgcagagcactaaaacttaaagaagggctacatctttatccagaaacctgttgctcttttgcacggaatgtttaaattcagagttgggatgggggttggggtgaagcacacttattatcttcagttgcagtgatttcaaatttaggattttttgttgttggtttgaactgtccccttagtttcttgttatttccaatttgttctgcttagtcattacttttaattcttttcttactaaaattttatggtggttgggggaagggagttagcatcactaacctgacagttgttgccaggaatttgctttgtttactgctagtatattagaaatcctagatctcagaatcacaatagtaataaacaacaggggtcattttttcctaacttactctgtgttcaggtgtggaatttctgtctcccaagaggaaatgtgacttcactttggtgccaatggacagaaaattctacctgtgctacataggagaagtttggaatgcacttaatagctggtttttacaccttgatttcgaggtggaaagaaattgatcatgaatctctaataaatttaaatctcttaaaccagtaggtgcttaatattttttgatttgattaatgcccatttaaatctcatgggttctattaaaaatatatatatatagggccccaatccattgccatcaaattgcccttggacttttccaaggtatattatggggttttatgcaaaattccaagctaccatgtaactttttttaaccatttaacaaggagggggaactgtttcctaccttctttacatgttgtgcattgttgtggtccagaaatgccaaacctttttaaagatggtgcaactttgagtccttggcttgactatacaggccttgaacttcatggcatatcaactttgccatatctgcaggagagctgttctataagaaatagctcagagttgcaaatatcacatgtgaatgatacggtaacttttaagaaatgtctgtattgtatttgaagactgtttgccataaatctgaaatttgaacctatgtatttcaatttggtatgctaaaaagttctgaattaatgtaaagttttttgttataatattgtaatctcagttcaaaagttaactgcaaatataaaacccaatgatttctatatagtaaattgaactgtaaaggtaacttgtgtgtgattctgaatacatagataaatgtttttattcctcat

SEQ ID NO: 433896 - DNA, 4292 bp, Homo sapiens
actttcaggctctgatcgcggccgcagtttttccttttttcttctgccgtcgccttctctgcctcttctcatcctttctcgctctgctgctctgcagtgtgacgagtccgaatcctcttcccacccagcccgcgcctttcttcttttgcctgcgctgttctatttctccttcggccgccgccgccactgctgcacacagctggtgtcggtgccgcgcttttacccccaagtcgttcccgcagcctatggcccaggccgccttgggtatttctgctcaaggtaaccacatccctctttaaaaattccgccgaaaaagagaagacgctttacccgactctttgggccgttatctcacggcgaactttctgaccaagtatacaactacccagagggcctaggagaagtgctgtatagagagcagttcgacttcaacgctgagccaccttgggaacctagctgatgataggggggttccatctcccaacttgtccatggaggtcttcacttcagaaatccaagactcatattcatccagcttggtgtcaagtgggctgttgctgccagaattatcttgtgattatttgagagatgtatcagtttcttctgaagtacaatcaactgtagaagcctttgtagcagtttgttgcatattctaaggacccagacataggcttggtggcccgtctcttgtctttcctggtttatgactttcggctttgtggaatacggctgagatgaaaggatttattgatgatgcaaactactccgttggcctgttggatgaaggaacaaaccttggaaatgttattgataactatgtttatgaacataccctgacagggaaaaatgcattttttgtgggagatcttggaaagattgtgaagaaacacagtcaatggcagaatgtagtggctcagataaagccattctacacagtgaagtgcaactctgctccagctgtacttgagattttggcagctcttggaaccggatttgcttgttccagtaaaaatgaaatggctttagtgcaagagttgggtgtacctccagaaaacattatttacataagtccttgcaagcaagtgtctcagataaagtatgcagcaaaagttggagtgaatatcctgacatgtgacaatgaaattgaattgaagaaaattgcacgtaatcacccaaatgccaaggtcttactacatattgcaacagaagataatattggaggtgaagagggtaacatgaagtttggcactaccctgaagaactgtaggcatctcttggaatgtgctaaggaacttgatgtccaaataattggggttaaatttcatgtttcgagtgcttgcaaagaatctcaagtatatgtacatgctctatctgatgctcgatgtgtgtttgacatggctggagaaattggctttacgatgaacatgttagacattggtggaggattcacgggaactgaatttcaattggaagaggttaatcatgttatcagccctctgttggatatctactttcctgaaggatctggtgttaagataatttcagaacccggaagctactatgtgtcttctgcatttacactcgcagttaatatcatagcaaagaaagttgttgaaaatgataaatttccctctggagtagaaaaaaccggaagtgatgaaccagccttcatgtattatatgaatgatggtgtttatggttcttttgcaagtaaactgtctgaggacttaaataccattccagaggttcacaagaaatacaaggaagatgagcctctgtttacaagcagcctttggggtccatcctgtgatgagcttgatcaaattgtggaaagctgtcttcttcctgagctgaatgtgggagattggcttatctttgataacatgggagcagattctttccatgaaccatctgcttttaatgattttcagaggccagccatttattacatgatgtcattcagtgattggtatgagatgcaagatgctggaattacttcagactcaatgatgaagaacttcttctttgtgccttcttgcattcagctgagccaagaagacagcttttccgctgaagcttaaacaggcattaacgcttctttagatctgaagttgcaggttaagcttgtctggtcaacattccagtgtggaaaaataatttaaacaatcttattctcttaattcttttggcaacaaaaactattagtaatagctatttgggaccagacaaaatcagctttcatctataattcattggggataatgggagatttagataatgtatccagatttaaacctaccagtttgtcctaccccttaagcgtttaaaataaaatatgcaacaaaatggatgacttagtggagatggaagcccattaattgggttccccattaaatcgtttacatacaagaacacagtttttatactaaggatttgtgtttaaagtcttgtaaagttcatgtctttcacccagatatatcaaatgttagaagaccagtgtgacttcattagataacgtttagtgtatttagaatgtgtaaatttgtgctttgaactgtagtttaataaatgtaaaattgcatcatagtatttgttgacctaatgtaacccttgtatgattgcaataaaattttgtgtagattttactgttttttcaggctaaaactttgggaaaggggctagctagcaaaggtagttttgaaatagatgtgtatatggactgttttgaagggtttttttctttatagcccagttaagttttgtttggctcggtgcatttttcatttatttaattagtaatttaagtaaagtgtttggtaaatcattgtgaagttcagattcattatggagagttgatgtgcagtaagcatgatgtttaacaattttaacaccaaaaatgttaatcctgcataaatcaactgtaataataaataggtgtttctgtatagatagaatgcatagagtaccttagtaaatctttgaatcacaatcttttggctgaaatggaagattctgttaaatactttgaataaacttggggggagggaaataaaattgcagaaaactgcagagcactaaaacttaaagaagggctacatctttatccagaaacctgttgctcttttgcacggaatgtttaaattcagagttgggatgggggttggggtgaagcacacttattatcttcagttgcagtgatttcaaatttaggattttttgttgttggtttgaactgtccccttagtttcttgttatttccaatttgttctgcttagtcattacttttaattcttttcttactaaaattttatggtggttgggggaagggagttagcatcactaacctgacagttgttgccaggaatttgctttgtttactgctagtatattagaaatcctagatctcagaatcacaatagtaataaacaacaggggtcattttttcctaacttactctgtgttcaggtgtggaatttctgtctcccaagaggaaatgtgacttcactttggtgccaatggacagaaaattctacctgtgctacataggagaagtttggaatgcacttaatagctggtttttacaccttgatttcgaggtggaaagaaattgatcatgaatctctaataaatttaaatctcttaaaccagtaggtgcttaatattttttgatttgattaatgcccatttaaatctcatgggttctattaaaaatatatatatatagggccccaatccattgccatcaaattgcccttggacttttccaaggtatattatggggttttatgcaaaattccaagctaccatgtaactttttttaaccatttaacaaggagggggaactgtttcctaccttctttacatgttgtgcattgttgtggtccagaaatgccaaacctttttaaagatggtgcaactttgagtccttggcttgactatacaggccttgaacttcatggcatatcaactttgccatatctgcaggagagctgttctataagaaatagctcagagttgcaaatatcacatgtgaatgatacggtaacttttaagaaatgtctgtattgtatttgaagactgtttgccataaatctgaaatttgaacctatgtatttcaatttggtatgctaaaaagttctgaattaatgtaaagttttttgttataatattgtaatctcagttcaaaagttaactgcaaatataaaacccaatgatttctatatagtaaattgaactgtaaaggtaacttgtgtgtgattctgaatacatagataaatgtttttattcctcat

SEQ ID NO: 433897 - DNA, 4248 bp, Homo sapiens
actttcaggctctgatcgcggccgcagtttttccttttttcttctgccgtcgccttctctgcctcttctcatcctttctcgctctgctgctctgcagtgtgacgagtccgaatcctcttcccacccagcccgcgcctttcttcttttgcctgcgctgttctatttctccttcggccgccgccgccactgctgcacacagctggtgtcggtgccgcgcttttacccccaagtcgttcccgcagcctatggcccaggccgccttgggtatttctgctcaaggtaaccacatccctctttaaaaattccgccgaggcgaactttctgaccaagtatacaactacccagagggcctaggagaagtgctgtatagagagcagttcgacttcaacgctgagccaccttgggaacctagctgatgataggggggttccatctcccaacttgtccatggaggtcttcacttcagaaatccaagactcatattcatccagcttggtgtcaagtgggctgttgctgccagaattatcttgtgattatttgagagatgtatcagtttcttctgaagtacaatcaactgtagaagcctttgtagcagtttgttgcatattctaaggacccagacataggcttggtggcccgtctcttgtctttcctggtttatgactttcggctttgtggaatacggctgagatgaaaggatttattgatgatgcaaactactccgttggcctgttggatgaaggaacaaaccttggaaatgttattgataactatgtttatgaacataccctgacagggaaaaatgcattttttgtgggagatcttggaaagattgtgaagaaacacagtcaatggcagaatgtagtggctcagataaagccattctacacagtgaagtgcaactctgctccagctgtacttgagattttggcagctcttggaaccggatttgcttgttccagtaaaaatgaaatggctttagtgcaagagttgggtgtacctccagaaaacattatttacataagtccttgcaagcaagtgtctcagataaagtatgcagcaaaagttggagtgaatatcctgacatgtgacaatgaaattgaattgaagaaaattgcacgtaatcacccaaatgccaaggtcttactacatattgcaacagaagataatattggaggtgaagagggtaacatgaagtttggcactaccctgaagaactgtaggcatctcttggaatgtgctaaggaacttgatgtccaaataattggggttaaatttcatgtttcgagtgcttgcaaagaatctcaagtatatgtacatgctctatctgatgctcgatgtgtgtttgacatggctggagaaattggctttacgatgaacatgttagacattggtggaggattcacgggaactgaatttcaattggaagaggttaatcatgttatcagccctctgttggatatctactttcctgaaggatctggtgttaagataatttcagaacccggaagctactatgtgtcttctgcatttacactcgcagttaatatcatagcaaagaaagttgttgaaaatgataaatttccctctggagtagaaaaaaccggaagtgatgaaccagccttcatgtattatatgaatgatggtgtttatggttcttttgcaagtaaactgtctgaggacttaaataccattccagaggttcacaagaaatacaaggaagatgagcctctgtttacaagcagcctttggggtccatcctgtgatgagcttgatcaaattgtggaaagctgtcttcttcctgagctgaatgtgggagattggcttatctttgataacatgggagcagattctttccatgaaccatctgcttttaatgattttcagaggccagccatttattacatgatgtcattcagtgattggtatgagatgcaagatgctggaattacttcagactcaatgatgaagaacttcttctttgtgccttcttgcattcagctgagccaagaagacagcttttccgctgaagcttaaacaggcattaacgcttctttagatctgaagttgcaggttaagcttgtctggtcaacattccagtgtggaaaaataatttaaacaatcttattctcttaattcttttggcaacaaaaactattagtaatagctatttgggaccagacaaaatcagctttcatctataattcattggggataatgggagatttagataatgtatccagatttaaacctaccagtttgtcctaccccttaagcgtttaaaataaaatatgcaacaaaatggatgacttagtggagatggaagcccattaattgggttccccattaaatcgtttacatacaagaacacagtttttatactaaggatttgtgtttaaagtcttgtaaagttcatgtctttcacccagatatatcaaatgttagaagaccagtgtgacttcattagataacgtttagtgtatttagaatgtgtaaatttgtgctttgaactgtagtttaataaatgtaaaattgcatcatagtatttgttgacctaatgtaacccttgtatgattgcaataaaattttgtgtagattttactgttttttcaggctaaaactttgggaaaggggctagctagcaaaggtagttttgaaatagatgtgtatatggactgttttgaagggtttttttctttatagcccagttaagttttgtttggctcggtgcatttttcatttatttaattagtaatttaagtaaagtgtttggtaaatcattgtgaagttcagattcattatggagagttgatgtgcagtaagcatgatgtttaacaattttaacaccaaaaatgttaatcctgcataaatcaactgtaataataaataggtgtttctgtatagatagaatgcatagagtaccttagtaaatctttgaatcacaatcttttggctgaaatggaagattctgttaaatactttgaataaacttggggggagggaaataaaattgcagaaaactgcagagcactaaaacttaaagaagggctacatctttatccagaaacctgttgctcttttgcacggaatgtttaaattcagagttgggatgggggttggggtgaagcacacttattatcttcagttgcagtgatttcaaatttaggattttttgttgttggtttgaactgtccccttagtttcttgttatttccaatttgttctgcttagtcattacttttaattcttttcttactaaaattttatggtggttgggggaagggagttagcatcactaacctgacagttgttgccaggaatttgctttgtttactgctagtatattagaaatcctagatctcagaatcacaatagtaataaacaacaggggtcattttttcctaacttactctgtgttcaggtgtggaatttctgtctcccaagaggaaatgtgacttcactttggtgccaatggacagaaaattctacctgtgctacataggagaagtttggaatgcacttaatagctggtttttacaccttgatttcgaggtggaaagaaattgatcatgaatctctaataaatttaaatctcttaaaccagtaggtgcttaatattttttgatttgattaatgcccatttaaatctcatgggttctattaaaaatatatatatatagggccccaatccattgccatcaaattgcccttggacttttccaaggtatattatggggttttatgcaaaattccaagctaccatgtaactttttttaaccatttaacaaggagggggaactgtttcctaccttctttacatgttgtgcattgttgtggtccagaaatgccaaacctttttaaagatggtgcaactttgagtccttggcttgactatacaggccttgaacttcatggcatatcaactttgccatatctgcaggagagctgttctataagaaatagctcagagttgcaaatatcacatgtgaatgatacggtaacttttaagaaatgtctgtattgtatttgaagactgtttgccataaatctgaaatttgaacctatgtatttcaatttggtatgctaaaaagttctgaattaatgtaaagttttttgttataatattgtaatctcagttcaaaagttaactgcaaatataaaacccaatgatttctatatagtaaattgaactgtaaaggtaacttgtgtgtgattctgaatacatagataaatgtttttattcctcat

SEQ ID NO: 433898 - DNA, 4265 bp, Homo sapiens
actttcaggctctgatcgcggccgcagtttttccttttttcttctgccgtcgccttctctgcctcttctcatcctttctcgctctgctgctctgcagtgtgacgagtccgaatcctcttcccacccagcccgcgcctttcttcttttgcctgcgctgttctatttctccttcggccgccgccgccactgctgcacacagctggtgtcggtgccgcgcttttacccccaagtcgttcccgcagcctatggcccaggccgccttgggtatttctgctcaaggtaaccacatccctctttaaaaattccgccgaaaaagagaagacgctttacccgactctttgggccgttatctcacgagttctttcctcatcatccataaatgtcattcattgagcatgtgatcagcttctcctagatagatgaaacattttgcctccaccaggagtgccttgatcctggtgagatacactttagggcgaactttctgaccaagtatacaactacccagagggcctaggagaagtgctgtatagagagcagttcgacttcaacgctgagccaccttgggaacctagctgatgataggggggttccatctcccaacttgtccattttgttgcatattctaaggacccagacataggcttggtggcccgtctcttgtctttcctggtttatgactttcggctttgtggaatacggctgagatgaaaggatttattgatgatgcaaactactccgttggcctgttggatgaaggaacaaaccttggaaatgttattgataactatgtttatgaacataccctgacagggaaaaatgcattttttgtgggagatcttggaaagattgtgaagaaacacagtcaatggcagaatgtagtggctcagataaagccattctacacagtgaagtgcaactctgctccagctgtacttgagattttggcagctcttggaaccggatttgcttgttccagtaaaaatgaaatggctttagtgcaagagttgggtgtacctccagaaaacattatttacataagtccttgcaagcaagtgtctcagataaagtatgcagcaaaagttggagtgaatatcctgacatgtgacaatgaaattgaattgaagaaaattgcacgtaatcacccaaatgccaaggtcttactacatattgcaacagaagataatattggaggtgaagagggtaacatgaagtttggcactaccctgaagaactgtaggcatctcttggaatgtgctaaggaacttgatgtccaaataattggggttaaatttcatgtttcgagtgcttgcaaagaatctcaagtatatgtacatgctctatctgatgctcgatgtgtgtttgacatggctggagaaattggctttacgatgaacatgttagacattggtggaggattcacgggaactgaatttcaattggaagaggttaatcatgttatcagccctctgttggatatctactttcctgaaggatctggtgttaagataatttcagaacccggaagctactatgtgtcttctgcatttacactcgcagttaatatcatagcaaagaaagttgttgaaaatgataaatttccctctggagtagaaaaaaccggaagtgatgaaccagccttcatgtattatatgaatgatggtgtttatggttcttttgcaagtaaactgtctgaggacttaaataccattccagaggttcacaagaaatacaaggaagatgagcctctgtttacaagcagcctttggggtccatcctgtgatgagcttgatcaaattgtggaaagctgtcttcttcctgagctgaatgtgggagattggcttatctttgataacatgggagcagattctttccatgaaccatctgcttttaatgattttcagaggccagccatttattacatgatgtcattcagtgattggtatgagatgcaagatgctggaattacttcagactcaatgatgaagaacttcttctttgtgccttcttgcattcagctgagccaagaagacagcttttccgctgaagcttaaacaggcattaacgcttctttagatctgaagttgcaggttaagcttgtctggtcaacattccagtgtggaaaaataatttaaacaatcttattctcttaattcttttggcaacaaaaactattagtaatagctatttgggaccagacaaaatcagctttcatctataattcattggggataatgggagatttagataatgtatccagatttaaacctaccagtttgtcctaccccttaagcgtttaaaataaaatatgcaacaaaatggatgacttagtggagatggaagcccattaattgggttccccattaaatcgtttacatacaagaacacagtttttatactaaggatttgtgtttaaagtcttgtaaagttcatgtctttcacccagatatatcaaatgttagaagaccagtgtgacttcattagataacgtttagtgtatttagaatgtgtaaatttgtgctttgaactgtagtttaataaatgtaaaattgcatcatagtatttgttgacctaatgtaacccttgtatgattgcaataaaattttgtgtagattttactgttttttcaggctaaaactttgggaaaggggctagctagcaaaggtagttttgaaatagatgtgtatatggactgttttgaagggtttttttctttatagcccagttaagttttgtttggctcggtgcatttttcatttatttaattagtaatttaagtaaagtgtttggtaaatcattgtgaagttcagattcattatggagagttgatgtgcagtaagcatgatgtttaacaattttaacaccaaaaatgttaatcctgcataaatcaactgtaataataaataggtgtttctgtatagatagaatgcatagagtaccttagtaaatctttgaatcacaatcttttggctgaaatggaagattctgttaaatactttgaataaacttggggggagggaaataaaattgcagaaaactgcagagcactaaaacttaaagaagggctacatctttatccagaaacctgttgctcttttgcacggaatgtttaaattcagagttgggatgggggttggggtgaagcacacttattatcttcagttgcagtgatttcaaatttaggattttttgttgttggtttgaactgtccccttagtttcttgttatttccaatttgttctgcttagtcattacttttaattcttttcttactaaaattttatggtggttgggggaagggagttagcatcactaacctgacagttgttgccaggaatttgctttgtttactgctagtatattagaaatcctagatctcagaatcacaatagtaataaacaacaggggtcattttttcctaacttactctgtgttcaggtgtggaatttctgtctcccaagaggaaatgtgacttcactttggtgccaatggacagaaaattctacctgtgctacataggagaagtttggaatgcacttaatagctggtttttacaccttgatttcgaggtggaaagaaattgatcatgaatctctaataaatttaaatctcttaaaccagtaggtgcttaatattttttgatttgattaatgcccatttaaatctcatgggttctattaaaaatatatatatatagggccccaatccattgccatcaaattgcccttggacttttccaaggtatattatggggttttatgcaaaattccaagctaccatgtaactttttttaaccatttaacaaggagggggaactgtttcctaccttctttacatgttgtgcattgttgtggtccagaaatgccaaacctttttaaagatggtgcaactttgagtccttggcttgactatacaggccttgaacttcatggcatatcaactttgccatatctgcaggagagctgttctataagaaatagctcagagttgcaaatatcacatgtgaatgatacggtaacttttaagaaatgtctgtattgtatttgaagactgtttgccataaatctgaaatttgaacctatgtatttcaatttggtatgctaaaaagttctgaattaatgtaaagttttttgttataatattgtaatctcagttcaaaagttaactgcaaatataaaacccaatgatttctatatagtaaattgaactgtaaaggtaacttgtgtgtgattctgaatacatagataaatgtttttattcctcat

SEQ ID NO: 433899 - DNA, 4091 bp, Homo sapiens
actttcaggctctgatcgcggccgcagtttttccttttttcttctgccgtcgccttctctgcctcttctcatcctttctcgctctgctgctctgcagtgtgacgagtccgaatcctcttcccacccagcccgcgcctttcttcttttgcctgcgctgttctatttctccttcggccgccgccgccactgctgcacacagctggtgtcggtgccgcgcttttacccccaagtcgttcccgcagcctatggcccaggccgccttgggtatttctgctcaaggtaaccacatccctctttaaaaattccgccgaaaaagagaagacgctttacccgactctttgggccgttatctcacggcgaactttctgaccaagtatacaactacccagagggcctaggagaagtgctgtatagagagcagttcgacttcaacgctgagccaccttgggaacctagctgatgataggggggttccatctcccaacttgtccattttgttgcatattctaaggacccagacataggcttggtggcccgtctcttgtctttcctggtttatgactttcggctttgtggaatacggctgagatgaaaggatttattgatgatgcaaactactccgttggcctgttggatgaaggaacaaaccttggaaatgttattgataactatgtttatgaacataccctgacagggaaaaatgcattttttgtgggagatcttggaaagattgtgaagaaacacagtcaatggcagaatgtagtggctcagataaagccattctacacagtgaagtgcaactctgctccagctgtacttgagattttggcagctcttggaaccggatttgcttgttccagtaaaaatgaaatggctttagtgcaagagttgggtgtacctccagaaaacattatttacataagtccttgcaagcaagtgtctcagataaagtatgcagcaaaagttggagtgaatatcctgacatgtgacaatgaaattgaattgaagaaaattgcacgtaatcacccaaatgccaaggtcttactacatattgcaacagaagataatattggaggtgaagagggtaacatgaagtttggcactaccctgaagaactgtaggcatctcttggaatgtgctaaggaacttgatgtccaaataattggggttaaatttcatgtttcgagtgcttgcaaagaatctcaagtatatgtacatgctctatctgatgctcgatgtgtgtttgacatggctggagaaattggctttacgatgaacatgttagacattggtggaggattcacgggaactgaatttcaattggaagaggttaatcatgttatcagccctctgttggatatctactttcctgaaggatctggtgttaagataatttcagaacccggaagctactatgtgtcttctgcatttacactcgcagttaatatcatagcaaagaaagttgttgaaaatgataaatttccctctggagtagaaaaaaccggaagtgatgaaccagccttcatgtattatatgaatgatggtgtttatggttcttttgcaagtaaactgtctgaggacttaaataccattccagaggttcacaagaaatacaaggaagatgagcctctgtttacaagcagcctttggggtccatcctgtgatgagcttgatcaaattgtggaaagctgtcttcttcctgagctgaatgtgggagattggcttatctttgataacatgggagcagattctttccatgaaccatctgcttttaatgattttcagaggccagccatttattacatgatgtcattcagtgattggtatgagatgcaagatgctggaattacttcagactcaatgatgaagaacttcttctttgtgccttcttgcattcagctgagccaagaagacagcttttccgctgaagcttaaacaggcattaacgcttctttagatctgaagttgcaggttaagcttgtctggtcaacattccagtgtggaaaaataatttaaacaatcttattctcttaattcttttggcaacaaaaactattagtaatagctatttgggaccagacaaaatcagctttcatctataattcattggggataatgggagatttagataatgtatccagatttaaacctaccagtttgtcctaccccttaagcgtttaaaataaaatatgcaacaaaatggatgacttagtggagatggaagcccattaattgggttccccattaaatcgtttacatacaagaacacagtttttatactaaggatttgtgtttaaagtcttgtaaagttcatgtctttcacccagatatatcaaatgttagaagaccagtgtgacttcattagataacgtttagtgtatttagaatgtgtaaatttgtgctttgaactgtagtttaataaatgtaaaattgcatcatagtatttgttgacctaatgtaacccttgtatgattgcaataaaattttgtgtagattttactgttttttcaggctaaaactttgggaaaggggctagctagcaaaggtagttttgaaatagatgtgtatatggactgttttgaagggtttttttctttatagcccagttaagttttgtttggctcggtgcatttttcatttatttaattagtaatttaagtaaagtgtttggtaaatcattgtgaagttcagattcattatggagagttgatgtgcagtaagcatgatgtttaacaattttaacaccaaaaatgttaatcctgcataaatcaactgtaataataaataggtgtttctgtatagatagaatgcatagagtaccttagtaaatctttgaatcacaatcttttggctgaaatggaagattctgttaaatactttgaataaacttggggggagggaaataaaattgcagaaaactgcagagcactaaaacttaaagaagggctacatctttatccagaaacctgttgctcttttgcacggaatgtttaaattcagagttgggatgggggttggggtgaagcacacttattatcttcagttgcagtgatttcaaatttaggattttttgttgttggtttgaactgtccccttagtttcttgttatttccaatttgttctgcttagtcattacttttaattcttttcttattgccaggaatttgctttgtttactgctagtatattagaaatcctagatctcagaatcacaatagtaataaacaacaggggtcattttttcctaacttactctgtgttcaggtgtggaatttctgtctcccaagaggaaatgtgacttcactttggtgccaatggacagaaaattctacctgtgctacataggagaagtttggaatgcacttaatagctggtttttacaccttgatttcgaggtggaaagaaattgatcatgaatctctaataaatttaaatctcttaaaccagtaggtgcttaatattttttgatttgattaatgcccatttaaatctcatgggttctattaaaaatatatatatatagggccccaatccattgccatcaaattgcccttggacttttccaaggtatattatggggttttatgcaaaattccaagctaccatgtaactttttttaaccatttaacaaggagggggaactgtttcctaccttctttacatgttgtgcattgttgtggtccagaaatgccaaacctttttaaagatggtgcaactttgagtccttggcttgactatacaggccttgaacttcatggcatatcaactttgccatatctgcaggagagctgttctataagaaatagctcagagttgcaaatatcacatgtgaatgatacggtaacttttaagaaatgtctgtattgtatttgaagactgtttgccataaatctgaaatttgaacctatgtatttcaatttggtatgctaaaaagttctgaattaatgtaaagttttttgttataatattgtaatctcagttcaaaagttaactgcaaatataaaacccaatgatttctatatagtaaattgaactgtaaaggtaacttgtgtgtgattctgaatacatagataaatgtttttattcctcat

SEQ ID NO: 433900 - DNA, 4200 bp, Homo sapiens
actttcaggctctgatcgcggccgcagtttttccttttttcttctgccgtcgccttctctgcctcttctcatcctttctcgctctgctgctctgcagtgtgacgagtccgaatcctcttcccacccagcccgcgcctttcttcttttgcctgcgctgttctatttctccttcggccgccgccgccactgctgcacacagctggtgtcggtgccgcgcttttacccccaagtcgttcccgcagcctatggcccaggccgccttgggtatttctgctcaaggtaaccacatccctctttaaaaattccgccgaaaaagagaagacgctttacccgactctttgggccgttatctcacggcgaactttctgaccaagtatacaactacccagagggcctaggagaagtgctgtatagagagcagttcgacttcaacgctgagccaccttgggaacctagctgatgataggggggttccatctcccaacttgtccattttgttgcatattctaaggacccagacataggcttggtggcccgtctcttgtctttcctggtttatgactttcggctttgtggaatacggctgagatgaaaggatttattgatgatgcaaactactccgttggcctgttggatgaaggaacaaaccttggaaatgttattgataactatgtttatgaacataccctgacagggaaaaatgcattttttgtgggagatcttggaaagattgtgaagaaacacagtcaatggcagaatgtagtggctcagataaagccattctacacagtgaagtgcaactctgctccagctgtacttgagattttggcagctcttggaaccggatttgcttgttccagtaaaaatgaaatggctttagtgcaagagttgggtgtacctccagaaaacattatttacataagtccttgcaagcaagtgtctcagataaagtatgcagcaaaagttggagtgaatatcctgacatgtgacaatgaaattgaattgaagaaaattgcacgtaatcacccaaatgccaaggtcttactacatattgcaacagaagataatattggaggtgaagagggtaacatgaagtttggcactaccctgaagaactgtaggcatctcttggaatgtgctaaggaacttgatgtccaaataattggggttaaatttcatgtttcgagtgcttgcaaagaatctcaagtatatgtacatgctctatctgatgctcgatgtgtgtttgacatggctggagaaattggctttacgatgaacatgttagacattggtggaggattcacgggaactgaatttcaattggaagaggttaatcatgttatcagccctctgttggatatctactttcctgaaggatctggtgttaagataatttcagaacccggaagctactatgtgtcttctgcatttacactcgcagttaatatcatagcaaagaaagttgttgaaaatgataaatttccctctggagtagaaaaaaccggaagtgatgaaccagccttcatgtattatatgaatgatggtgtttatggttcttttgcaagtaaactgtctgaggacttaaataccattccagaggttcacaagaaatacaaggaagatgagcctctgtttacaagcagcctttggggtccatcctgtgatgagcttgatcaaattgtggaaagctgtcttcttcctgagctgaatgtgggagattggcttatctttgataacatgggagcagattctttccatgaaccatctgcttttaatgattttcagaggccagccatttattacatgatgtcattcagtgattggtatgagatgcaagatgctggaattacttcagactcaatgatgaagaacttcttctttgtgccttcttgcattcagctgagccaagaagacagcttttccgctgaagcttaaacaggcattaacgcttctttagatctgaagttgcaggttaagcttgtctggtcaacattccagtgtggaaaaataatttaaacaatcttattctcttaattcttttggcaacaaaaactattagtaatagctatttgggaccagacaaaatcagctttcatctataattcattggggataatgggagatttagataatgtatccagatttaaacctaccagtttgtcctaccccttaagcgtttaaaataaaatatgcaacaaaatggatgacttagtggagatggaagcccattaattgggttccccattaaatcgtttacatacaagaacacagtttttatactaaggatttgtgtttaaagtcttgtaaagttcatgtctttcacccagatatatcaaatgttagaagaccagtgtgacttcattagataacgtttagtgtatttagaatgtgtaaatttgtgctttgaactgtagtttaataaatgtaaaattgcatcatagtatttgttgacctaatgtaacccttgtatgattgcaataaaattttgtgtagattttactgttttttcaggctaaaactttgggaaaggggctagctagcaaaggtagttttgaaatagatgtgtatatggactgttttgaagggtttttttctttatagcccagttaagttttgtttggctcggtgcatttttcatttatttaattagtaatttaagtaaagtgtttggtaaatcattgtgaagttcagattcattatggagagttgatgtgcagtaagcatgatgtttaacaattttaacaccaaaaatgttaatcctgcataaatcaactgtaataataaataggtgtttctgtatagatagaatgcatagagtaccttagtaaatctttgaatcacaatcttttggctgaaatggaagattctgttaaatactttgaataaacttggggggagggaaataaaattgcagaaaactgcagagcactaaaacttaaagaagggctacatctttatccagaaacctgttgctcttttgcacggaatgtttaaattcagagttgggatgggggttggggtgaagcacacttattatcttcagttgcagtgatttcaaatttaggattttttgttgttggtttgaactgtccccttagtttcttgttatttccaatttgttctgcttagtcattacttttaattcttttcttactaaaattttatggtggttgggggaagggagttagcatcactaacctgacagttgttgccaggaatttgctttgtttactgctagtatattagaaatcctagatctcagaatcacaatagtaataaacaacaggggtcattttttcctaacttactctgtgttcaggtgtggaatttctgtctcccaagaggaaatgtgacttcactttggtgccaatggacagaaaattctacctgtgctacataggagaagtttggaatgcacttaatagctggtttttacaccttgatttcgaggtggaaagaaattgatcatgaatctctaataaatttaaatctcttaaaccagtaggtgcttaatattttttgatttgattaatgcccatttaaatctcatgggttctattaaaaatatatatatatagggccccaatccattgccatcaaattgcccttggacttttccaaggtatattatggggttttatgcaaaattccaagctaccatgtaactttttttaaccatttaacaaggagggggaactgtttcctaccttctttacatgttgtgcattgttgtggtccagaaatgccaaacctttttaaagatggtgcaactttgagtccttggcttgactatacaggccttgaacttcatggcatatcaactttgccatatctgcaggagagctgttctataagaaatagctcagagttgcaaatatcacatgtgaatgatacggtaacttttaagaaatgtctgtattgtatttgaagactgtttgccataaatctgaaatttgaacctatgtatttcaatttggtatgctaaaaagttctgaattaatgtaaagttttttgttataatattgtaatctcagttcaaaagttaactgcaaatataaaacccaatgatttctatatagtaaattgaactgtaaaggtaacttgtgtgtgattctgaatacatagataaatgtttttattcctcatgttttactttggcttctatctgaaatagaggtaaaattttacatatcagcttta

SEQ ID NO: 433901 - DNA, 4092 bp, Homo sapiens
actttcaggctctgatcgcggccgcagtttttccttttttcttctgccgtcgccttctctgcctcttctcatcctttctcgctctgctgctctgcagtgtgacgagtccgaatcctcttcccacccagcccgcgcctttcttcttttgcctgcgctgttctatttctccttcggccgccgccgccactgctgcacacagctggtgtcggtgccgcgcttttacccccaagtcgttcccgcagcctatggcccaggccgccttgggtatttctgctcaaggtaaccacatccctctttaaaaattccgccgaaaaagagaagacgctttacccgactctttgggccgttatctcacggcgaactttctgaccaagtatacaactacccagagggcctaggagaagtgctgtatagagagcagttcgacttcaacgctgagccaccttgggaacctagctgatgataggggggttccatctcccaacttgtccattttgttgcatattctaaggacccagacataggcttggtggcccgtctcttgtctttcctggtttatgactttcggctttgtggaatacggctgagatgaaaggatttattgatgatgcaaactactccgttggcctgttggatgaaggaacaaaccttggaaatgttattgataactatgtttatgaacataccctgacagggaaaaatgcattttttgtgggagatcttggaaagattgtgaagaaacacagtcaatggcagaatgtagtggctcagataaagccattctacacagtgaagtgcaactctgctccagctgtacttgagattttggcagctcttggaaccggatttgcttgttccagtaaaaatgaaatggctttagtgcaagagttgggtgtacctccagaaaacattatttacataagtccttgcaagcaagtgtctcagataaagtatgcagcaaaagttggagtgaatatcctgacatgtgacaatgaaattgaattgaagaaaattgcacgtaatcacccaaatgccaaggtcttactacatattgcaacagaagataatattggaggtgaagagggtaacatgaagtttggcactaccctgaagaactgtaggcatctcttggaatgtgctaaggaacttgatgtccaaataattggggttaaatttcatgtttcgagtgcttgcaaagaatctcaagtatatgtacatgctctatctgatgctcgatgtgtgtttgacatggctggagaaattggctttacgatgaacatgttagacattggtggaggattcacgggaactgaatttcaattggaagaggttaatcatgttatcagccctctgttggatatctactttcctgaaggatctggtgttaagataatttcagaacccggaagctactatgtgtcttctgcatttacactcgcagttaatatcatagcaaagaaagttgttgaaaatgataaatttccctctggagtagaaaaaaccggaagtgatgaaccagccttcatgtattatatgaatgatggtgtttatggttcttttgcaagtaaactgtctgaggacttaaataccattccagaggttcacaagaaatacaaggaagatgagcctctgtttacaagcagcctttggggtccatcctgtgatgagcttgatcaaattgtggaaagctgtcttcttcctgagctgaatgtgggagattggcttatctttgataacatgggagcagattctttccatgaaccatctgcttttaatgattttcagaggccagccatttattacatgatgtcattcagtgattggtatgagatgcaagatgctggaattacttcagactcaatgatgaagaacttcttctttgtgccttcttgcattcagctgagccaagaagacagcttttccgctgaagcttaaacaggcattaacgcttctttagatctgaagttgcaggttaagcttgtctggtcaacattccagtgtggaaaaataatttaaacaatcttattctcttaattcttttggcaacaaaaactattagtaatagctatttgggaccagacaaaatcagctttcatctataattcattggggataatgggagatttagataatgtatccagatttaaacctaccagtttgtcctaccccttaagcgtttaaaataaaatatgcaacaaaatggatgacttagtggagatggaagcccattaattgggttccccattaaatcgtttacatacaagaacacagtttttatactaaggatttgtgtttaaagtcttgtaaagttcatgtctttcacccagatatatcaaatgttagaagaccagtgtgacttcattagataacgtttagtgtatttagaatgtgtaaatttgtgctttgaactgtagtttaataaatgtaaaattgcatcatagtatttgttgacctaatgtaacccttgtatgattgcaataaaattttgtgtagattttactgttttttcaggctaaaactttgggaaaggggctagctagcaaaggtagttttgaaatagatgtgtatatggactgttttgaagggtttttttctttatagcccagttaagttttgtttggctcggtgcatttttcatttatttaattagtaatttaagtaaagtgtttggtaaatcattgtgaagttcagattcattatggagagttgatgtgcagtaagcatgatgtttaacaattttaacaccaaaaatgttaatcctgcataaatcaactgtaataataaataggtgtttctgtatagatagaatgcatagagtaccttagtaaatctttgaatcacaatcttttggctgaaatggaagattctgttaaatactttgaataaacttggggggagggaaataaaattgcagaaaactgcagagcactaaaacttaaagaagggctacatctttatccagaaacctgttgctcttttgcacggaatgtttaaattcagagttgggatgggggttggggtgaagcacacttattatcttcagttgcagtgatttcaaatttaggattttttgttgttggtttgaactgtccccttagtttcttgttatttccaatttgttctgcttagtcattacttttaattcttttcttactaaaattttatggtggttgggggaagggagttagcatcactaacctgacagttgttgccaggaatttgctttgtttactgctagtatattagaaatcctagatctcagaatcacaatagtaataaacaacaggggtcattttttcctaacttactctgtgttcaggtgtggaatttctgtctcccaagaggaaatgtgacttcactttggtgccaatggacagtttacaccttgatttcgaggtggaaagaaattgatcatgaatctctaataaatttaaatctcttaaaccagtaggtgcttaatattttttgatttgattaatgcccatttaaatctcatgggttctattaaaaatatatatatatagggccccaatccattgccatcaaattgcccttggacttttccaaggtatattatggggttttatgcaaaattccaagctaccatgtaactttttttaaccatttaacaaggagggggaactgtttcctaccttctttacatgttgtgcattgttgtggtccagaaatgccaaacctttttaaagatggtgcaactttgagtccttggcttgactatacaggccttgaacttcatggcatatcaactttgccatatctgcaggagagctgttctataagaaatagctcagagttgcaaatatcacatgtgaatgatacggtaacttttaagaaatgtctgtattgtatttgaagactgtttgccataaatctgaaatttgaacctatgtatttcaatttggtatgctaaaaagttctgaattaatgtaaagttttttgttataatattgtaatctcagttcaaaagttaactgcaaatataaaacccaatgatttctatatagtaaattgaactgtaaaggtaacttgtgtgtgattctgaatacatagataaatgtttttattcctcat

SEQ ID NO: 433902 - DNA, 4216 bp, Homo sapiens
  misc_feature (4168)..(4168): n is a, c, g, or t
  misc_feature (4179)..(4179): n is a, c, g, or t
  misc_feature (4181)..(4181): n is a, c, g, or t
  misc_feature (4189)..(4189): n is a, c, g, or t
  misc_feature (4196)..(4196): n is a, c, g, or t
  misc_feature (4200)..(4201): n is a, c, g, or t
  misc_feature (4210)..(4210): n is a, c, g, or t
actttcaggctctgatcgcggccgcagtttttccttttttcttctgccgtcgccttctctgcctcttctcatcctttctcgctctgctgctctgcagtgtgacgagtccgaatcctcttcccacccagcccgcgcctttcttcttttgcctgcgctgttctatttctccttcggccgccgccgccactgctgcacacagctggtgtcggtgccgcgcttttacccccaagtcgttcccgcagcctatggcccaggccgccttgggtatttctgctcaaggtaaccacatccctctttaaaaattccgccgaaaaagagaagacgctttacccgactctttgggccgttatctcacggcgaactttctgaccaagtatacaactacccagagggcctaggagaagtgctgtatagagagcagttcgacttcaacgctgagccaccttgggaacctagctgatgataggggggttccatctcccaacttgtccattttgttgcatattctaaggacccagacataggcttggtggcccgtctcttgtctttcctggtttatgactttcggctttgtggaatacggctgagatgaaaggatttattgatgatgcaaactactccgttggcctgttggatgaaggaacaaaccttggaaatgttattgataactatgtttatgaacataccctgacagggaaaaatgcattttttgtgggagatcttggaaagattgtgaagaaacacagtcaatggcagaatgtagtggctcagataaagccattctacacagtgaagtgcaactctgctccagctgtacttgagattttggcagctcttggaaccggatttgcttgttccagtaaaaatgaaatggctttagtgcaagagttgggtgtacctccagaaaacattatttacataagtccttgcaagcaagtgtctcagataaagtatgcagcaaaagttggagtgaatatcctgacatgtgacaatgaaattgaattgaagaaaattgcacgtaatcacccaaatgccaaggtcttactacatattgcaacagaagataatattggaggtgaagagggtaacatgaagtttggcactaccctgaagaactgtaggcatctcttggaatgtgctaaggaacttgatgtccaaataattggggttaaatttcatgtttcgagtgcttgcaaagaatctcaagtatatgtacatgctctatctgatgctcgatgtgtgtttgacatggctggagaaattggctttacgatgaacatgttagacattggtggaggattcacgggaactgaatttcaattggaagaggttaatcatgttatcagccctctgttggatatctactttcctgaaggatctggtgttaagataatttcagaacccggaagctactatgtgtcttctgcatttacactcgcagttaatatcatagcaaagaaagttgttgaaaatgataaatttccctctggagtagaaaaaaccggaagtgatgaaccagccttcatgtattatatgaatgatggtgtttatggttcttttgcaagtaaactgtctgaggacttaaataccattccagaggttcacaagaaatacaaggaagatgagcctctgtttacaagcagcctttggggtccatcctgtgatgagcttgatcaaattgtggaaagctgtcttcttcctgagctgaatgtgggagattggcttatctttgataacatgggagcagattctttccatgaaccatctgcttttaatgattttcagaggccagccatttattacatgatgtcattcagtgattggtatgagatgcaagatgctggaattacttcagactcaatgatgaagaacttcttctttgtgccttcttgcattcagctgagccaagaagacagcttttccgctgaagcttaaacaggcattaacgcttctttagatctgaagttgcaggttaagcttgtctggtcaacattccagtgtggaaaaataatttaaacaatcttattctcttaattcttttggcaacaaaaactattagtaatagctatttgggaccagacaaaatcagctttcatctataattcattggggataatgggagatttagataatgtatccagatttaaacctaccagtttgtcctaccccttaagcgtttaaaataaaatatgcaacaaaatggatgacttagtggagatggaagcccattaattgggttccccattaaatcgtttacatacaagaacacagtttttatactaaggatttgtgtttaaagtcttgtaaagttcatgtctttcacccagatatatcaaatgttagaagaccagtgtgacttcattagataacgtttagtgtatttagaatgtgtaaatttgtgctttgaactgtagtttaataaatgtaaaattgcatcatagtatttgttgacctaatgtaacccttgtatgattgcaataaaattttgtgtagattttactgttttttcaggctaaaactttgggaaaggggctagctagcaaaggtagttttgaaatagatgtgtatatggactgttttgaagggtttttttctttatagcccagttaagttttgtttggctcggtgcatttttcatttatttaattagtaatttaagtaaagtgtttggtaaatcattgtgaagttcagattcattatggagagttgatgtgcagtaagcatgatgtttaacaattttaacaccaaaaatgttaatcctgcataaatcaactgtaataataaataggtgtttctgtatagatagaatgcatagagtaccttagtaaatctttgaatcacaatcttttggctgaaatggaagattctgttaaatactttgaataaacttggggggagggaaataaaattgcagaaaactgcagagcactaaaacttaaagaagggctacatctttatccagaaacctgttgctcttttgcacggaatgtttaaattcagagttgggatgggggttggggtgaagcacacttattatcttcagttgcagtgatttcaaatttaggattttttgttgttggtttgaactgtccccttagtttcttgttatttccaatttgttctgcttagtcattacttttaattcttttcttactaaaattttatggtggttgggggaagggagttagcatcactaacctgacagttgttgccaggaatttgctttgtttactgctagtatattagaaatcctagatctcagaatcacaatagtaataaacaacaggggtcattttttcctaacttactctgtgttcaggtgtggaatttctgtctcccaagaggaaatgtgacttcactttggtgccaatggacagaaaattctacctgtgctacataggagaagtttggaatgcacttaatagctggtttttacaccttgatttcgaggtggaaagaaattgatcatgaatctctaataaatttaaatctcttaaaccagtaggtgcttaatattttttgatttgattaatgcccatttaaatctcatgggttctattaaaaatatatatatatagggccccaatccattgccatcaaattgcccttggacttttccaaggtatattatggggttttatgcaaaattccaagctaccatgtaactttttttaaccatttaacaaggagggggaactgtttcctaccttctttacatgttgtgcattgttgtggtccagaaatgccaaacctttttaaagatggtgcaactttgagtccttggcttgactatacaggccttgaacttcatggcatatcaactttgccatatctgcaggagagctgttctataagaaatagctcagagttgcaaatatcacatgtgaatgatacggtaacttttaagaaatgtctgtattgtatttgaagactgtttgccataaatctgaaatttgaacctatgtatttcaatttggtatgctaaaaagttctgaattaatgtaaagttttttgttataatattgtaatctcagttcaaaagttaactgcaaatataaaacccaatgatttctatatagtaaattgaactgtaaaggtaacttgtgtgtgattctgaatacatagataaatgtttttattcctcataaaaaaaaaaaaaaaaaaaaanaaacaaaaaananaaagaaanacaaaanaaannaaaaacaanaaaaaa

SEQ ID NO: 433903 - DNA, 3848 bp, Homo sapiens
tgcggaggaagtcggattcctggggggcgcggggagcgcggtccccctctggtggagggcgaactttctgaccaagtatacaactacccagagggcctaggagaagtgctgtatagagagcagttcgacttcaacgctgagccaccttgggaacctagctgatgataggggggttccatctcccaacttgtccattttgttgcatattctaaggacccagacataggcttggtggcccgtctcttgtctttcctggtttatgactttcggctttgtggaatacggctgagatgaaaggatttattgatgatgcaaactactccgttggcctgttggatgaaggaacaaaccttggaaatgttattgataactatgtttatgaacataccctgacagggaaaaatgcattttttgtgggagatcttggaaagattgtgaagaaacacagtcaatggcagaatgtagtggctcagataaagccattctacacagtgaagtgcaactctgctccagctgtacttgagattttggcagctcttggaaccggatttgcttgttccagtaaaaatgaaatggctttagtgcaagagttgggtgtacctccagaaaacattatttacataagtccttgcaagcaagtgtctcagataaagtatgcagcaaaagttggagtgaatatcctgacatgtgacaatgaaattgaattgaagaaaattgcacgtaatcacccaaatgccaaggtcttactacatattgcaacagaagataatattggaggtgaagagggtaacatgaagtttggcactaccctgaagaactgtaggcatctcttggaatgtgctaaggaacttgatgtccaaataattggggttaaatttcatgtttcgagtgcttgcaaagaatctcaagtatatgtacatgctctatctgatgctcgatgtgtgtttgacatggctggagaaattggctttacgatgaacatgttagacattggtggaggattcacgggaactgaatttcaattggaagaggttaatcatgttatcagccctctgttggatatctactttcctgaaggatctggtgttaagataatttcagaacccggaagctactatgtgtcttctgcatttacactcgcagttaatatcatagcaaagaaagttgttgaaaatgataaatttccctctggagtagaaaaaaccggaagtgatgaaccagccttcatgtattatatgaatgatggtgtttatggttcttttgcaagtaaactgtctgaggacttaaataccattccagaggttcacaagaaatacaaggaagatgagcctctgtttacaagcagcctttggggtccatcctgtgatgagcttgatcaaattgtggaaagctgtcttcttcctgagctgaatgtgggagattggcttatctttgataacatgggagcagattctttccatgaaccatctgcttttaatgattttcagaggccagccatttattacatgatgtcattcagtgattggtatgagatgcaagatgctggaattacttcagactcaatgatgaagaacttcttctttgtgccttcttgcattcagctgagccaagaagacagcttttccgctgaagcttaaacaggcattaacgcttctttagatctgaagttgcaggttaagcttgtctggtcaacattccagtgtggaaaaataatttaaacaatcttattctcttaattcttttggcaacaaaaactattagtaatagctatttgggaccagacaaaatcagctttcatctataattcattggggataatgggagatttagataatgtatccagatttaaacctaccagtttgtcctaccccttaagcgtttaaaataaaatatgcaacaaaatggatgacttagtggagatggaagcccattaattgggttccccattaaatcgtttacatacaagaacacagtttttatactaaggatttgtgtttaaagtcttgtaaagttcatgtctttcacccagatatatcaaatgttagaagaccagtgtgacttcattagataacgtttagtgtatttagaatgtgtaaatttgtgctttgaactgtagtttaataaatgtaaaattgcatcatagtatttgttgacctaatgtaacccttgtatgattgcaataaaattttgtgtagattttactgttttttcaggctaaaactttgggaaaggggctagctagcaaaggtagttttgaaatagatgtgtatatggactgttttgaagggtttttttctttatagcccagttaagttttgtttggctcggtgcatttttcatttatttaattagtaatttaagtaaagtgtttggtaaatcattgtgaagttcagattcattatggagagttgatgtgcagtaagcatgatgtttaacaattttaacaccaaaaatgttaatcctgcataaatcaactgtaataataaataggtgtttctgtatagatagaatgcatagagtaccttagtaaatctttgaatcacaatcttttggctgaaatggaagattctgttaaatactttgaataaacttggggggagggaaataaaattgcagaaaactgcagagcactaaaacttaaagaagggctacatctttatccagaaacctgttgctcttttgcacggaatgtttaaattcagagttgggatgggggttggggtgaagcacacttattatcttcagttgcagtgatttcaaatttaggattttttgttgttggtttgaactgtccccttagtttcttgttatttccaatttgttctgcttagtcattacttttaattcttttcttactaaaattttatggtggttgggggaagggagttagcatcactaacctgacagttgttgccaggaatttgctttgtttactgctagtatattagaaatcctagatctcagaatcacaatagtaataaacaacaggggtcattttttcctaacttactctgtgttcaggtgtggaatttctgtctcccaagaggaaatgtgacttcactttggtgccaatggacagaaaattctacctgtgctacataggagaagtttggaatgcacttaatagctggtttttacaccttgatttcgaggtggaaagaaattgatcatgaatctctaataaatttaaatctcttaaaccagtaggtgcttaatattttttgatttgattaatgcccatttaaatctcatgggttctattaaaaatatatatatatagggccccaatccattgccatcaaattgcccttggacttttccaaggtatattatggggttttatgcaaaattccaagctaccatgtaactttttttaaccatttaacaaggagggggaactgtttcctaccttctttacatgttgtgcattgttgtggtccagaaatgccaaacctttttaaagatggtgcaactttgagtccttggcttgactatacaggccttgaacttcatggcatatcaactttgccatatctgcaggagagctgttctataagaaatagctcagagttgcaaatatcacatgtgaatgatacggtaacttttaagaaatgtctgtattgtatttgaagactgtttgccataaatctgaaatttgaacctatgtatttcaatttggtatgctaaaaagttctgaattaatgtaaagttttttgttataatattgtaatctcagttcaaaagttaactgcaaatataaaacccaatgatttctatatagtaaattgaactgtaaaggtaacttgtgtgtgattctgaatacatagataaatgtttttattcctcat

SEQ ID NO: 433904 - DNA, 3388 bp, Homo sapiens
actttcaggctctgatcgcggccgcagtttttccttttttcttctgccgtcgccttctctgcctcttctcatcctttctcgctctgctgctctgcagtgtgacgagtccgaatcctcttcccacccagcccgcgcctttcttcttttgcctgcgctgttctatttctccttcggccgccgccgccactgctgcacacagctggtgtcggtgccgcgcttttacccccaagtcgttcccgcagcctatggcccaggccgccttgggtatttctgctcaagggtcttactacatattgcaacagaagataatattggaggtgaagagggtaacatgaagtttggcactaccctgaagaactgtaggcatctcttggaatgtgctaaggaacttgatgtccaaataattggggttaaatttcatgtttcgagtgcttgcaaagaatctcaagtatatgtacatgctctatctgatgctcgatgtgtgtttgacatggctggagaaattggctttacgatgaacatgttagacattggtggaggattcacgggaactgaatttcaattggaagaggttaatcatgttatcagccctctgttggatatctactttcctgaaggatctggtgttaagataatttcagaacccggaagctactatgtgtcttctgcatttacactcgcagttaatatcatagcaaagaaagttgttgaaaatgataaatttccctctggagtagaaaaaaccggaagtgatgaaccagccttcatgtattatatgaatgatggtgtttatggttcttttgcaagtaaactgtctgaggacttaaataccattccagaggttcacaagaaatacaaggaagatgagcctctgtttacaagcagcctttggggtccatcctgtgatgagcttgatcaaattgtggaaagctgtcttcttcctgagctgaatgtgggagattggcttatctttgataacatgggagcagattctttccatgaaccatctgcttttaatgattttcagaggccagccatttattacatgatgtcattcagtgattggtatgagatgcaagatgctggaattacttcagactcaatgatgaagaacttcttctttgtgccttcttgcattcagctgagccaagaagacagcttttccgctgaagcttaaacaggcattaacgcttctttagatctgaagttgcaggttaagcttgtctggtcaacattccagtgtggaaaaataatttaaacaatcttattctcttaattcttttggcaacaaaaactattagtaatagctatttgggaccagacaaaatcagctttcatctataattcattggggataatgggagatttagataatgtatccagatttaaacctaccagtttgtcctaccccttaagcgtttaaaataaaatatgcaacaaaatggatgacttagtggagatggaagcccattaattgggttccccattaaatcgtttacatacaagaacacagtttttatactaaggatttgtgtttaaagtcttgtaaagttcatgtctttcacccagatatatcaaatgttagaagaccagtgtgacttcattagataacgtttagtgtatttagaatgtgtaaatttgtgctttgaactgtagtttaataaatgtaaaattgcatcatagtatttgttgacctaatgtaacccttgtatgattgcaataaaattttgtgtagattttactgttttttcaggctaaaactttgggaaaggggctagctagcaaaggtagttttgaaatagatgtgtatatggactgttttgaagggtttttttctttatagcccagttaagttttgtttggctcggtgcatttttcatttatttaattagtaatttaagtaaagtgtttggtaaatcattgtgaagttcagattcattatggagagttgatgtgcagtaagcatgatgtttaacaattttaacaccaaaaatgttaatcctgcataaatcaactgtaataataaataggtgtttctgtatagatagaatgcatagagtaccttagtaaatctttgaatcacaatcttttggctgaaatggaagattctgttaaatactttgaataaacttggggggagggaaataaaattgcagaaaactgcagagcactaaaacttaaagaagggctacatctttatccagaaacctgttgctcttttgcacggaatgtttaaattcagagttgggatgggggttggggtgaagcacacttattatcttcagttgcagtgatttcaaatttaggattttttgttgttggtttgaactgtccccttagtttcttgttatttccaatttgttctgcttagtcattacttttaattcttttcttactaaaattttatggtggttgggggaagggagttagcatcactaacctgacagttgttgccaggaatttgctttgtttactgctagtatattagaaatcctagatctcagaatcacaatagtaataaacaacaggggtcattttttcctaacttactctgtgttcaggtgtggaatttctgtctcccaagaggaaatgtgacttcactttggtgccaatggacagaaaattctacctgtgctacataggagaagtttggaatgcacttaatagctggtttttacaccttgatttcgaggtggaaagaaattgatcatgaatctctaataaatttaaatctcttaaaccagtaggtgcttaatattttttgatttgattaatgcccatttaaatctcatgggttctattaaaaatatatatatatagggccccaatccattgccatcaaattgcccttggacttttccaaggtatattatggggttttatgcaaaattccaagctaccatgtaactttttttaaccatttaacaaggagggggaactgtttcctaccttctttacatgttgtgcattgttgtggtccagaaatgccaaacctttttaaagatggtgcaactttgagtccttggcttgactatacaggccttgaacttcatggcatatcaactttgccatatctgcaggagagctgttctataagaaatagctcagagttgcaaatatcacatgtgaatgatacggtaacttttaagaaatgtctgtattgtatttgaagactgtttgccataaatctgaaatttgaacctatgtatttcaatttggtatgctaaaaagttctgaattaatgtaaagttttttgttataatattgtaatctcagttcaaaagttaactgcaaatataaaacccaatgatttctatatagtaaattgaactgtaaaggtaacttgtgtgtgattctgaatacatagataaatgtttttattcctcat

SEQ ID NO: 433905 - DNA, 3604 bp, Homo sapiens
tggatcgcaaggtcaggagttcgagaccagcctggccaatatgatgaaaccccatctctactaaaaatacaaaaaaattagccgggcatggtggcacatgcctgtaatccgagctatttgggaggctgaggcaggaggatcacttgagcagccccagagatggaggctgcattgagctatgattgtgctattgcacttcagcctggaatacaaagagtgagaccctggttttaaaaggggtgggggtaatagtattagaggaagcattaccagaatatgaactgtgacattatgtattctcactttaacctcattttcacagaatgaaatggctttagtgcaagagttgggtgtacctccagaaaacattatttacataagtccttgcaagcaagtgtctcagataaagtatgcagcaaaagttggagtgaatatcctgacatgtgacaatgaaattgaattgaagaaaattgcacgtaatcacccaaatgccaaggtcttactacatattgcaacagaagataatattggaggtgaagagggtaacatgaagtttggcactaccctgaagaactgtaggcatctcttggaatgtgctaaggaacttgatgtccaaataattggggttaaatttcatgtttcgagtgcttgcaaagaatctcaagtatatgtacatgctctatctgatgctcgatgtgtgtttgacatggctggagaaattggctttacgatgaacatgttagacattggtggaggattcacgggaactgaatttcaattggaagaggttaatcatgttatcagccctctgttggatatctactttcctgaaggatctggtgttaagataatttcagaacccggaagctactatgtgtcttctgcatttacactcgcagttaatatcatagcaaagaaagttgttgaaaatgataaatttccctctggagtagaaaaaaccggaagtgatgaaccagccttcatgtattatatgaatgatggtgtttatggttcttttgcaagtaaactgtctgaggacttaaataccattccagaggttcacaagaaatacaaggaagatgagcctctgtttacaagcagcctttggggtccatcctgtgatgagcttgatcaaattgtggaaagctgtcttcttcctgagctgaatgtgggagattggcttatctttgataacatgggagcagattctttccatgaaccatctgcttttaatgattttcagaggccagccatttattacatgatgtcattcagtgattggtatgagatgcaagatgctggaattacttcagactcaatgatgaagaacttcttctttgtgccttcttgcattcagctgagccaagaagacagcttttccgctgaagcttaaacaggcattaacgcttctttagatctgaagttgcaggttaagcttgtctggtcaacattccagtgtggaaaaataatttaaacaatcttattctcttaattcttttggcaacaaaaactattagtaatagctatttgggaccagacaaaatcagctttcatctataattcattggggataatgggagatttagataatgtatccagatttaaacctaccagtttgtcctaccccttaagcgtttaaaataaaatatgcaacaaaatggatgacttagtggagatggaagcccattaattgggttccccattaaatcgtttacatacaagaacacagtttttatactaaggatttgtgtttaaagtcttgtaaagttcatgtctttcacccagatatatcaaatgttagaagaccagtgtgacttcattagataacgtttagtgtatttagaatgtgtaaatttgtgctttgaactgtagtttaataaatgtaaaattgcatcatagtatttgttgacctaatgtaacccttgtatgattgcaataaaattttgtgtagattttactgttttttcaggctaaaactttgggaaaggggctagctagcaaaggtagttttgaaatagatgtgtatatggactgttttgaagggtttttttctttatagcccagttaagttttgtttggctcggtgcatttttcatttatttaattagtaatttaagtaaagtgtttggtaaatcattgtgaagttcagattcattatggagagttgatgtgcagtaagcatgatgtttaacaattttaacaccaaaaatgttaatcctgcataaatcaactgtaataataaataggtgtttctgtatagatagaatgcatagagtaccttagtaaatctttgaatcacaatcttttggctgaaatggaagattctgttaaatactttgaataaacttggggggagggaaataaaattgcagaaaactgcagagcactaaaacttaaagaagggctacatctttatccagaaacctgttgctcttttgcacggaatgtttaaattcagagttgggatgggggttggggtgaagcacacttattatcttcagttgcagtgatttcaaatttaggattttttgttgttggtttgaactgtccccttagtttcttgttatttccaatttgttctgcttagtcattacttttaattcttttcttactaaaattttatggtggttgggggaagggagttagcatcactaacctgacagttgttgccaggaatttgctttgtttactgctagtatattagaaatcctagatctcagaatcacaatagtaataaacaacaggggtcattttttcctaacttactctgtgttcaggtgtggaatttctgtctcccaagaggaaatgtgacttcactttggtgccaatggacagaaaattctacctgtgctacataggagaagtttggaatgcacttaatagctggtttttacaccttgatttcgaggtggaaagaaattgatcatgaatctctaataaatttaaatctcttaaaccagtaggtgcttaatattttttgatttgattaatgcccatttaaatctcatgggttctattaaaaatatatatatatagggccccaatccattgccatcaaattgcccttggacttttccaaggtatattatggggttttatgcaaaattccaagctaccatgtaactttttttaaccatttaacaaggagggggaactgtttcctaccttctttacatgttgtgcattgttgtggtccagaaatgccaaacctttttaaagatggtgcaactttgagtccttggcttgactatacaggccttgaacttcatggcatatcaactttgccatatctgcaggagagctgttctataagaaatagctcagagttgcaaatatcacatgtgaatgatacggtaacttttaagaaatgtctgtattgtatttgaagactgtttgccataaatctgaaatttgaacctatgtatttcaatttggtatgctaaaaagttctgaattaatgtaaagttttttgttataatattgtaatctcagttcaaaagttaactgcaaatataaaacccaatgatttctatatagtaaattgaactgtaaaggtaacttgtgtgtgattctgaatacatagataaatgtttttattcctcat

SEQ ID NO: 433906 - DNA, 4092 bp, Homo sapiens
actttcaggctctgatcgcggccgcagtttttccttttttcttctgccgtcgccttctctgcctcttctcatcctttctcgctctgctgctctgcagtgtgacgagtccgaatcctcttcccacccagcccgcgcctttcttcttttgcctgcgctgttctatttctccttcggccgccgccgccactgctgcacacagctggtgtcggtgccgcgcttttacccccaagtcgttcccgcagcctatggcccaggccgccttgggtatttctgctcaaggtaaccacatccctctttaaaaattccgccgaaaaagagaagacgctttacccgactctttgggccgttatctcacggcgaactttctgaccaagtatacaactacccagagggcctaggagaagtgctgtatagagagcagttcgacttcaacgctgagccaccttgggaacctagctgatgataggggggttccatctcccaacttgtccattttgttgcatattctaaggacccagacataggcttggtggcccgtctcttgtctttcctggtttatgactttcggctttgtggaatacggctgagatgaaaggatttattgatgatgcaaactactccgttggcctgttggatgaaggaacaaaccttggaaatgttattgataactatgtttatgaacataccctgacagggaaaaatgcattttttgtgggagatcttggaaagattgtgaagaaacacagtcaatggcagaatgtagtggctcagataaagccattctacacagtgaagtgcaactctgctccagctgtacttgagattttggcagctcttggaaccggatttgcttgttccagtaaaaatgaaatggctttagtgcaagagttgggtgtacctccagaaaacattatttacataagtccttgcaagcaagtgtctcagataaagtatgcagcaaaagttggagtgaatatcctgacatgtgacaatgaaattgaattgaagaaaattgcacgtaatcacccaaatgccaaggtcttactacatattgcaacagaagataatattggaggtgaagagggtaacatgaagtttggcactaccctgaagaactgtaggcatctcttggaatgtgctaaggaacttgatgtccaaataattggggttaaatttcatgtttcgagtgcttgcaaagaatctcaagtatatgtacatgctctatctgatgctcgatgtgtgtttgacatggctggagaaattggctttacgatgaacatgttagacattggtggaggattcacgggaactgaatttcaattggaagaggttaatcatgttatcagccctctgttggatatctactttcctgaaggatctggtgttaagataatttcagaacccggaagctactatgtgtcttctgcatttacactcgcagttaatatcatagcaaagaaagttgttgaaaatgataaatttccctctggagtagaaaaaaccggaagtgatgaaccagccttcatgtattatatgaatgatggtgtttatggttcttttgcaagtaaactgtctgaggacttaaataccattccagaggttcacaagaaatacaaggaagatgagcctctgtttacaagcagcctttggggtccatcctgtgatgagcttgatcaaattgtggaaagctgtcttcttcctgagctgaatgtgggagattggcttatctttgataacatgggagcagattctttccatgaaccatctgcttttaatgattttcagaggccagccatttattacatgatgtcattcagtgattggtatgagatgcaagatgctggaattacttcagactcaatgatgaagaacttcttctttgtgccttcttgcattcagctgagccaagaagacagcttttccgctgaagcttaaacaggcattaacgcttctttagatctgaagttgcaggttaagcttgtctggtcaacattccagtgtggaaaaataatttaaacaatcttattctcttaattcttttggcaacaaaaactattagtaatagctatttgggaccagacaaaatcagctttcatctataattcattggggataatgggagatttagataatgtatccagatttaaacctaccagtttgtcctaccccttaagcgtttaaaataaaatatgcaacaaaatggatgacttagtggagatggaagcccattaattgggttccccattaaatcgtttacatacaagaacacagtttttatactaaggatttgtgtttaaagtcttgtaaagttcatgtctttcacccagatatatcaaatgttagaagaccagtgtgacttcattagataacgtttagtgtatttagaatgtgtaaatttgtgctttgaactgtagtttaataaatgtaaaattgcatcatagtatttgttgacctaatgtaacccttgtatgattgcaataaaattttgtgtagattttactgttttttcaggatatggactgttttgaagggtttttttctttatagcccagttaagttttgtttggctcggtgcatttttcatttatttaattagtaatttaagtaaagtgtttggtaaatcattgtgaagttcagattcattatggagagttgatgtgcagtaagcatgatgtttaacaattttaacaccaaaaatgttaatcctgcataaatcaactgtaataataaataggtgtttctgtatagatagaatgcatagagtaccttagtaaatctttgaatcacaatcttttggctgaaatggaagattctgttaaatactttgaataaacttggggggagggaaataaaattgcagaaaactgcagagcactaaaacttaaagaagggctacatctttatccagaaacctgttgctcttttgcacggaatgtttaaattcagagttgggatgggggttggggtgaagcacacttattatcttcagttgcagtgatttcaaatttaggattttttgttgttggtttgaactgtccccttagtttcttgttatttccaatttgttctgcttagtcattacttttaattcttttcttactaaaattttatggtggttgggggaagggagttagcatcactaacctgacagttgttgccaggaatttgctttgtttactgctagtatattagaaatcctagatctcagaatcacaatagtaataaacaacaggggtcattttttcctaacttactctgtgttcaggtgtggaatttctgtctcccaagaggaaatgtgacttcactttggtgccaatggacagaaaattctacctgtgctacataggagaagtttggaatgcacttaatagctggtttttacaccttgatttcgaggtggaaagaaattgatcatgaatctctaataaatttaaatctcttaaaccagtaggtgcttaatattttttgatttgattaatgcccatttaaatctcatgggttctattaaaaatatatatatatagggccccaatccattgccatcaaattgcccttggacttttccaaggtatattatggggttttatgcaaaattccaagctaccatgtaactttttttaaccatttaacaaggagggggaactgtttcctaccttctttacatgttgtgcattgttgtggtccagaaatgccaaacctttttaaagatggtgcaactttgagtccttggcttgactatacaggccttgaacttcatggcatatcaactttgccatatctgcaggagagctgttctataagaaatagctcagagttgcaaatatcacatgtgaatgatacggtaacttttaagaaatgtctgtattgtatttgaagactgtttgccataaatctgaaatttgaacctatgtatttcaatttggtatgctaaaaagttctgaattaatgtaaagttttttgttataatattgtaatctcagttcaaaagttaactgcaaatataaaacccaatgatttctatatagtaaattgaactgtaaaggtaacttgtgtgtgattctgaatacatagataaatgtttttattcctcat

SEQ ID NO: 433907 - DNA, 3872 bp, Homo sapiens
actttcaggctctgatcgcggccgcagtttttccttttttcttctgccgtcgccttctctgcctcttctcatcctttctcgctctgctgctctgcagtgtgacgagtccgaatcctcttcccacccagcccgcgcctttcttcttttgcctgcgctgttctatttctccttcggccgccgccgccactgctgcacacagctggtgtcggtgccgcgcttttacccccaagtcgttcccgcagcctatggcccaggccgccttgggtatttctgctcaaggtaaccacatccctctttaaaaattccgccgaaaaagagaagacgctttacccgactctttgggccgttatctcacggcgaactttctgaccaagtatacaactacccagagggcctaggagaagtgctgtatagagagcagttcgacttcaacgctgagccaccttgggaacctagctgatgataggggggttccatctcccaacttgtccattttgttgcatattctaaggacccagacataggcttggtggcccgtctcttgtctttcctggtttatgactttcggctttgtggaatacggctgagatgaaaggatttattgatgatgcaaactactccgttggcctgttggatgaaggaacaaaccttggaaatgttattgataactatgtttatgaacataccctgacagggaaaaatgcattttttgtgggagatcttggaaagattgtgaagaaacacagtcaatggcagaatgtagtggctcagataaagccattctacacagtgaagtgcaactctgctccagctgtacttgagattttggcagctcttggaaccggatttgcttgttccagtaaaaatgaaatggctttagtgcaagagttgggtgtacctccagaaaacattatttacataagtccttgcaagcaagtgtctcagataaagtatgcagcaaaagttggagtgaatatcctgacatgtgacaatgaaattgaattgaagaaaattgcacgtaatcacccaaatgccaaggtcttactacatattgcaacagaagataatattggaggtgaagagggtaacatgaagtttggcactaccctgaagaactgtaggcatctcttggaatgtgctaaggaacttgatgtccaaataattggggttaaatttcatgtttcgagtgcttgcaaagaatctcaagtatatgtacatgctctatctgatgctcgatgtgtgtttgacatggctggagaaattggctttacgatgaacatgttagacattggtggaggattcacgggaactgaatttcaattggaagaggttaatcatgttatcagccctctgttggatatctactttcctgaaggatctggtgttaagataatttcagaacccggaagctactatgtgtcttctgcatttacactcgcagttaatatcatagcaaagaaagttgttgaaaatgataaatttccctctggagtagaaaaaaccggaagtgatgaaccagccttcatgtattatatgaatgatggtgtttatggttcttttgcaagtaaactgtctgaggacttaaataccattccagaggttcacaagaaatacaaggaagatgagcctctgtttacaagcagcctttggggtccatcctgtgatgagcttgatcaaattgtggaaagctgtcttcttcctgagctgaatgtgggagattggcttatctttgataacatgggagcagattctttccatgaaccatctgcttttaatgattttcagaggccagccatttattacatgatgtcattcagtgattggtatgagatgcaagatgctggaattacttcagactcaatgatgaagaacttcttctttgtgccttcttgcattcagctgagccaagaagacagcttttccgctgaagcttaaacaggcattaacgcttctttagatctgaagttgcaggttaagcttgtctggtcaacattccagtgtggaaaaataatttaaacaatcttattctcttaattcttttggcaacaaaaactattagtaatagctatttgggaccagacaaaatcagctttcatctataattcattggggataatgggagatttagataatgtatccagatttaaacctaccagtttgtcctaccccttaagcgtttaaaataaaatatgcaacaaaatggatgacttagtggagatggaagcccattaattgggttccccattaaatcgtttacatacaagaacacagtttttatactaaggatttgtgtttaaagtcttgtaaagttcatgtctttcacccagatatatcaaatgttagaagaccagtgtgacttcattagataacgtttagtgtatttagaatgtgtaaatttgtgctttgaactgtagtttaataaatgtaaaattgcatcatagtatttgttgacctaatgtaacccttgtatgattgcaataaaattttgtgtagattttactgttttttcaggctaaaactttgggaaaggggctagctagcaaaggtagttttgaaatagatgtgtatatggactgttttgaagggtttttttctttatagcccagttaagttttgtttggctcggtgcatttttcatttatttaattagtaatttaagtaaagtgtttggtaaatcattgtgaagttcagattcattatggagagttgatgtgcagtaagcatgatgtttaacaattttaacaccaaaaatgttaatcctgcataaatcaactgtaataataaataggtgtttctgtatagatagaatgcatagagtaccttatttcttgttatttccaatttgttctgcttagtcattacttttaattcttttcttactaaaattttatggtggttgggggaagggagttagcatcactaacctgacagttgttgccaggaatttgctttgtttactgctagtatattagaaatcctagatctcagaatcacaatagtaataaacaacaggggtcattttttcctaacttactctgtgttcaggtgtggaatttctgtctcccaagaggaaatgtgacttcactttggtgccaatggacagaaaattctacctgtgctacataggagaagtttggaatgcacttaatagctggtttttacaccttgatttcgaggtggaaagaaattgatcatgaatctctaataaatttaaatctcttaaaccagtaggtgcttaatattttttgatttgattaatgcccatttaaatctcatgggttctattaaaaatatatatatatagggccccaatccattgccatcaaattgcccttggacttttccaaggtatattatggggttttatgcaaaattccaagctaccatgtaactttttttaaccatttaacaaggagggggaactgtttcctaccttctttacatgttgtgcattgttgtggtccagaaatgccaaacctttttaaagatggtgcaactttgagtccttggcttgactatacaggccttgaacttcatggcatatcaactttgccatatctgcaggagagctgttctataagaaatagctcagagttgcaaatatcacatgtgaatgatacggtaacttttaagaaatgtctgtattgtatttgaagactgtttgccataaatctgaaatttgaacctatgtatttcaatttggtatgctaaaaagttctgaattaatgtaaagttttttgttataatattgtaatctcagttcaaaagttaactgcaaatataaaacccaatgatttctatatagtaaattgaactgtaaaggtaacttgtgtgtgattctgaatacatagataaatgtttttattcctcat

SEQ ID NO: 433908 - DNA, 3242 bp, Homo sapiens
tcacttgattcatccgtcgctggatttgggagcactggcaacataatcaacacacttcctacaatcttcaggcttcacatgtgctgatgatgatgtaaaccaactctgccccaatcatctccccttctcttagggtcttactacatattgcaacagaagataatattggaggtgaagagggtaacatgaagtttggcactaccctgaagaactgtaggcatctcttggaatgtgctaaggaacttgatgtccaaataattggggttaaatttcatgtttcgagtgcttgcaaagaatctcaagtatatgtacatgctctatctgatgctcgatgtgtgtttgacatggctggagaaattggctttacgatgaacatgttagacattggtggaggattcacgggaactgaatttcaattggaagaggttaatcatgttatcagccctctgttggatatctactttcctgaaggatctggtgttaagataatttcagaacccggaagctactatgtgtcttctgcatttacactcgcagttaatatcatagcaaagaaagttgttgaaaatgataaatttccctctggagtagaaaaaaccggaagtgatgaaccagccttcatgtattatatgaatgatggtgtttatggttcttttgcaagtaaactgtctgaggacttaaataccattccagaggttcacaagaaatacaaggaagatgagcctctgtttacaagcagcctttggggtccatcctgtgatgagcttgatcaaattgtggaaagctgtcttcttcctgagctgaatgtgggagattggcttatctttgataacatgggagcagattctttccatgaaccatctgcttttaatgattttcagaggccagccatttattacatgatgtcattcagtgattggtatgagatgcaagatgctggaattacttcagactcaatgatgaagaacttcttctttgtgccttcttgcattcagctgagccaagaagacagcttttccgctgaagcttaaacaggcattaacgcttctttagatctgaagttgcaggttaagcttgtctggtcaacattccagtgtggaaaaataatttaaacaatcttattctcttaattcttttggcaacaaaaactattagtaatagctatttgggaccagacaaaatcagctttcatctataattcattggggataatgggagatttagataatgtatccagatttaaacctaccagtttgtcctaccccttaagcgtttaaaataaaatatgcaacaaaatggatgacttagtggagatggaagcccattaattgggttccccattaaatcgtttacatacaagaacacagtttttatactaaggatttgtgtttaaagtcttgtaaagttcatgtctttcacccagatatatcaaatgttagaagaccagtgtgacttcattagataacgtttagtgtatttagaatgtgtaaatttgtgctttgaactgtagtttaataaatgtaaaattgcatcatagtatttgttgacctaatgtaacccttgtatgattgcaataaaattttgtgtagattttactgttttttcaggctaaaactttgggaaaggggctagctagcaaaggtagttttgaaatagatgtgtatatggactgttttgaagggtttttttctttatagcccagttaagttttgtttggctcggtgcatttttcatttatttaattagtaatttaagtaaagtgtttggtaaatcattgtgaagttcagattcattatggagagttgatgtgcagtaagcatgatgtttaacaattttaacaccaaaaatgttaatcctgcataaatcaactgtaataataaataggtgtttctgtatagatagaatgcatagagtaccttagtaaatctttgaatcacaatcttttggctgaaatggaagattctgttaaatactttgaataaacttggggggagggaaataaaattgcagaaaactgcagagcactaaaacttaaagaagggctacatctttatccagaaacctgttgctcttttgcacggaatgtttaaattcagagttgggatgggggttggggtgaagcacacttattatcttcagttgcagtgatttcaaatttaggattttttgttgttggtttgaactgtccccttagtttcttgttatttccaatttgttctgcttagtcattacttttaattcttttcttactaaaattttatggtggttgggggaagggagttagcatcactaacctgacagttgttgccaggaatttgctttgtttactgctagtatattagaaatcctagatctcagaatcacaatagtaataaacaacaggggtcattttttcctaacttactctgtgttcaggtgtggaatttctgtctcccaagaggaaatgtgacttcactttggtgccaatggacagaaaattctacctgtgctacataggagaagtttggaatgcacttaatagctggtttttacaccttgatttcgaggtggaaagaaattgatcatgaatctctaataaatttaaatctcttaaaccagtaggtgcttaatattttttgatttgattaatgcccatttaaatctcatgggttctattaaaaatatatatatatagggccccaatccattgccatcaaattgcccttggacttttccaaggtatattatggggttttatgcaaaattccaagctaccatgtaactttttttaaccatttaacaaggagggggaactgtttcctaccttctttacatgttgtgcattgttgtggtccagaaatgccaaacctttttaaagatggtgcaactttgagtccttggcttgactatacaggccttgaacttcatggcatatcaactttgccatatctgcaggagagctgttctataagaaatagctcagagttgcaaatatcacatgtgaatgatacggtaacttttaagaaatgtctgtattgtatttgaagactgtttgccataaatctgaaatttgaacctatgtatttcaatttggtatgctaaaaagttctgaattaatgtaaagttttttgttataatattgtaatctcagttcaaaagttaactgcaaatataaaacccaatgatttctatatagtaaattgaactgtaaaggtaacttgtgtgtgattctgaatacatagataaatgtttttattcctcat

SEQ ID NO: 433909 - DNA, 3870 bp, Homo sapiens
actttcaggctctgatcgcggccgcagtttttccttttttcttctgccgtcgccttctctgcctcttctcatcctttctcgctctgctgctctgcagtgtgacgagtccgaatcctcttcccacccagcccgcgcctttcttcttttgcctgcgctgttctatttctccttcggccgccgccgccactgctgcacacagctggtgtcggtgccgcgcttttacccccaagtcgttcccgcagcctatggcccaggccgccttgggtatttctgctcaaggtaaccacatccctctttaaaaattccgccgaaaaagagaagacgctttacccgactctttgggccgttatctcacggcgaactttctgaccaagtatacaactacccagagggcctaggagaagtgctgtatagagagcagttcgacttcaacgctgagccaccttgggaacctagctgatgataggggggttccatctcccaacttgtccattttgttgcatattctaaggacccagacataggcttggtggcccgtctcttgtctttcctggtttatgactttcggctttgtggaatacggctgagatgaaaggatttattgatgatgcaaactactccgttggcctgttggatgaaggaacaaaccttggaaatgttattgataactatgtttatgaacataccctgacagggaaaaatgcattttttgtgggagatcttggaaagattgtgaagaaacacagtcaatggcagaatgtagtggctcagataaagccattctacacagtgaagtgcaactctgctccagctgtacttgagattttggcagctcttggaaccggatttgcttgttccagtaaaaatgaaatggctttagtgcaagagttgggtgtacctccagaaaacattatttacataagtccttgcaagcaagtgtctcagataaagtatgcagcaaaagttggagtgaatatcctgacatgtgacaatgaaattgaattgaagaaaattgcacgtaatcacccaaatgccaaggtcttactacatattgcaacagaagataatattggaggtgaagagggtaacatgaagtttggcactaccctgaagaactgtaggcatctcttggaatgtgctaaggaacttgatgtccaaataattggggttaaatttcatgtttcgagtgcttgcaaagaatctcaagtatatgtacatgctctatctgatgctcgatgtgtgtttgacatggctggagaaattggctttacgatgaacatgttagacattggtggaggattcacgggaactgaatttcaattggaagaggttaatcatgttatcagccctctgttggatatctactttcctgaaggatctggtgttaagataatttcagaacccggaagctactatgtgtcttctgcatttacactcgcagttaatatcatagcaaagaaagttgttgaaaatgataaatttccctctggagtagaaaaaaccggaagtgatgaaccagccttcatgtattatatgaatgatggtgtttatggttcttttgcaagtaaactgtctgaggacttaaataccattccagaggttcacaagaaatacaaggaagatgagcctctgtttacaagcagctccgctgaagcttaaacaggcattaacgcttctttagatctgaagttgcaggttaagcttgtctggtcaacattccagtgtggaaaaataatttaaacaatcttattctcttaattcttttggcaacaaaaactattagtaatagctatttgggaccagacaaaatcagctttcatctataattcattggggataatgggagatttagataatgtatccagatttaaacctaccagtttgtcctaccccttaagcgtttaaaataaaatatgcaacaaaatggatgacttagtggagatggaagcccattaattgggttccccattaaatcgtttacatacaagaacacagtttttatactaaggatttgtgtttaaagtcttgtaaagttcatgtctttcacccagatatatcaaatgttagaagaccagtgtgacttcattagataacgtttagtgtatttagaatgtgtaaatttgtgctttgaactgtagtttaataaatgtaaaattgcatcatagtatttgttgacctaatgtaacccttgtatgattgcaataaaattttgtgtagattttactgttttttcaggctaaaactttgggaaaggggctagctagcaaaggtagttttgaaatagatgtgtatatggactgttttgaagggtttttttctttatagcccagttaagttttgtttggctcggtgcatttttcatttatttaattagtaatttaagtaaagtgtttggtaaatcattgtgaagttcagattcattatggagagttgatgtgcagtaagcatgatgtttaacaattttaacaccaaaaatgttaatcctgcataaatcaactgtaataataaataggtgtttctgtatagatagaatgcatagagtaccttagtaaatctttgaatcacaatcttttggctgaaatggaagattctgttaaatactttgaataaacttggggggagggaaataaaattgcagaaaactgcagagcactaaaacttaaagaagggctacatctttatccagaaacctgttgctcttttgcacggaatgtttaaattcagagttgggatgggggttggggtgaagcacacttattatcttcagttgcagtgatttcaaatttaggattttttgttgttggtttgaactgtccccttagtttcttgttatttccaatttgttctgcttagtcattacttttaattcttttcttactaaaattttatggtggttgggggaagggagttagcatcactaacctgacagttgttgccaggaatttgctttgtttactgctagtatattagaaatcctagatctcagaatcacaatagtaataaacaacaggggtcattttttcctaacttactctgtgttcaggtgtggaatttctgtctcccaagaggaaatgtgacttcactttggtgccaatggacagaaaattctacctgtgctacataggagaagtttggaatgcacttaatagctggtttttacaccttgatttcgaggtggaaagaaattgatcatgaatctctaataaatttaaatctcttaaaccagtaggtgcttaatattttttgatttgattaatgcccatttaaatctcatgggttctattaaaaatatatatatatagggccccaatccattgccatcaaattgcccttggacttttccaaggtatattatggggttttatgcaaaattccaagctaccatgtaactttttttaaccatttaacaaggagggggaactgtttcctaccttctttacatgttgtgcattgttgtggtccagaaatgccaaacctttttaaagatggtgcaactttgagtccttggcttgactatacaggccttgaacttcatggcatatcaactttgccatatctgcaggagagctgttctataagaaatagctcagagttgcaaatatcacatgtgaatgatacggtaacttttaagaaatgtctgtattgtatttgaagactgtttgccataaatctgaaatttgaacctatgtatttcaatttggtatgctaaaaagttctgaattaatgtaaagttttttgttataatattgtaatctcagttcaaaagttaactgcaaatataaaacccaatgatttctatatagtaaattgaactgtaaaggtaacttgtgtgtgattctgaatacatagataaatgtttttattcctcat

SEQ ID NO: 433910 - DNA, 3894 bp, Homo sapiens
actttcaggctctgatcgcggccgcagtttttccttttttcttctgccgtcgccttctctgcctcttctcatcctttctcgctctgctgctctgcagtgtgacgagtccgaatcctcttcccacccagcccgcgcctttcttcttttgcctgcgctgttctatttctccttcggccgccgccgccactgctgcacacagctggtgtcggtgccgcgcttttacccccaagtcgttcccgcagcctatggcccaggccgccttgggtatttctgctcaaggtaaccacatccctctttaaaaattccgccgaaaaagagaagacgctttacccgactctttgggccgttatctcacggcgaactttctgaccaagtatacaactacccagagggcctaggagaagtgctgtatagagagcagttcgacttcaacgctgagccaccttgggaacctagctgatgataggggggttccatctcccaacttgtccattttgttgcatattctaaggacccagacataggcttggtggcccgtctcttgtctttcctggtttatgactttcggctttgtggaatacggctgagatgaaaggatttattgatgatgcaaactactccgttggcctgttggatgaaggaacaaaccttggaaatgttattgataactatgtttatgaacataccctgacagggaaaaatgcattttttgtgggagatcttggaaagattgtgaagaaacacagtcaatggcagaatgtagtggctcagataaagccattctacacagtgaagtgcaactctgctccagctgtacttgagattttggcagctcttggaaccggatttgcttgttccagtaaaaatgaaatggctttagtgcaagagttgggtgtacctccagaaaacattatttacataagtccttgcaagcaagtgtctcagataaagtatgcagcaaaagttggagtgaatatcctgacatgtgacaatgaaattgaattgaagaaaattgcacgtaatcacccaaatgccaaggtcttactacatattgcaacagaagataatattggaggtgaagagggtaacatgaagtttggcactaccctgaagaactgtaggcatctcttggaatgtgctaaggaacttgatgtccaaataattggggttaaatttcatgtttcgagtgcttgcaaagaatctcaagtatatgtacatgctctatctgatgctcgatgtgtgtttgacatggctggagaaattggctttacgatgaacatgttagacattggtggaggattcacgggaactgaatttcaattggaagaggttaatcatgttatcagccctctgttggatatctactttcctgaaggatctggtgttaagataatttcagaacccggaagctactatgtgtcttctgcatttacactcgcagttaatatcatagcaaagaaagttgttgaaaatgataaatttccctctggagtagaaaaaaccggaagtgatgaaccagccttcatgtattatatgaatgatggtgtttatggttcttttgcaagtaaactgtctgaggacttaaataccattccagaggttcacaagaaatacaaggaagatgagcctctgtttacaagcagcctttggggtccatcctgtgatgagtccgctgaagcttaaacaggcattaacgcttctttagatctgaagttgcaggttaagcttgtctggtcaacattccagtgtggaaaaataatttaaacaatcttattctcttaattcttttggcaacaaaaactattagtaatagctatttgggaccagacaaaatcagctttcatctataattcattggggataatgggagatttagataatgtatccagatttaaacctaccagtttgtcctaccccttaagcgtttaaaataaaatatgcaacaaaatggatgacttagtggagatggaagcccattaattgggttccccattaaatcgtttacatacaagaacacagtttttatactaaggatttgtgtttaaagtcttgtaaagttcatgtctttcacccagatatatcaaatgttagaagaccagtgtgacttcattagataacgtttagtgtatttagaatgtgtaaatttgtgctttgaactgtagtttaataaatgtaaaattgcatcatagtatttgttgacctaatgtaacccttgtatgattgcaataaaattttgtgtagattttactgttttttcaggctaaaactttgggaaaggggctagctagcaaaggtagttttgaaatagatgtgtatatggactgttttgaagggtttttttctttatagcccagttaagttttgtttggctcggtgcatttttcatttatttaattagtaatttaagtaaagtgtttggtaaatcattgtgaagttcagattcattatggagagttgatgtgcagtaagcatgatgtttaacaattttaacaccaaaaatgttaatcctgcataaatcaactgtaataataaataggtgtttctgtatagatagaatgcatagagtaccttagtaaatctttgaatcacaatcttttggctgaaatggaagattctgttaaatactttgaataaacttggggggagggaaataaaattgcagaaaactgcagagcactaaaacttaaagaagggctacatctttatccagaaacctgttgctcttttgcacggaatgtttaaattcagagttgggatgggggttggggtgaagcacacttattatcttcagttgcagtgatttcaaatttaggattttttgttgttggtttgaactgtccccttagtttcttgttatttccaatttgttctgcttagtcattacttttaattcttttcttactaaaattttatggtggttgggggaagggagttagcatcactaacctgacagttgttgccaggaatttgctttgtttactgctagtatattagaaatcctagatctcagaatcacaatagtaataaacaacaggggtcattttttcctaacttactctgtgttcaggtgtggaatttctgtctcccaagaggaaatgtgacttcactttggtgccaatggacagaaaattctacctgtgctacataggagaagtttggaatgcacttaatagctggtttttacaccttgatttcgaggtggaaagaaattgatcatgaatctctaataaatttaaatctcttaaaccagtaggtgcttaatattttttgatttgattaatgcccatttaaatctcatgggttctattaaaaatatatatatatagggccccaatccattgccatcaaattgcccttggacttttccaaggtatattatggggttttatgcaaaattccaagctaccatgtaactttttttaaccatttaacaaggagggggaactgtttcctaccttctttacatgttgtgcattgttgtggtccagaaatgccaaacctttttaaagatggtgcaactttgagtccttggcttgactatacaggccttgaacttcatggcatatcaactttgccatatctgcaggagagctgttctataagaaatagctcagagttgcaaatatcacatgtgaatgatacggtaacttttaagaaatgtctgtattgtatttgaagactgtttgccataaatctgaaatttgaacctatgtatttcaatttggtatgctaaaaagttctgaattaatgtaaagttttttgttataatattgtaatctcagttcaaaagttaactgcaaatataaaacccaatgatttctatatagtaaattgaactgtaaaggtaacttgtgtgtgattctgaatacatagataaatgtttttattcctcat

SEQ ID NO: 433911 - DNA, 3621 bp, Homo sapiens
actttcaggctctgatcgcggccgcagtttttccttttttcttctgccgtcgccttctctgcctcttctcatcctttctcgctctgctgctctgcagtgtgacgagtccgaatcctcttcccacccagcccgcgcctttcttcttttgcctgcgctgttctatttctccttcggccgccgccgccactgctgcacacagctggtgtcggtgccgcgcttttacccccaagtcgttcccgcagcctatggcccaggccgccttgggtatttctgctcaaggtaaccacatccctctttaaaaattccgccgaaaaagagaagacgctttacccgactctttgggccgttatctcacggcgaactttctgaccaagtatacaactacccagagggcctaggagaagtgctgtatagagagcagttcgacttcaacgctgagccaccttgggaacctagctgatgataggggggttccatctcccaacttgtccattttgttgcatattctaaggacccagacataggcttggtggcccgtctcttgtctttcctggtttatgactttcggctttgtggaatacggctgagatgaaaggatttattgatgatgcaaactactccgttggcctgttggatgaaggaacaaaccttggaaatgttattgataactatgtttatgaacataccctgacagggaaaaatgcattttttgtgggagatcttggaaagattgtgaagaaacacagtcaatggcagaatgtagtggctcagataaagccattctacacagtgaagtgcaactctgctccagctgtacttgagattttggcagctcttggaaccggatttgcttgttccagtaaaaatgaaatggctttagtgcaagagttgggtgtacctccagaaaacattatttacataagtccttgcaagcaagtgtctcagataaagtatgcagcaaaagttggagtgaatatcctgacatgtgacaatgaaattgaattgaagaaaattgcacgtaatcacccaaatgccaaggtcttactacatattgcaacagaagataatattggaggtgaagagggtaacatgaagtttggcactaccctgaagaactgtaggcatctcttggaatgtgctaaggaacttgatgtccaaataattggggttaaatttcatgtttcgagtgcttgcaaagaatctcaagtatatgtacatgctctatctgatgctcgatgtgtgtttgacatggctggagaaattggctttacgatgaacatgttagacattggtggaggattcacgggaactgaatttcaattggaagaggttaatcatgttatcagccctctgttggatatctactttcctgaaggatctggtgttaagataatttcagaacccggaagctactatgtgtcttctgcatttacactcgcagttaatatcatagcaaagaaagttgttgaaaatgataaatttccctctggagtagaaaaaaccggaagtgatgaaccagccttcatgtattatatgaatgatggtgtttatggttcttttgcaagtaaactgtctgaggacttaaataccattccagaggttcacaagaaatacaaggaagatgagcctctgtttacaagcagcctttggggtccatcctgtgatgagcttgatcaaattgtggaaagctgtcttcttcctgagctgaatgtgggagattggcttatctttgataacatgggagcagattctttccatgaaccatctgcttttaatgattttcagaggccagccatttattacatgatgtcattcagtgattggtatgagatgcaagatgctggaattacttcagactcaatgatgaagaacttcttctttgtgccttcttgcattcagctgagccaagaagacagcttttccgctgaagcttaaacaggcattaacgcttctttagatctgaagttgcaggttaagcttgtctggtcaacattccagtgtggaaaaataatttaaacaatcttattctcttaattcttttggcaacaaaaactattagtaatagctatttgggaccagacaaaatcagctttcatctataattcattggggataatgggagatttagataatgtatccagatttaaacctaccagtttgtcctaccccttaagcgtttaaaataaaatatgcaacaaaatggatgacttagtggagatggaagcccattaattgggttccccattaaatcgtttacatacaagaacacagtttttatactaaggatttgtgtttaaagtcttgtaaagttcatgtctttcacccagatatatcaaatgttagaagaccagtgtgacttcattagataacgtttagtgtatttagaatgtgtaaatttgtgctttgaactgtagtttaataaatgtaaaattgcatcatagtatttgttgacctaatgtaacccttgtatgattgcaataaaattttgtgtagattttactgttttttcaggctaaaactttgggaaaggggctagctagcaaaggtagttttgaaatagatgtgtatatggactgttttgaagggtttttttctttatagcccagttaagttttgtttggctcggtgcatttttcatttatttaattagtaatttaagtaaagtgtttggtaaatcattgtgaagttcagattcattatggagagttgatgtgcagtaagcatgatgtttaacaattttaacaccaaaaatgttaatcctgcataaatcaactgtaataataaataggtgtttctgtatagatagaatgcatagagtaccttagtaaatctttgaatcacaatcttttggctgaaatggaagattctgttaaatactttgaataaacttggggggagggaaataaaattgcagaaaactgcagagcactaaaacttaaagaagggctacatctttatccagaaacctgttgctcttttgcacggaatgtttaaattcagagttgggatgggggttggggtgaagcacacttattatcttcagttgcagtgatttcaaatttaggattttttgttgttggtttgaactgtccccttagtttcttgttatttccaatttaaaattccaagctaccatgtaactttttttaaccatttaacaaggagggggaactgtttcctaccttctttacatgttgtgcattgttgtggtccagaaatgccaaacctttttaaagatggtgcaactttgagtccttggcttgactatacaggccttgaacttcatggcatatcaactttgccatatctgcaggagagctgttctataagaaatagctcagagttgcaaatatcacatgtgaatgatacggtaacttttaagaaatgtctgtattgtatttgaagactgtttgccataaatctgaaatttgaacctatgtatttcaatttggtatgctaaaaagttctgaattaatgtaaagttttttgttataatattgtaatctcagttcaaaagttaactgcaaatataaaacccaatgatttctatatagtaaattgaactgtaaaggtaacttgtgtgtgattctgaatacatagataaatgtttttattcctcat

SEQ ID NO: 433912 - DNA, 4409 bp, Homo sapiens
actttcaggctctgatcgcggccgcagtttttccttttttcttctgccgtcgccttctctgcctcttctcatcctttctcgctctgctgctctgcagtgtgacgagtccgaatcctcttcccacccagcccgcgcctttcttcttttgcctgcgctgttctatttctccttcggccgccgccgccactgctgcacacagctggtgtcggtgccgcgcttttacccccaagtcgttcccgcagcctatggcccaggccgccttgggtatttctgctcaaggtaaccacatccctctttaaaaattccgccgaaaaagagaagacgctttacccgactctttgggccgttatctcacggcgaactttctgaccaagtatacaactacccagagggcctaggagaagtgctgtatagagagcagttcgacttcaacgctgagccaccttgggaacctagctgatgataggggggttccatctcccaacttgtccattttgttgcatattctaaggacccagacataggcttggtggcccgtctcttgtctttcctggtttatgactttcggctttgtggaatacggctgagatgaaaggatttattgatgatgcaaactactccgttggcctgttggatgaaggaacaaaccttggaaatgttattgataactatgtttatgaacataccctgacagggaaaaatgcattttttgtgggagatcttggaaagattgtgaagaaacacagtcaatggcagaatgtagtggctcagataaagccattctacacagtgaagtgcaactctgctccagctgtacttgagattttggcagctcttggaaccggatttgcttgttccagtaaaaatgaaatggctttagtgcaagagttgggtgtacctccagaaaacattatttacataagtccttgcaagcaagtgtctcagataaagtatgcagcaaaagttggagtgaatatcctgacatgtgacaatgaaattgaattgaagaaaattgcacgtaatcacccaaatgccaaggtcttactacatattgcaacagaagataatattggaggtgaagagggtaacatgaagtttggcactaccctgaagaactgtaggcatctcttggaatgtgctaaggaacttgatgtccaaataattggggttaaatttcatgtttcgagtgcttgcaaagaatctcaagtatatgtacatgctctatctgatgctcgatgtgtgtttgacatggctggagaaattggctttacgatgaacatgttagacattggtggaggattcacgggaactgaatttcaattggaagaggttaatcatgttatcagccctctgttggatatctactttcctgaaggatctggtgttaagataatttcagaacccggaagctactatgtgtcttctgcatttacactcgcagttaatatcatagcaaagaaagttgttgaaaatgataaatttccctctggagtagaaaaaaccggaagtgatgaaccagccttcatgtattatatgaatgatggtgtttatggttcttttgcaagtaaactgtctgaggacttaaataccattccagaggttcacaagaaatacaaggaagatgagcctctgtttacaagcagcctttggggtccatcctgtgatgagcttgatcaaattgtggaaagctgtcttcttcctgagctgaatgtgggagattggcttatctttgataacatgggagcagattctttccatgaaccatctgcttttaatgattttcagaggccagccatttattacatgatgtcattcagtgattggtatgagatgcaagatgctggaattacttcagactcaatgatgaagaacttcttctttgtgccttcttgcattcagctgagccaagaagacagcttttccgctgaagcttaaacaggcattaacgcttctttagatctgaagttgcaggttaagcttgtctggtcaacattccagtgtggaaaaataatttaaacaatcttattctcttaattcttttggcaacaaaaactattagtaatagctatttgggaccagacaaaatcagctttcatctataattcattggggataatgggagatttagataatgtatccagatttaaacctaccagtttgtcctaccccttaagcgtttaaaataaaatatgcaacaaaatggatgacttagtggagatggaagcccattaattgggttccccattaaatcgtttacatacaagaacacagtttttatactaaggatttgtgtttaaagtcttgtaaagttcatgtctttcacccagatatatcaaatgttagaagaccagtgtgacttcattagataacgtttagtgtatttagaatgtgtaaatttgtgctttgaactgtagtttaataaatgtaaaattgcatcatagtatttgttgacctaatgtaacccttgtatgattgcaataaaattttgtgtagattttactgttttttcaggctaaaactttgggaaaggggctagctagcaaaggtagttttgaaatagatgtgtatatggactgttttgaagggtttttttctttatagcccagttaagttttgtttggctcggtgcatttttcatttatttaattagtaatttaagtaaagtgtttggtaaatcattgtgaagttcagattcattatggagagttgatgtgcagtaagcatgatgtttaacaattttaacaccaaaaatgttaatcctgcataaatcaactgtaataataaataggtgtttctgtatagatagaatgcatagagtaccttagtaaatctttgaatcacaatcttttggctgaaatggaagattctgttaaatactttgaataaacttggggggagggaaataaaattgcagaaaactgcagagcactaaaacttaaagaagggctacatctttatccagaaacctgttgctcttttgcacggaatgtttaaattcagagttgggatgggggttggggtgaagcacacttattatcttcagttgcagtgatttcaaatttaggattttttgttgttggtttgaactgtccccttagtttcttgttatttccaatttgttctgcttagtcattacttttaattcttttcttactaaaattttatggtggttgggggaagggagttagcatcactaacctgacagttgttgccaggaatttgctttgtttactgctagtatattagaaatcctagatctcagaatcacaatagtaataaacaacaggggtcattttttcctaacttactctgtgttcaggtgtggaatttctgtctcccaagaggaaatgtgacttcactttggtgccaatggacagaaaattctacctgtgctacataggagaagtttggaatgcacttaatagctggtttttacaccttgatttcgaggtggaaagaaattgatcatgaatctctaataaatttaaatctcttaaaccagtaggtgcttaatattttttgatttgattaatgcccatttaaatctcatgggttctattaaaaatatatatatatagggccccaatccattgccatcaaattgcccttggacttttccaaggtatattatggggttttatgcaaaattccaagctaccatgtaactttttttaaccatttaacaaggagggggaactgtttcctaccttctttacatgttgtgcattgttgtggtccagaaatgccaaacctttttaaagatggtgcaactttgagtccttggcttgactatacaggccttgaacttcatggcatatcaactttgccatatctgcaggagagctgttctataagaaatagctcagagttgcaaatatcacatgtgaatgatacggtaacttttaagaaatgtctgtattgtatttgaagactgtttgccataaatctgaaatttgaacctatgtatttcaatttggtatgctaaaaagttctgaattaatgtaaagttttttgttataatattgtaatctcagttcaaaagttaactgcaaatataaaacccaatgatttctatatagtaaattgaactgtacatcaatttattatgaattaaatttgaaaagcatcacagatttaaaaacaaagtacaaaagagcctgattctttttaattccacaaatacctagcatctcaaagtaacatgtaaacaaacttctatgctgctcaatgaatccttccaatttcaataataaactaaatagtattggatctagtatatgactttcatgtgtaagttatggttctatccattactttaacaatattactgatgtaacagagaaaaattttcaactattgtatttatttaaaacaaactgacaagttcaagcacctgtcttcagaaaagc

SEQ ID NO: 433913 - DNA, 2660 bp, Homo sapiens
actttcaggctctgatcgcggccgcagtttttccttttttcttctgccgtcgccttctctgcctcttctcatcctttctcgctctgctgctctgcagtgtgacgagtccgaatcctcttcccacccagcccgcgcctttcttcttttgcctgcgctgttctatttctccttcggccgccgccgccactgctgcacacagctggtgtcggtgccgcgcttttacccccaagtcgttcccgcagcctatggcccaggccgccttgggtatttctgctcaagggtcttactacatattgcaacagaagataatattggaggtgaagagggtaacatgaagtttggcactaccctgaagaactgtaggcatctcttggaatgtgctaaggaacttgatgtccaaataattggggttaaatttcatgtttcgagtgcttgcaaagaatctcaagtatatgtacatgctctatctgatgctcgatgtgtgtttgacatggctggagaaattggctttacgatgaacatgttagacattggtggaggattcacgggaactgaatttcaattggaagaggttaatcatgttatcagccctctgttggatatctactttcctgaaggatctggtgttaagataatttcagaacccggaagctactatgtgtcttctgcatttacactcgcagttaatatcatagcaaagaaagttgttgaaaatggatgacttagtggagatggaagcccattaattgggttccccattaaatcgtttacatacaagaacacagtttttatactaaggatttgtgtttaaagtcttgtaaagttcatgtctttcacccagatatatcaaatgttagaagaccagtgtgacttcattagataacgtttagtgtatttagaatgtgtaaatttgtgctttgaactgtagtttaataaatgtaaaattgcatcatagtatttgttgacctaatgtaacccttgtatgattgcaataaaattttgtgtagattttactgttttttcaggctaaaactttgggaaaggggctagctagcaaaggtagttttgaaatagatgtgtatatggactgttttgaagggtttttttctttatagcccagttaagttttgtttggctcggtgcatttttcatttatttaattagtaatttaagtaaagtgtttggtaaatcattgtgaagttcagattcattatggagagttgatgtgcagtaagcatgatgtttaacaattttaacaccaaaaatgttaatcctgcataaatcaactgtaataataaataggtgtttctgtatagatagaatgcatagagtaccttagtaaatctttgaatcacaatcttttggctgaaatggaagattctgttaaatactttgaataaacttggggggagggaaataaaattgcagaaaactgcagagcactaaaacttaaagaagggctacatctttatccagaaacctgttgctcttttgcacggaatgtttaaattcagagttgggatgggggttggggtgaagcacacttattatcttcagttgcagtgatttcaaatttaggattttttgttgttggtttgaactgtccccttagtttcttgttatttccaatttgttctgcttagtcattacttttaattcttttcttactaaaattttatggtggttgggggaagggagttagcatcactaacctgacagttgttgccaggaatttgctttgtttactgctagtatattagaaatcctagatctcagaatcacaatagtaataaacaacaggggtcattttttcctaacttactctgtgttcaggtgtggaatttctgtctcccaagaggaaatgtgacttcactttggtgccaatggacagaaaattctacctgtgctacataggagaagtttggaatgcacttaatagctggtttttacaccttgatttcgaggtggaaagaaattgatcatgaatctctaataaatttaaatctcttaaaccagtaggtgcttaatattttttgatttgattaatgcccatttaaatctcatgggttctattaaaaatatatatatatagggccccaatccattgccatcaaattgcccttggacttttccaaggtatattatggggttttatgcaaaattccaagctaccatgtaactttttttaaccatttaacaaggagggggaactgtttcctaccttctttacatgttgtgcattgttgtggtccagaaatgccaaacctttttaaagatggtgcaactttgagtccttggcttgactatacaggccttgaacttcatggcatatcaactttgccatatctgcaggagagctgttctataagaaatagctcagagttgcaaatatcacatgtgaatgatacggtaacttttaagaaatgtctgtattgtatttgaagactgtttgccataaatctgaaatttgaacctatgtatttcaatttggtatgctaaaaagttctgaattaatgtaaagttttttgttataatattgtaatctcagttcaaaagttaactgcaaatataaaacccaatgatttctatatagtaaattgaactgtaaaggtaacttgtgtgtgattctgaatacatagataaatgtttttattcctcat

SEQ ID NO: 433914 - DNA, 3773 bp, Homo sapiens
  misc_feature (3725)..(3725): n is a, c, g, or t
  misc_feature (3767)..(3767): n is a, c, g, or t
actttcaggctctgatcgcggccgcagtttttccttttttcttctgccgtcgccttctctgcctcttctcatcctttctcgctctgctgctctgcagtgtgacgagtccgaatcctcttcccacccagcccgcgcctttcttcttttgcctgcgctgttctatttctccttcggccgccgccgccactgctgcacacagctggtgtcggtgccgcgcttttacccccaagtcgttcccgcagcctatggcccaggccgccttgggtatttctgctcaaggtaaccacatccctctttaaaaattccgccgaaaaagagaagacgctttacccgactctttgggccgttatctcacggcgaactttctgaccaagtatacaactacccagagggcctaggagaagtgctgtatagagagcagttcgacttcaacgctgagccaccttgggaacctagctgatgataggggggttccatctcccaacttgtccattttgttgcatattctaaggacccagacataggcttggtggcccgtctcttgtctttcctggtttatgactttcggctttgtggaatacggctgagatgaaaggatttattgatgatgcaaactactccgttggcctgttggatgaaggaacaaaccttggaaatgttattgataactatgtttatgaacataccctgacagggaaaaatgcattttttgtgggagatcttggaaagattgtgaagaaacacagtcaatggcagaatgtagtggctcagataaagccattctacacagtgaagtgcaactctgctccagctgtacttgagattttggcagctcttggaaccggatttgcttgttccagtaaaaatgaaatggctttagtgcaagagttgggtgtacctccagaaaacattatttacataagtccttgcaagcaagtgtctcagataaagtatgcagcaaaagttggagtgaatatcctgacatgtgacaatgaaattgaattgaagaaaattgcacgtaatcacccaaatgccaaggtcttactacatattgcaacagaagataatattggaggtgaagagggtaacatgaagtttggcactaccctgaagaactgtaggcatctcttggaatgtgctaaggaacttgatgtccaaataattggggttaaatttcatgtttcgagtgcttgcaaagaatctcaagtatatgtacatgctctatctgatgctcgatgtgtgtttgacatggctggagaaattggctttacgatgaacatgttagacattggtggaggattcacgggaactgaatttcaattggaagaggttaatcatgttatcagccctctgttggatatctactttcctgaaggatctggtgttaagataatttcagaacccggaagctactatgtgtcttctgcatttacactcgcagttaatatcatagcaaagaaagttgttgaaaatgataaatttccctctggagtagaaaaaaccggaagtgatgaaccagccttcatgtattatatgaatgatggtgtttatggttcttttgcaagtaaactgtctgaggacttaaataccattccagaggttcacaagaaatacaaggaagatgagcctctgtttacaagcagcctttggggtccatcctgtgatgagcttgatcaaattgtggaaagctgtcttcttcctgagctgaatgtgggagattggcttatctttgataacatgggagcagattctttccatgaaccatctgcttttaatgattttcagaggccagccatttattacatgatgtcattcagtgattggtatgagatgcaagatgctggaattacttcagactcaatgatgaagaacttcttctttgtgccttcttgcattcagctgagccaagaagacagcttttccgctgaagcttaaacaggcattaacgcttctttagatctgaagttgcaggttaagcttgtctggtcaacattccagtgtggaaaaataatttaaacaatcttattctcttaattcttttggcaacaaaaactattagtaatagctatttgggaccagacaaaatcagctttcatctataattcattggggataatgggagatttagataatgtatccagatttaaacctaccagtttgtcctaccccttaagcgtttaaaataaaatatgcaacaaaatggatgacttagtggagatggaagcccattaattgggttccccattaaatcgtttacatacaagaacacagtttttatactaaggatttgtgtttaaagtcttgtaaagttcatgtctttcacccagatatatcaaatgttagaagaccagtgtgacttcattagataacgtttagtgtatttagaatgtgtaaatttgtgctttgaactgtagtttaataaatgtaaaattgcatcatagtatttgttgacctaatgtaacccttgtatgattgcaataaaattttgtgtagattttactgttttttcaggctaaaactttgggaaaggggctagctagcaaaggtagttttgaaatagatgtgtatatggactgttttgaagggtttttttctttatagcccagttaagttttgtttggctcggtgcatttttcatttatttaattagtaatttaagtaaagtgtttggtaaatcattgtgaagttcagattcattatggagagttgatgtgcagtaagcatgatgtttaacaattttaacaccaaaaatgttaatcctgcataaatcaactgtaataataaataggtgtttctgtatagatagaatgcatagagtaccttagtaaatctttgaatcacaatcttttggctgaaatggaagattctgttaaatactttgaataaacttggggggagggaaataaaattgcagaaaactgcagagcactaaaacttaaagaagggctacatctttatccagaaacctgttgctcttttgcacggaatgtttaaattcagagttgggatgggggttggggtgaagcacacttattatcttcagttgcagtgatttcaaatttaggattttttgttgttggtttgaactgtccccttagtttcttgttatttccaatttgttctgcttagtcattacttttaattcttttcttactaaaattttatggtggttgggggaagggagttagcatcactaacctgacagttgttgccaggaatttgctttgtttactgctagtatattagaaatcctagatctcagaatcacaatagtaataaacaacaggggtcattttttcctaacttactctgtgttcaggtgtggaatttctgtctcccaagaggaaatgtgacttcactttggtgccaatggacagaaaattctacctgtgctacataggagaagtttggaatgcacttaatagctggtttttacaccttgatttcgaggtggaaagaaattgatcatgaatctctaataaatttaaatctcttaaaccagtaggtgcttaatattttttgatttgattaatgcccatttaaatctcatgggttctattaaaaatatatatatatagggccccaatccattgccatcaaattgcccttggacttttccaaggtatattatggggttttatgcaaaattccaagctaccatgtaactttttttaaccatttaacaaggaggggacgttccactctacagtggcatgtgggcagangcacctttaagagggacttggctgcgcaacagctgactcagnaacact

SEQ ID NO: 433915 - DNA, 2236 bp, Homo sapiens
actttcaggctctgatcgcggccgcagtttttccttttttcttctgccgtcgccttctctgcctcttctcatcctttctcgctctgctgctctgcagtgtgacgagtccgaatcctcttcccacccagcccgcgcctttcttcttttgcctgcgctgttctatttctccttcggccgccgccgccactgctgcacacagctggtgtcggtgccgcgcttttacccccaagtcgttcccgcagcctatggcccaggccgccttgggtatttctgctcaaggtaaccacatccctctttaaaaattccgccgaaaaagagaagacgctttacccgactctttgggccgttatctcacggcgaactttctgaccaagtatacaactacccagagggcctaggagaagtgctgtatagagagcagttcgacttcaacgctgagccaccttgggaacctagctgatgataggggggttccatctcccaacttgtccattttgttgcatattctaaggacccagacataggcttggtggcccgtctcttgtctttcctggtttatgactttcggctttgtggaatacggctgagatgaaaggatttattgatgatgcaaactactccgttggcctgttggatgaaggaacaaaccttggaaatgttattgataactatgtttatgaacataccctgacagggaaaaatgcattttttgtgggagatcttggaaagattgtgaagaaacacagtcaatggcagaatgtagtggctcagataaagccattctacacagtgaagtgcaactctgctccagctgtacttgagattttggcagctcttggaaccggatttgcttgttccagtaaaaatgaaatggctttagtgcaagagttgggtgtacctccagaaaacattatttacataagtccttgcaagcaagtgtctcagataaagtatgcagcaaaagttggagtgaatatcctgacatgtgacaatgaaattgaattgaagaaaattgcacgtaatcacccaaatgccaaggtcttactacatattgcaacagaagataatattggaggtgaagagggtaacatgaagtttggcactaccctgaagaactgtaggcatctcttggaatgtgctaaggaacttgatgtccaaataattggggttaaatttcatgtttcgagtgcttgcaaagaatctcaagtatatgtacatgctctatctgatgctcgatgtgtgtttgacatggctggagaaattggctttacgatgaacatgttagacattggtggaggattcacgggaactgaatttcaattggaagaggttaatcatgttatcagccctctgttggatatctactttcctgaaggatctggtgttaagataatttcagaacccggaagctactatgtgtcttctgcatttacactcgcagttaatatcatagcaaagaaagttgttgaaaatgataaatttccctctggagtagaaaaaaccggaagtgatgaaccagccttcatgtattatatgaatgatggtgtttatggttcttttgcaagtaaactgtctgaggacttaaataccattccagaggttcacaagaaatacaaggaagatgagcctctgtttacaagcagctccgctgaagcttaaacaggcattaacgcttctttagatctgaagttgcaggttaagcttgtctggtcaacattccagtgtggaaaaataatttaaacaatcttattctcttaattcttttggcaacaaaaactattagtaatagctatttgggaccagacaaaatcagctttcatctataattcattggggataatgggagatttagataatgtatccagatttaaacctaccagtttgtcctaccccttaagcgtttaaaataaaatatgcaacaaaatggatgacttagtggagatggaagcccattaattgggttccccattaaatcgtttacatacaagaacacagtttttatactaaggatttgtgtttaaagtcttgtaaagttcatgtctttcacccagatatatcaaatgttagaagaccagtgtgacttcattagataacgtttagtgtatttagaatgtgtaaatttgtgctttgaactgtagtttaataaatgtaaaattgcatcatagtatttgttgacctaatgtaacccttgtatgattgcaataaaattttgtgtagattttactgttttttcagg

SEQ ID NO: 433916 - DNA, 627 bp, Homo sapiens
acactttttcccttttttcgaaattttataccccccccctaaaaggaattttggccccctaggccaaaaatttcggcccaagggccccttggacttttccaaggtatattatggggttttatgcaaaattccaagctaccatgtaactttttttaaccatttaacaaggagggggaactgtttcctaccttctttacatgttgtgcattgttgtggtccagaaatgccaaacctttttaaagatggtgcaactttgagtccttggcttgactatacaggccttgaacttcatggcatatcaactttgccatatctgcaggagagctgttctataagaaatagctcagagttgcaaatatcacatgtgaatgatacggtaacttttaagaaatgtctgtattgtatttgaagactgtttgccataaatctgaaatttgaacctatgtatttcaatttggtatgctaaaaagttctgaattaatgtaaagttttttgttataatattgtaatctcagttcaaaagttaactgcaaatataaaacccaatgatttctatatagtaaattgaactgtaaaggtaacttgtgtgtgattctgaatacatagataaatgtttttattcctcat

SEQ ID NO: 433917 - DNA, 1784 bp, Homo sapiens
actttcaggctctgatcgcggccgcagtttttccttttttcttctgccgtcgccttctctgcctcttctcatcctttctcgctctgctgctctgcagtgtgacgagtccgaatcctcttcccacccagcccgcgcctttcttcttttgcctgcgctgttctatttctccttcggccgccgccgccactgctgcacacagctggtgtcggtgccgcgcttttacccccaagtcgttcccgcagcctatggcccaggccgccttgggtatttctgctcaaggtaaccacatccctctttaaaaattccgccgaaaaagagaagacgctttacccgactctttgggccgttatctcacggcgaactttctgaccaagtatacaactacccagagggcctaggagaagtgctgtatagagagcagttcgacttcaacgctgagccaccttgggaacctagctgatgataggggggttccatctcccaacttgtccattttgttgcatattctaaggacccagacataggcttggtggcccgtctcttgtctttcctggtttatgactttcggctttgtggaatacggctgagatgaaaggatttattgatgatgcaaactactccgttggcctgttggatgaaggaacaaaccttggaaatgttattgataactatgtttatgaacataccctgacagggaaaaatgcattttttgtgggagatcttggaaagattgtgaagaaacacagtcaatggcagaatgtagtggctcagataaagccattctacacagtgaagtgcaactctgctccagctgtacttgagattttggcagctcttggaaccggatttgcttgttccagtaaaaatgaaatggctttagtgcaagagttgggtgtacctccagaaaacattatttacataagtccttgcaagcaagtgtctcagataaagtatgcagcaaaagttggagtgaatatcctgacatgtgacaatgaaattgaattgaagaaaattgcacgtaatcacccaaatgccaaggtcttactacatattgcaacagaagataatattggaggtgaagagggtaacatgaagtttggcactaccctgaagaactgtaggcatctcttggaatgtgctaaggaacttgatgtccaaataattggggttaaatttcatgtttcgagtgcttgcaaagaatctcaagtatatgtacatgctctatctgatgctcgatgtgtgtttgacatggctggagaaattggctttacgatgaacatgttagacattggtggaggattcacgggaactgaatttcaattggaagaggttaatcatgttatcagccctctgttggatatctactttcctgaaggatctggtgttaagataatttcagaacccggaagctactatgtgtcttctgcatttacactcgcagttaatatcatagcaaagaaagttgttgaaaatggatgacttagtggagatggaagcccattaattgggttccccattaaatcgtttacatacaagaacacagtttttatactaaggatttgtgtttaaagtcttgtaaagttcatgtctttcacccagatatatcaaatgttagaagaccagtgtgacttcattagataacgtttagtgtatttagaatgtgtaaatttgtgctttgaactgtagtttaataaatgtaaaattgcatcatagtatttgttgacctaatgtaacccttgtatgattgcaataaaattttgtgtagattttactgttttttcagg

SEQ ID NO: 433918 - DNA, 484 bp, Homo sapiens
attggctttacgatgaacatgttagacattggtggaggattcacgggaactgaatttcaattggaagaggtaaacttctcagtagatgacattaacagaataattgctttctttgttacttaagtggtggatgtgtagagcaggatttttacaatggcagaaactaaaccctataacatctctttaaaattatgttcttagaaaaggaataggcagttagtagacctagctaactttgaaaagtttgatagaattctttgaacattatcataaaacattttctatttcagttgtgtttctgtacttaatggcacaaatgatttaatacttagaaaacttcactactacctttttttttttttttttaaagtcttcctgtgttgcccaggctggagtggagtggcgcaattatagctcactatagcttccaactcctgggctcaagcgatcctcctgcttcaacctcccaagtagctgggactta

SEQ ID NO: 433919 - DNA, 526 bp, Homo sapiens
gtttcagacctactcaaggtctcacatctatggtagatgtcattctaagcttctagtgctcttctggtcaattacttttaaaggtattctatgtggtaagtaacattttctgttgtaggtagaatgcagaggggacttaagcaacgttgtatatttttaaagctgtgagctgggtgctaagtcatcaaatgcctatgtaaaaataaaagtagaaatgcacctaggcatcttcagagtaacagtaatagtgtaaatttcagaatatcttttctcatttttaatgagtaaaaatccttttagaaaaatggttgatgtattaaggttgggtttcctgcttaggtatctctgaaacagtattctcaacctttcagctctccctgttctacttccagggaggtcttcacttcagaaatccaagactcatattcatccagcttggtgtcaagtgggctgttgctgccagaattatcttgtgattatttgagagatgtatcagtttcttctgaagtacaatcaactgtagaag

SEQ ID NO: 433920 - DNA, 1265 bp, Homo sapiens
agcggctctttcttcctgtctgcttggaaagatggcgtcccgcaaggaaggtaccggctctactgccacctcttccagctccaccgccggcgcagcagggaaaggcaaaggcaaaggcggctcgggagattcagccgtgaagcaagtgcagatagatggccttgtggtattaaagataatcaaacattatcaagaagaaggacaaggaactgaagttgttcaaggagtgcttttgggtctggttgtagaagatcggcttgaaattaccaactgctttcctttccctcagcacacagaggatgatgctgactttgatgaagtccaatatcagatggaaatgatgcggagccttcgccatgtaaacattgatcatcttcacgtgggctggtatcagtccacatactatggctcattcgttacccgggcactcctggactctcagtttagttaccagcatgccattgaagaatctgtcgttctcatttatgatcccataaaaactgcccaaggatctctctcactaaaggcatacagactgactcctaaactgatggaagtttgtaaagaaaaggatttttcccctgaagcattgaaaaaagcaaatatcacctttgagtacatgtttgaagaagtgccgattgtaattaaaaattcacatctgatcaatgtcctaatgtgggaacttgaaaagaagtcagctgttgcagataaacatgaattgctcagccttgccagcagcaatcatttggggaagaatctacagttgctgatggacagagtggatgaaatgagccaagatatagttaaatacaacacatacatgaggaatactagtaaacaacagcagcagaaacatcagtatcagcagcgtcgccagcaggagaatatgcagcgccagagccgaggagaaccccccgctccctgaggaggacctgtccaaactcttcaaaccaccacagccgcctgccaggatggactcgctgctcattgcaggccagataaacacttactgccagaacatcaaggagttcactgcccaaaacttaggcaagctcttcatggcccaggctcttcaagaatacaacaactaagaaaaggaagtttccagaaaagaagttaacatgaactcttgaagtcacaccagggcaactcttggaagaaatatatttgcatattgaaaagcacagaggatttctttagtgtcattgccgattttggctataacagtgtctttctagccataataaaataaaacaaaatcttga

SEQ ID NO: 433921 - DNA, 473 bp, Homo sapiens
ttcggtcgaacaagaactggcatacatcaatagatcatatactcattcacgcctgttgtcagacatgtatcagcagcgtcgccagcaggagaatatgcagcgccagagccgaggagaaccccccgctccctgaggaggacctgtccaaactcttcaaaccaccacagccgcctgccaggatggactcgctgctcattgcaggccagataaacacttactgccagaacatcaaggagttcactgcccaaaacttaggcaagctcttcatggcccaggctcttcaagaatacaacaactaagaaaaggaagtttccagaaaagaagttaacatgaactcttgaagtcacaccagggcaactcttggaagaaatatatttgcatattgaaaagcacagaggatttctttagtgtcattgccgattttggctataacagtgtctttctagccataataaaataaaacaaaatcttga

SEQ ID NO: 433922 - DNA, 457 bp, Homo sapiens
cgacgcgagtcagaggcacgaacagaggcggttgattcttcagatttctggtatcagcagcgtcgccagcaggagaatatgcagcgccagagccgaggagaaccccccgctccctgaggaggacctgtccaaactcttcaaaccaccacagccgcctgccaggatggactcgctgctcattgcaggccagataaacacttactgccagaacatcaaggagttcactgcccaaaacttaggcaagctcttcatggcccaggctcttcaagaatacaacaactaagaaaaggaagtttccagaaaagaagttaacatgaactcttgaagtcacaccagggcaactcttggaagaaatatatttgcatattgaaaagcacagaggatttctttagtgtcattgccgattttggctataacagtgtctttctagccataataaaataaaacaaaatcttga

SEQ ID NO: 433923 - DNA, 469 bp, Homo sapiens
tcacaacataaaaaccctttttaatcaccggcccccaatagactaactagattttatgtacaatatcagcagcgtcgccagcaggagaatatgcagcgccagagccgaggagaaccccccgctccctgaggaggacctgtccaaactcttcaaaccaccacagccgcctgccaggatggactcgctgctcattgcaggccagataaacacttactgccagaacatcaaggagttcactgcccaaaacttaggcaagctcttcatggcccaggctcttcaagaatacaacaactaagaaaaggaagtttccagaaaagaagttaacatgaactcttgaagtcacaccagggcaactcttggaagaaatatatttgcatattgaaaagcacagaggatttctttagtgtcattgccgattttggctataacagtgtctttctagccataataaaataaaacaaaatcttga

SEQ ID NO: 433924 - DNA, 424 bp, Homo sapiens
ggcgaaagggttcgtgtaattgtcactggagctgcccccatgtccacttcagtcatgacattcttccgggcagcaatgggatgtcaggtgtatgaagcttatcttcaaaccaccacagccgcctgccaggatggactcgctgctcattgcaggccagataaacacttactgccagaacatcaaggagttcactgcccaaaacttaggcaagctcttcatggcccaggctcttcaagaatacaacaactaagaaaaggaagtttccagaaaagaagttaacatgaactcttgaagtcacaccagggcaactcttggaagaaatatatttgcatattgaaaagcacagaggatttctttagtgtcattgccgattttggctataacagtgtctttctagccataataaaataaaacaaaatcttga

SEQ ID NO: 433925 - DNA, 536 bp, Homo sapiens
ggcccgtataccgaggtaacagtcaaccaaacagaataggacaaccacggaaatgttgtatcagcagcgtcgccagcaggagaatatgcagcgccagagccgaggagaaccccccgctccctgaggaggacctgtccaaactcttcaaaccaccacagccgcctgccaggatggactcgctgctcattgcaggccagataaacacttactgccagaacatcaaggagttcactgcccaaaacttaggcaagctcttcatggcccaggctcttcaagaatacaacaactaagaaaaggaagtttccagaaaagaagttaacatgaactcttgaagtcacaccagggcaactcttggaagaaatatatttgcatattgaaaagcacagaggatttctttagtgtcattgccgattttggctataacagtgtctttctagccataataaaataaaacaaaatcttgaaaaaaaaaaaaaaaaaacaaaaaacaaaaaaaaaaaaaaaaaaaaaacaaaaaaaaaaaaaaaacaaaaaaa

SEQ ID NO: 433926 - DNA, 1365 bp, Homo sapiens
agcggctctttcttcctgtctgcttggaaagatggcgtcccgcaaggaaggtaccggctctactgccacctcttccagctccaccgccggcgcagcagggaaaggcaaaggcaaaggcggctcgggagattcagccgtgaagcaagtgcagatagatggccttgtggtattaaagataatcaaacattatcaagaagaaggacaaggaactgaagttgttcaaggagtgcttttgggtctggttgtagaagatcggcttgaaattaccaactgctttcctttccctcagcacacagaggatgatgctgactttgatgaagtccaatatcagatggaaatgatgcggagccttcgccatgtaaacattgatcatcttcacgtgggctggtatcagtccacatactatggctcattcgttacccgggcactcctggactctcagtttagttaccagcatgccattgaagaatctgtcgttctcatttatgatcccataaaaactgcccaaggatctctctcactaaaggcatacagactgactcctaaactgatggaagtttgtaaagaaaaggatttttcccctgaagcattgaaaaaagcaaatatcacctttgagtacatgtttgaagaagtgccgattgtaattaaaaattcacatctgatcaatgtcctaatgtgggaacttgaaaagaagtcagctgttgcagataaacatgaattgctcagccttgccagcagcaatcatttggggaagaatctacagttgctgatggacagagtggatgaaatgagccaagatatagttaaatacaacacatacatgaggaatactagtaaacaacagcagcagaaacatcagtatcagcagcgtcgccagcaggagaatatgcagcgccagagccgaggagaaccccccgctccctgaggaggacctgtccaaactcttcaaaccaccacagccgcctgccaggatggactcgctgctcattgcaggccagataaacacttactgccagaacatcaaggagttcactgcccaaaacttaggcaagctcttcatggcccaggctcttcaagaatacaacaactaagaaaaggaagtttccagaaaagaagttaacatgaactcttgaagtcacaccagggcaactcttggaagaaatatatttgcatattgaaaagcacagaggatttctttagtgtcattgccgattttggctataacagtgtctttctagccataataaaataaaacaaaatcttgaaaaaaaaatattggcctctttggcctcagcgggggagctttgcgccctttccttctgttaggggtaatttataatcttcgtacccaactcctgtgtctgg

SEQ ID NO: 433927 - DNA, 1364 bp, Homo sapiens
agcggctctttcttcctgtctgcttggaaagatggcgtcccgcaaggaaggtaccggctctactgccacctcttccagctccaccgccggcgcagcagggaaaggcaaaggcaaaggcggctcgggagattcagccgtgaagcaagtgcagatagatggccttgtggtattaaagataatcaaacattatcaagaagaaggacaaggaactgaagttgttcaaggagtgcttttgggtctggttgtagaagatcggcttgaaattaccaactgctttcctttccctcagcacacagaggatgatgctgactttgatgaagtccaatatcagatggaaatgatgcggagccttcgccatgtaaacattgatcatcttcacgtgggctggtatcagtccacatactatggctcattcgttacccgggcactcctggactctcagtttagttaccagcatgccattgaagaatctgtcgttctcatttatgatcccataaaaactgcccaaggatctctctcactaaaggcatacagactgactcctaaactgatggaagtttgtaaagaaaaggatttttcccctgaagcattgaaaaaagcaaatatcacctttgagtacatgtttgaagaagtgccgattgtaattaaaaattcacatctgatcaatgtcctaatgtgggaacttgaaaagaagtcagctgttgcagataaacatgaattgctcagccttgccagcagcaatcatttggggaagaatctacagttgctgatggacagagtggatgaaatgagccaagatatagttaaatacaacacatacatgaggaatactagtaaacaacagcagcagaaacatcagtatcagcagcgtcgccagcaggagaatatgcagcgccagagccgaggagaaccccccgctccctgaggaggacctgtccaaactcttcaaaccaccacagccgcctgccaggatggactcgctgctcattgcaggccagataaacacttactgccagaacatcaaggagttcactgcccaaaacttaggcaagctcttcatggcccaggctcttcaagaatacaacaactaagaaaaggaagtttccagaaaagaagttaacatgaactcttgaagtcacaccagggcaactcttggaagaaatatatttgcatattgaaaagcacagaggatttctttagtgtcattgccgattttggctataacagtgtctttctagccataataaaataaaacaaaatcttgaaaaacaacaaaacaagcaaagagaagaacaacgaacaaccagaagccaaaccgaagcaagcgaacaatacaatcaagactaacgaaacaagcaaagggg

SEQ ID NO: 433928 - DNA, 1413 bp, Homo sapiens
agcggctctttcttcctgtctgcttggaaagatggcgtcccgcaaggaaggtaccggctctactgccacctcttccagctccaccgccggcgcagcagggaaaggcaaaggcaaaggcggctcgggagattcagccgtgaagcaagtgcagatagatggccttgtggtattaaagataatcaaacattatcaagaagaaggacaaggaactgaagttgttcaaggagtgcttttgggtctggttgtagaagatcggcttgaaattaccaactgctttcctttccctcagcacacagaggatgatgctgactttgatgaagtccaatatcagatggaaatgatgcggagccttcgccatgtaaacattgatcatcttcacgtgggctggtatcagtccacatactatggctcattcgttacccgggcactcctggactctcagtttagttaccagcatgccattgaagaatctgtcgttctcatttatgatcccataaaaactgcccaaggatctctctcactaaaggcatacagactgactcctaaactgatggaagtttgtaaagaaaaggatttttcccctgaagcattgaaaaaagcaaatatcacctttgagtacatgtttgaagaagtgccgattgtaattaaaaattcacatctgatcaatgtcctaatgtgggaacttgaaaagaagtcagctgttgcagataaacatgaattgctcagccttgccagcagcaatcatttggggaagaatctacagttgctgatggacagagtggatgaaatgagccaagatatagttaaatacaacacatacatgaggaatactagtaaacaacagcagcagaaacatcagtatcagcagcgtcgccagcaggagaatatgcagcgccagagccgaggagaaccccccgctccctgaggaggacctgtccaaactcttcaaaccaccacagccgcctgccaggatggactcgctgctcattgcaggccagataaacacttactgccagaacatcaaggagttcactgcccaaaacttaggcaagctcttcatggcccaggctcttcaagaatacaacaactaagaaaaggaagtttccagaaaagaagttaacatgaactcttgaagtcacaccagggcaactcttggaagaaatatatttgcatattgaaaagcacagaggatttctttagtgtcattgccgattttggctataacagtgtctttctagccataataaaataaaacaaaatcttgacacgaacaaacagacaaaacaaaactcggaaggaatctatatatagggctgcgaaaaaaagaggtactgcaatgtgcccagtggccaagggtggtacgtacccaactatctgtcacaagtgggaaaccttgcggtcccccaaaagagt

SEQ ID NO: 433929 - DNA, 1338 bp, Homo sapiens
  misc_feature (14)..(15): n is a, c, g, or t
  misc_feature (24)..(24): n is a, c, g, or t
ccgagcgactaagnntggatcaanaaaaaagccagggcgtgtattatataccgaaccggccagtacttacgtctagtacgagctggtgcgaatcgacgaagaagatggcgtcccgcaaggaaggtaccggctctactgccacctcttccagctccaccgccggcgcagcagggaaaggcaaaggcaaaggcggctcgggagattcagccgtgaagcaagtgcagatagatggccttgtggtattaaagataatcaaacattatcaagaagaaggacaaggaactgaagttgttcaaggagtgcttttgggtctggttgtagaagatcggcttgaaattaccaactgctttcctttccctcagcacacagaggatgatgctgactttgatgaagtccaatatcagatggaaatgatgcggagccttcgccatgtaaacattgatcatcttcacgtgggctggtatcagtccacatactatggctcattcgttacccgggcactcctggactctcagtttagttaccagcatgccattgaagaatctgtcgttctcatttatgatcccataaaaactgcccaaggatctctctcactaaaggcatacagactgactcctaaactgatggaagtttgtaaagaaaaggatttttcccctgaagcattgaaaaaagcaaatatcacctttgagtacatgtttgaagaagtgccgattgtaattaaaaattcacatctgatcaatgtcctaatgtgggaacttgaaaagaagtcagctgttgcagataaacatgaattgctcagccttgccagcagcaatcatttggggaagaatctacagttgctgatggacagagtggatgaaatgagccaagatatagttaaatacaacacatacatgaggaatactagtaaacaacagcagcagaaacatcagtatcagcagcgtcgccagcaggagaatatgcagcgccagagccgaggagaaccccccgctccctgaggaggacctgtccaaactcttcaaaccaccacagccgcctgccaggatggactcgctgctcattgcaggccagataaacacttactgccagaacatcaaggagttcactgcccaaaacttaggcaagctcttcatggcccaggctcttcaagaatacaacaactaagaaaaggaagtttccagaaaagaagttaacatgaactcttgaagtcacaccagggcaactcttggaagaaatatatttgcatattgaaaagcacagaggatttctttagtgtcattgccgattttggctataacagtgtctttctagccataataaaataaaacaaaatcttga

SEQ ID NO: 433930 - DNA, 1288 bp, Homo sapiens
agcggctctttcttcctgtctgcttggaaagatggcgtcccgcaaggaaggtaccggctctactgccacctcttccagctccaccgccggcgcagcagggaaaggcaaaggcaaaggcggctcgggagattcagccgtgaagcaagtgcagatagatggccttgtggtattaaagataatcaaacattatcaagaagaaggacaaggaactgaagttgttcaaggagtgcttttgggtctggttgtagaagatcggcttgaaattaccaactgctttcctttccctcagcacacagaggatgatgctgactttgatgaagtccaatatcagatggaaatgatgcggagccttcgccatgtaaacattgatcatcttcacgtgggctggtatcagtccacatactatggctcattcgttacccgggcactcctggactctcagtttagttaccagcatgccattgaagaatctgtcgttctcatttatgatcccataaaaactgcccaaggatctctctcactaaaggcatacagactgactcctaaactgatggaagtttgtaaagaaaaggatttttcccctgaagcattgaaaaaagcaaatatcacctttgagtacatgtttgaagaagtgccgattgtaattaaaaattcacatctgatcaatgtcctaatgtgggaacttgaaaagaagtcagctgttgcagataaacatgaattgctcagccttgccagcagcaatcatttggggaagaatctacagttgctgatggacagagtggatgaaatgagccaagatatagttaaatacaacacatacatgaggaatactagtaaacaacagcagcagaaacatcagtatcagcagcgtcgccagcaggagaatatgcagcgccagagccgaggagaaccccccgctccctgaggaggacctgtccaaactcttcaaaccaccacagccgcctgccaggatggactcgctgctcattgcaggccagataaacacttactgccagaacatcaaggagttcactgcccaaaacttaggcaagctcttcatggcccaggctcttcaagaatacaacaactaagaaaaggaagtttccagaaaagaagttaacatgaactcttgaagtcacaccagggcaactcttggaagaaatatatttgcatattgaaaagcacagaggatttctttagtgtcattgccgattttggctataacagtgtctttctagccataataaaataaaacaaaatcttgaagacactcgggtcatctaggtcg

SEQ ID NO: 433931 - DNA, 1364 bp, Homo sapiens
  misc_feature (1267)..(1267): n is a, c, g, or t
agcggctctttcttcctgtctgcttggaaagatggcgtcccgcaaggaaggtaccggctctactgccacctcttccagctccaccgccggcgcagcagggaaaggcaaaggcaaaggcggctcgggagattcagccgtgaagcaagtgcagatagatggccttgtggtattaaagataatcaaacattatcaagaagaaggacaaggaactgaagttgttcaaggagtgcttttgggtctggttgtagaagatcggcttgaaattaccaactgctttcctttccctcagcacacagaggatgatgctgactttgatgaagtccaatatcagatggaaatgatgcggagccttcgccatgtaaacattgatcatcttcacgtgggctggtatcagtccacatactatggctcattcgttacccgggcactcctggactctcagtttagttaccagcatgccattgaagaatctgtcgttctcatttatgatcccataaaaactgcccaaggatctctctcactaaaggcatacagactgactcctaaactgatggaagtttgtaaagaaaaggatttttcccctgaagcattgaaaaaagcaaatatcacctttgagtacatgtttgaagaagtgccgattgtaattaaaaattcacatctgatcaatgtcctaatgtgggaacttgaaaagaagtcagctgttgcagataaacatgaattgctcagccttgccagcagcaatcatttggggaagaatctacagttgctgatggacagagtggatgaaatgagccaagatatagttaaatacaacacatacatgaggaatactagtaaacaacagcagcagaaacatcagtatcagcagcgtcgccagcaggagaatatgcagcgccagagccgaggagaaccccccgctccctgaggaggacctgtccaaactcttcaaaccaccacagccgcctgccaggatggactcgctgctcattgcaggccagataaacacttactgccagaacatcaaggagttcactgcccaaaacttaggcaagctcttcatggcccaggctcttcaagaatacaacaactaagaaaaggaagtttccagaaaagaagttaacatgaactcttgaagtcacaccagggcaactcttggaagaaatatatttgcatattgaaaagcacagaggatttctttagtgtcattgccgattttggctataacagtgtctttctagccataataaaataaaacaaaatcttgaanaaaaaaaaaaaaaaaaaaaaaaaaaaaaaaaaaaaaaaaaaacaaaaaacaaaaaaaaaaaaaaaaaaaaaacaaaaaaaaaaaaaaaacaaaaaaa

SEQ ID NO: 433932 - DNA, 1322 bp, Homo sapiens
agcggctctttcttcctgtctgcttggaaagatggcgtcccgcaaggaaggtaccggctctactgccacctcttccagctccaccgccggcgcagcagggaaaggcaaaggcaaaggcggctcgggagattcagccgtgaagcaagtgcagatagatggccttgtggtattaaagataatcaaacattatcaagaagaaggacaaggaactgaagttgttcaaggagtgcttttgggtctggttgtagaagatcggcttgaaattaccaactgctttcctttccctcagcacacagaggatgatgctgactttgatgaagtccaatatcagatggaaatgatgcggagccttcgccatgtaaacattgatcatcttcacgtgggctggtatcagtccacatactatggctcattcgttacccgggcactcctggactctcagtttagttaccagcatgccattgaagaatctgtcgttctcatttatgatcccataaaaactgcccaaggatctctctcactaaaggcatacagactgactcctaaactgatggaagtttgtaaagaaaaggatttttcccctgaagcattgaaaaaagcaaatatcacctttgagtacatgtttgaagaagtgccgattgtaattaaaaattcacatctgatcaatgtcctaatgtgggaacttgaaaagaagtcagctgttgcagataaacatgaattgctcagccttgccagcagcaatcatttggggaagaatctacagttgctgatggacagagtggatgaaatgagccaagatatagttaaatacaacacatacatgaggaatactagtaaacaacagcagcagaaacatcagtatcagcagcgtcgccagcaggagaatatgcagcgccagagccgaggagaaccccccgctccctgaggaggacctgtccaaactcttcaaaccaccacagccgcctgccaggatggactcgctgctcattgcaggccagataaacacttactgccagaacatcaaggagttcactgcccaaaacttaggcaagctcttcatggcccaggctcttcaagaatacaacaactaagaaaaggaagtttccagaaaagaagttaacatgaactcttgaagtcacaccagggcaactcttggaagaaatatatttgcatattgaaaagcacagaggatttctttagtgtcattgccgattttggctataacagtgtctttctagccataataaaataaaacaaaatcttgaacaaacaaaacacaaagggggggccctcgggattctaaaacctaggtgctaaatcga

SEQ ID NO: 433933 - DNA, 1337 bp, Homo sapiens
agcggctctttcttcctgtctgcttggaaagatggcgtcccgcaaggaaggtaccggctctactgccacctcttccagctccaccgccggcgcagcagggaaaggcaaaggcaaaggcggctcgggagattcagccgtgaagcaagtgcagatagatggccttgtggtattaaagataatcaaacattatcaagaagaaggacaaggaactgaagttgttcaaggagtgcttttgggtctggttgtagaagatcggcttgaaattaccaactgctttcctttccctcagcacacagaggatgatgctgactttgatgaagtccaatatcagatggaaatgatgcggagccttcgccatgtaaacattgatcatcttcacgtgggctggtatcagtccacatactatggctcattcgttacccgggcactcctggactctcagtttagttaccagcatgccattgaagaatctgtcgttctcatttatgatcccataaaaactgcccaaggatctctctcactaaaggcatacagactgactcctaaactgatggaagtttgtaaagaaaaggatttttcccctgaagcattgaaaaaagcaaatatcacctttgagtacatgtttgaagaagtgccgattgtaattaaaaattcacatctgatcaatgtcctaatgtgggaacttgaaaagaagtcagctgttgcagataaacatgaattgctcagccttgccagcagcaatcatttggggaagaatctacagttgctgatggacagagtggatgaaatgagccaagatatagttaaatacaacacatacatgaggaatactagtaaacaacagcagcagaaacatcagtatcagcagcgtcgccagcaggagaatatgcagcgccagagccgaggagaaccccccgctccctgaggaggacctgtccaaactcttcaaaccaccacagccgcctgccaggatggactcgctgctcattgcaggccagataaacacttactgccagaacatcaaggagttcactgcccaaaacttaggcaagctcttcatggcccaggctcttcaagaatacaacaactaagaaaaggaagtttccagaaaagaagttaacatgaactcttgaagtcacaccagggcaactcttggaagaaatatatttgcatattgaaaagcacagaggatttctttagtgtcattgccgattttggctataacagtgtctttctagccataataaaataaaacaaaatcttgaaaaaaaaaaaaaaaaaacaaaaaacaaaaaaaaaaaaaaaaaaaaaacaaaaaaaaaaaaaaaacaaaaaaa

SEQ ID NO: 433934 - DNA, 1293 bp, Homo sapiens
agcggctctttcttcctgtctgcttggaaagatggcgtcccgcaaggaaggtaccggctctactgccacctcttccagctccaccgccggcgcagcagggaaaggcaaaggcaaaggcggctcgggagattcagccgtgaagcaagtgcagatagatggccttgtggtattaaagataatcaaacattatcaagaagaaggacaaggaactgaagttgttcaaggagtgcttttgggtctggttgtagaagatcggcttgaaattaccaactgctttcctttccctcagcacacagaggatgatgctgactttgatgaagtccaatatcagatggaaatgatgcggagccttcgccatgtaaacattgatcatcttcacgtgggctggtatcagtccacatactatggctcattcgttacccgggcactcctggactctcagtttagttaccagcatgccattgaagaatctgtcgttctcatttatgatcccataaaaactgcccaaggatctctctcactaaaggcatacagactgactcctaaactgatggaagtttgtaaagaaaaggatttttcccctgaagcattgaaaaaagcaaatatcacctttgagtacatgtttgaagaagtgccgattgtaattaaaaattcacatctgatcaatgtcctaatgtgggaacttgaaaagaagtcagctgttgcagataaacatgaattgctcagccttgccagcagcaatcatttggggaagaatctacagttgctgatggacagagtggatgaaatgagccaagatatagttaaatacaacacatacatgaggaatactagtaaacaacagcagcagaaacatcagtatcagcagcgtcgccagcaggagaatatgcagcgccagagccgaggagaaccccccgctccctgaggaggacctgtccaaactcttcaaaccaccacagccgcctgccaggatggactcgctgctcattgcaggccagataaacacttactgccagaacatcaaggagttcactgcccaaaacttaggcaagctcttcatggcccaggctcttcaagaatacaacaactaagaaaaggaagtttccagaaaagaagttaacatgaactcttgaagtcacaccagggcaactcttggaagaaatatatttgcatattgaaaagcacagaggatttctttagtgtcattgccgattttggctataacagtgtctttctagccataataaaataaaacaaaatcttgaactgcttgctcatttgaaaaaaaaagta

SEQ ID NO: 433935 - DNA, 1244 bp, Homo sapiens
agcggctctttcttcctgtctgcttggaaagatggcgtcccgcaaggaaggtaccggctctactgccacctcttccagctccaccgccggcgcagcagggaaaggcaaaggcaaaggcggctcgggagattcagccgtgaagcaagtgcagatagatggccttgtggtattaaagataatcaaacattatcaagaagaaggacaaggaactgaagttgttcaaggagtgcttttgggtctggttgtagaagatcggcttgaaattaccaactgctttcctttccctcagcacacagaggatgatgctgactttgatgaagtccaatatcagatggaaatgatgcggagccttcgccatgtaaacattgatcatcttcacgtgggctggtatcagtccacatactatggctcattcgttacccgggcactcctggactctcagtttagttaccagcatgccattgaagaatctgtcgttctcatttatgatcccataaaaactgcccaaggatctctctcactaaaggcatacagactgactcctaaactgatggaagtttgtaaagaaaaggatttttcccctgaagcattgaaaaaagcaaatatcacctttgagtacatgtttgaagaagtgccgattgtaattaaaaattcacatctgatcaatgtcctaatgtgggaacttgaaaagaagtcagctgttgcagataaacatgaattgctcagccttgccagcagcaatcatttggggaagaatctacagttgctgatggacagagtggatgaaatgagccaagatatagttaaatacaacacatacatgaggaatactagtaaacaacagcagcagaaacatcagtatcagcagcgtcgccagcaggagaatatgcagcgccagagccgaggagaaccccccgctccctgaggaggacctgtccaaactcttcaaaccaccacagccgcctgccaggatggactcgctgctcattgcaggccagataaacacttactgccagaacatcaaggagttcactgcccaaaacttaggcaagctcttcatggcccaggctcttcaagaatacaacaactaagaaaaggaagtttccagaaaagaagttaacatgaactcttgaagtcacaccagggcaactcttggaagaaaattttggctataacagtgtctttctagccataataaaataaaacaaaatcttgaactgcttgctcatttgaaaaaaaaagta

SEQ ID NO: 433936 - DNA, 1235 bp, Homo sapiens
  misc_feature (1140)..(1140): n is a, c, g, or t
agcggctctttcttcctgtctgcttggaaagatggcgtcccgcaaggaaggtaccggctctactgccacctcttccagctccaccgccggcgcagcagggaaaggcaaaggcaaaggcggctcgggagattcagccgtgaagcaagtgcagatagatggccttgtggtattaaagataatcaaacattatcaagaagaaggacaaggaactgaagttgttcaaggagtgcttttgggtctggttgtagaagatcggcttgaaattaccaactgctttcctttccctcagcacacagaggatgatgctgactttgatgaagtccaatatcagatggaaatgatgcggagccttcgccatgtaaacattgatcatcttcacgtgggctggtatcagtccacatactatggctcattcgttacccgggcactcctggactctcagtttagttaccagcatgccattgaagaatctgtcgttctcatttatgatcccataaaaactgcccaaggatctctctcactaaaggcatacagactgactcctaaactgatggaagtttgtaaagaaaaggatttttcccctgaagcattgaaaaaagcaaatatcacctttgagtacatgtttgaagaagtgccgattgtaattaaaaattcacatctgatcaatgtcctaatgtgggaacttgaaaagaagtcagctgttgcagataaacatgaattgctcagccttgccagcagcaatcatttggggaagaatctacagttgctgatggacagagtggatgaaatgagccaagatatagttaaatacaacacatacatgaggaatactagtaaacaacagcagcagaaacatcagtatcagcagcgtcgccagcaggagaatatgcagcgccagagccgaggagaaccccccgctccctgaggaggacctgtccaaactcttcaaaccaccacagccgcctgccaggatggactcgctgctcattgcaggccagataaacacttactgccagaacatcaaggagttcactgcccaaaacttaggcaagctcttcatggcccaggctcttcaagaatacaacaactaagaaaaggaagtttccagaaaagaagttaacatgaactcttgagttcccnggcacctggagaattttgtttgaagccgggttcttagctgcgatgggttaagtttgccttaaaaactaaaaaaagggggagtccggcggggccta

SEQ ID NO: 433937 - DNA, 1509 bp, Homo sapiens
agcggctctttcttcctgtctgcttggaaagatggcgtcccgcaaggaaggtaccggctctactgccacctcttccagctccaccgccggcgcagcagggaaaggcaaaggcaaaggcggctcgggagattcagccgtgaagcaagtgcagatagatggccttgtggtattaaagataatcaaacattatcaagaagaaggacaaggaactgaagttgttcaaggagtgcttttgggtctggttgtagaagatcggcttgaaattaccaactgctttcctttccctcagcacacagaggatgatgctgactttgatgaagtccaatatcagatggaaatgatgcggagccttcgccatgtaaacattgatcatcttcacgtgggctggtatcagtccacatactatggctcattcgttacccgggcactcctggactctcagtttagttaccagcatgccattgaagaatctgtcgttctcatttatgatcccataaaaactgcccaaggatctctctcactaaaggcatacagactgactcctaaactgatggaagtttgtaaagaaaaggatttttcccctgaagcattgaaaaaagcaaatatcacctttgagtacatgtttgaagaagtgccgattgtaattaaaaattcacatctgatcaatgtcctaatgtgggaacttgaaaagaagtcagctgttgcagataaacatgaattgctcagccttgccagcagcaatcatttggggaagaatctacagttgctgatggacagagtggatgaaatgagccaagatatagttaaatacaacacatacatgaggaatactagtaaacaacagcagcagaaacatcagtatcagcagcgtcgccagcaggagaatatgcagcgccagagccgaggagaaccccccgctccctgaggaggacctgtccaaactcttcaaaccaccacagccgcctgccattgaagaatctgtcgttctcatttatgatcccataaaaactgcccaaggatctctctcactaaaggcatacagactgactcctaaactgatggaagtttgtaaagaaaaggatttttcccctgaagcattgaaaaaagcaaatatcacctttgagtacatgtttgaagaagtgccgattgtaattaaaaattcacatctgatcaatgtcctaatgtgggaacttgaaaagaagtcagctgttgcagataaacatgaattgctcattgcgccagataaacacttactgccagaacatcaaggagttcactgcccaaaacttaggcaagctcttcatggcccaggctcttcaagaatacaacaactaagaaaaggaagtttccagaaaagaagttaacatgaactcttgaagtcacaccagggcaactcttggaagaaatatatttgcatattgaaaagcacagaggatttctttagtgtcattgccgattttggctataacagtgtctttctagccataataaaataaaacaaaatcttga

SEQ ID NO: 433938 - DNA, 944 bp, Homo sapiens
  misc_feature (916)..(916): n is a, c, g, or t
  misc_feature (919)..(920): n is a, c, g, or t
  misc_feature (930)..(930): n is a, c, g, or t
agcggctctttcttcctgtctgcttggaaagatggcgtcccgcaaggaaggtaccggctctactgccacctcttccagctccaccgccggcgcagcagggaaaggcaaaggcaaaggcggctcgggagattcagccgtgaagcaagtgcagatagatggccttgtggtattaaagataatcaaacattatcaagaagaaggacaaggaactgaagttgttcaaggagtgcttttgggtctggttgtagaagatcggcttgaaattaccaactgctttcctttccctcagcacacagaggatgatgctgactttgatgaagtccaatatcagatggaaatgatgcggagccttcgccatgtaaacattgatcatcttcacgtgggctggtatcagtccacatactatggctcattcgttacccgggcactcctggactctcagtttagttaccagcatgccattgaagaatctgtcgttctcatttatgatcccataaaaactgcccaaggatctctctcactaaaggcatacagactgactcctaaactgatggaagtttgtaaagaaaaggatttttcccctgaagcattgaaaaaagcaaatatcacctttgagtacatgtttgaagaagtgccgattgtaattaaaaattcacatctgatcaatgtcctaatgtgggaacttgaaaagaagtcagctgttgcagataaacatgaattgctcagccttgccagcagcaatcatttggggaagaatctacagttgctgatggacagagtggatgaaatgagccaagatatagttaaatacaacacatacatgaggaatactagtaaacaacagcagcagaaacatcagtatcagcagcgtcgccgcaggagaattgcggcagaacgggaaacccgtcctgggggnacnncaattaaacnccaacgcgccgggg

SEQ ID NO: 433939 - DNA, 1252 bp, Homo sapiens
ctgtaacagggaaggttcacgggctcatgagtgtccaacatgtctccagcgtcctccgcctcgcagccagccagcgtgaccggtgacaacgtgatggggccgactcgggagatctcagccggtgacacgcaagtgcagatagatggccttgtggtattaaagataatcaaacattatcaagaagaaggacaaggaactgaagttgttcaaggagtgcttttgggtctggttgtagaagatcggcttgaaattaccaactgctttcctttccctcagcacacagaggatgatgctgactttgatgaagtccaatatcagatggaaatgatgcggagccttcgccatgtaaacattgatcatcttcacgtgggctggtatcagtccacatactatggctcattcgttacccgggcactcctggactctcagtttagttaccagcatgccattgaagaatctgtcgttctcatttatgatcccataaaaactgcccaaggatctctctcactaaaggcatacagactgactcctaaactgatggaagtttgtaaagaaaaggatttttcccctgaagcattgaaaaaagcaaatatcacctttgagtacatgtttgaagaagtgccgattgtaattaaaaattcacatctgatcaatgtcctaatgtgggaacttgaaaagaagtcagctgttgcagataaacatgaattgctcagccttgccagcagcaatcatttggggaagaatctacagttgctgatggacagagtggatgaaatgagccaagatatagttaaatacaacacatacatgaggaatactagtaaacaacagcagcagaaacatcagtatcagcagcgtcgccagcaggagaatatgcagcgccagagccgaggagaaccccccgctccctgaggaggacctgtccaaactcttcaaaccaccacagccgcctgccaggatggactcgctgctcattgcaggccagataaacacttactgccagaacatcaaggagttcactgcccaaaacttaggcaagctcttcatggcccaggctcttcaagaatacaacaactaagaaaaggaagtttccagaaaagaagttaacatgaactcttgaagtcacaccagggcaactcttggaagaaatatatttgcatattgaaaagcacagaggatttctttagtgtcattgccgattttggctataacagtgtctttctagccataataaaataaaacaaaatcttga

SEQ ID NO: 433940 - DNA, 1386 bp, Homo sapiens
  misc_feature (14)..(15): n is a, c, g, or t
  misc_feature (24)..(24): n is a, c, g, or t
ccgagcgactaagnntggatcaanaaaaaagccagggcgtgtattatataccgaaccggccagtacttacgtctagtacgagctggtgcgaatcgacgaagaagatggcgtcccgcaaggaaggtaccggctctactgccacctcttccagctccaccgccggcgcagcagggaaaggcaaaggcaaaggcggctcgggagattcagccgtgaagcaagtgcagatagatggccttttctctggtcaggtatcctctcagaagcccttcctggatccccctaaggtggtattaaagataatcaaacattatcaagaagaaggacaaggaactgaagttgttcaaggagtgcttttgggtctggttgtagaagatcggcttgaaattaccaactgctttcctttccctcagcacacagaggatgatgctgactttgatgaagtccaatatcagatggaaatgatgcggagccttcgccatgtaaacattgatcatcttcacgtgggctggtatcagtccacatactatggctcattcgttacccgggcactcctggactctcagtttagttaccagcatgccattgaagaatctgtcgttctcatttatgatcccataaaaactgcccaaggatctctctcactaaaggcatacagactgactcctaaactgatggaagtttgtaaagaaaaggatttttcccctgaagcattgaaaaaagcaaatatcacctttgagtacatgtttgaagaagtgccgattgtaattaaaaattcacatctgatcaatgtcctaatgtgggaacttgaaaagaagtcagctgttgcagataaacatgaattgctcagccttgccagcagcaatcatttggggaagaatctacagttgctgatggacagagtggatgaaatgagccaagatatagttaaatacaacacatacatgaggaatactagtaaacaacagcagcagaaacatcagtatcagcagcgtcgccagcaggagaatatgcagcgccagagccgaggagaaccccccgctccctgaggaggacctgtccaaactcttcaaaccaccacagccgcctgccaggatggactcgctgctcattgcaggccagataaacacttactgccagaacatcaaggagttcactgcccaaaacttaggcaagctcttcatggcccaggctcttcaagaatacaacaactaagaaaaggaagtttccagaaaagaagttaacatgaactcttgaagtcacaccagggcaactcttggaagaaatatatttgcatattgaaaagcacagaggatttctttagtgtcattgccgattttggctataacagtgtctttctagccataataaaataaaacaaaatcttga

SEQ ID NO: 433941 - DNA, 1108 bp, Homo sapiens
agcggctctttcttcctgtctgcttggaaagatggcgtcccgcaaggaaggtaccggctctactgccacctcttccagctccaccgccggcgcagcagggaaaggcaaaggcaaaggcggctcgggagattcagccgtgaagcaagtgcagatagatggcctttccaatatcagatggaaatgatgcggagccttcgccatgtaaacattgatcatcttcacgtgggctggtatcagtccacatactatggctcattcgttacccgggcactcctggactctcagtttagttaccagcatgccattgaagaatctgtcgttctcatttatgatcccataaaaactgcccaaggatctctctcactaaaggcatacagactgactcctaaactgatggaagtttgtaaagaaaaggatttttcccctgaagcattgaaaaaagcaaatatcacctttgagtacatgtttgaagaagtgccgattgtaattaaaaattcacatctgatcaatgtcctaatgtgggaacttgaaaagaagtcagctgttgcagataaacatgaattgctcagccttgccagcagcaatcatttggggaagaatctacagttgctgatggacagagtggatgaaatgagccaagatatagttaaatacaacacatacatgaggaatactagtaaacaacagcagcagaaacatcagtatcagcagcgtcgccagcaggagaatatgcagcgccagagccgaggagaaccccccgctccctgaggaggacctgtccaaactcttcaaaccaccacagccgcctgccaggatggactcgctgctcattgcaggccagataaacacttactgccagaacatcaaggagttcactgcccaaaacttaggcaagctcttcatggcccaggctcttcaagaatacaacaactaagaaaaggaagtttccagaaaagaagttaacatgaactcttgaagtcacaccagggcaactcttggaagaaatatatttgcatattgaaaagcacagaggatttctttagtgtcattgccgattttggctataacagtgtctttctagccataataaaataaaacaaaatcttga

SEQ ID NO: 433942 - DNA, 1213 bp, Homo sapiens
agcggctctttcttcctgtctgcttggaaagatggcgtcccgcaaggaaggtaccggctctactgccacctcttccagctccaccgccggcgcagcagggaaaggcaaaggcaaaggcggctcgggagattcagccgtgaagcaagtgcagatagatggccttgtggtattaaagataatcaaacattatcaagaagaaggacaaggaactgaagttgttcaaggagtgcttttgggtctggttgtagaagatcggcttgaaattaccaactgctttcctttccctcagcacacagaggatgatgctgactttgatgaagtccaatatcagatggaaatgatgcggagccttcgccatgtaaacattgatcatcttcacgtgggctggtatcagtccacatactatggctcattcgttacccgggcactcctggactctcagtttagttaccagcatgccattgaagaatctgtcgttctcatttatgatcccataaaaactgcccaaggatctctctcactaaaggcatacagactgactcctaaactgatggaagtttgtaaagaaaaggatttttcccctgaagcattgaaaaaagcaaatatcacctttgagtacatgtttgaagaagtgccgattgtaattaaaaattcacatctgatcaatgtcctaatgtgggaacttgcaatcatttggggaagaatctacagttgctgatggacagagtggatgaaatgagccaagatatagttaaatacaacacatacatgaggaatactagtaaacaacagcagcagaaacatcagtatcagcagcgtcgccagcaggagaatatgcagcgccagagccgaggagaaccccccgctccctgaggaggacctgtccaaactcttcaaaccaccacagccgcctgccaggatggactcgctgctcattgcaggccagataaacacttactgccagaacatcaaggagttcactgcccaaaacttaggcaagctcttcatggcccaggctcttcaagaatacaacaactaagaaaaggaagtttccagaaaagaagttaacatgaactcttgaagtcacaccagggcaactcttggaagaaatatatttgcatattgaaaagcacagaggatttctttagtgtcattgccgattttggctataacagtgtctttctagccataataaaataaaacaaaatcttga

SEQ ID NO: 433943 - DNA, 1333 bp, Homo sapiens
agcggctctttcttcctgtctgcttggaaagatggcgtcccgcaaggaaggtaccggctctactgccacctcttccagctccaccgccggcgcagcagggaaaggcaaaggcaaaggcggctcgggagattcagccgtgaagcaagtgcagatagatggccttgtggtattaaagataatcaaacattatcaagaagaaggacaaggaactgaagttgttcaaggagtgcttttgggtctggttgtagaagatcggcttgaaattaccaactgctttcctttccctcagcacacagaggatgatgctgactttgatgaagtccaatatcagatggaaatgatgcggagccttcgccatgtaaacattgatcatcttcacgtgggctggtatcagtccacatactatggctcattcgttacccgggcactcctggactctcagtttagttaccagcatgccattgaagaatctgtcgttctcatttatgatcccataaaaactgcccaaggatctctctcactaaaggcatacagactgactcctaaactgatggaagtttgtaaagaaaaggatttttcccctgaagcattgaaaaaagcaaatatcacctttgagtacatgtttgaagaagtgccgattgtaattaaaaattcacatctgatcaatgtcctaatgtgggaacttgaaaagaagtcagctgttgcagataaacatgaattgctcagccttgccagcagtatcagcagcgtcgccagcaggagaatatgcagcgccagagccgaggagaaccccccgctccctgaggaggacctgtccaaactcttcaaaccaccacagccgcctgccaggatggactcgctgctcattgcaggccagataaacacttactgccagaacatcaaggagttcactgcccaaaacttaggcaagctcttcatggcccaggctcttcaagaatacacactagaaaggagttccgaaagagtaactgactctgagtcccccggcgtctgggaatattggttgaagccggatttttgtctccgtgggaaccgtttcgcaaacaacacaaaaaagccgtggcgggagaattgtcgggagggcggcctttgcccgttcagcccctactctacctctcctgttgctacacccaccagcgtgtagtcacacaagagcgacaacgcgaagcagaacgtaacgcacgcactgagagcagcgacgacgaggacaacaggaagcagacaatcagacgcacgacacagcacgcagactaggagaaagagaggcgagcagacagcacgcgagtagcaacaagagacgacaacacaggtg

SEQ ID NO: 433944 - DNA, 847 bp, Homo sapiens
agcggctctttcttcctgtctgcttggaaagatggcgtcccgcaaggaaggtaccggctctactgccacctcttccagctccaccgccggcgcagcagggaaaggcaaaggcaaaggcggctcgggagattcagccgtgaagcaagtgcagatagatggccttgtggtattaaagataatcaaacattatcaagaagaaggacaaggaactgaagttgttcaaggagtgcttttgggtctggttgtagaagatcggcttgaaattaccaactgctttcctttccctcagcacacagaggatgatgctgactttgatgaagcaatcatttggggaagaatctacagttgctgatggacagagtggatgaaatgagccaagatatagttaaatacaacacatacatgaggaatactagtaaacaacagcagcagaaacatcagtatcagcagcgtcgccagcaggagaatatgcagcgccagagccgaggagaaccccccgctccctgaggaggacctgtccaaactcttcaaaccaccacagccgcctgccaggatggactcgctgctcattgcaggccagataaacacttactgccagaacatcaaggagttcactgcccaaaacttaggcaagctcttcatggcccaggctcttcaagaatacaacaactaagaaaaggaagtttccagaaaagaagttaacatgaactcttgaagtcacaccagggcaactcttggaagaaatatatttgcatattgaaaagcacagaggatttctttagtgtcattgccgattttggctataacagtgtctttctagccataataaaataaaacaaaatcttga

SEQ ID NO: 433945 - DNA, 500 bp, Homo sapiens
agcggctctttcttcctgtctgcttggaaagatggcgtcccgcaaggaaggtaccggctctactgccacctcttccagctccaccgccggcgcagcagggaaaggcaaaggcaaaggcggctcgggagattcagccgtgaagcaagtgcagatagatggccttgtggtattaaagataatcaaacattatcaagaagaaggacaaggaactgaagttgttcaaggagtgcttttgggtctggttgtagaagatcggcttgaaattaccaactgctttcctttccctcagcacacagaggatgatgctgactttgatgaagtccaatatcagatggaaatgatgcggagccttcgccatgtaaacattgatcatcttcacgtgggctggtatcagtccacatactatggctcattcgttacccgggcactcctggactctcagagtcagtctgtatgcctttagtgagagagatccttgggcagtttttatgggatcataa

SEQ ID NO: 433946 - DNA, 389 bp, Homo sapiens
tggggtgttcgaggtccctcggatgaagtgtctctggatgcaagtgtcgctggatgcaaagtgtctctggatgcaaagtgtcacagccgcctgccaggatggactcgctgctcatgcgccagataaacacttactgccagaacatcaaggagttcactgcccaaaacttaggcaagctcttcatggcccaggctcttcaagaatacaacaactaagaaaaggaagtttccagaaaagaagttaacatgaactcttgaagtcacaccagggcaactcttggaagaaatatatttgcatattgaaaagcacagaggatttctttagtgtcattgccgattttggctataacagtgtctttctagccataataaaataaaacaaaatcttga

SEQ ID NO: 433947 - DNA, 516 bp, Homo sapiens
acatacattgtctgatgacatggctccctcattcctctcctattaaaaagagcagagttggccgggcgtggtggctcacggctgtaatcccagcactttgggaggccgaggcgggcggatcaggaggtcaggagttcgagaccagcctgaccaacatggtgaaaccccgtctctactaaaaacacaaaattagccgggcatgttggcacgcgcctgtaatctcagctactcaggaggctgaggcgggagaatcgcttgaacctgggaggcggaggttgcagtgagccgagattgtgccactgcactccagcctgggcaatagagcgagcctccaacaactaagaaaaggaagtttccagaaaagaagttaacatgaactcttgaagtcacaccagggcaactcttggaagaaatatatttgcatattgaaaagcacagaggatttctttagtgtcattgccgattttggctataacagtgtctttctagccataataaaataaaacaaaatcttga

SEQ ID NO: 433948 - DNA, 291 bp, Homo sapiens
gagattatagttggaagttcggtatggaaagtttagtaacaagttgactcagattttttcctctgctcttgcttttatgcatatgtgtgctctcattcttttagcaaaagccagttcaagttcatatcttaaaactgtttagagcagtagcaaagctataatttaaagtaagacttgtcagtatatttactttacatttcagcaatcatttggggaagaatctacagttgctgatggacagagtggatgaaatgagccaagatatagttaaatacaacacatacatgagga

SEQ ID NO: 433949 - DNA, 1206 bp, Homo sapiens
ggggagtggaccagatctcggacgcgtgtacacatggtgtacgagcaggccaaggcgcgcttcgaggaggtgctgtccaaggtgcagcaggtgcagccggccatgtggtattaaagataatcaaacattatcaagaagaaggacaaggaactgaagttgttcaaggagtgcttttgggtctggttgtagaagatcggcttgaaattaccaactgctttcctttccctcagcacacagaggatgatgctgactttgatgaagtccaatatcagatggaaatgatgcggagccttcgccatgtaaacattgatcatcttcacgtgggctggtatcagtccacatactatggctcattcgttacccgggcactcctggactctcagtttagttaccagcatgccattgaagaatctgtcgttctcatttatgatcccataaaaactgcccaaggatctctctcactaaaggcatacagactgactcctaaactgatggaagtttgtaaagaaaaggatttttcccctgaagcattgaaaaaagcaaatatcacctttgagtacatgtttgaagaagtgccgattgtaattaaaaattcacatctgatcaatgtcctaatgtgggaacttgaaaagaagtcagctgttgcagataaacatgaattgctcagccttgccagcagcaatcatttggggaagaatctacagttgctgatggacagagtggatgaaatgagccaagatatagttaaatacaacacatacatgaggaatactagtaaacaacagcagcagaaacatcagtatcagcagcgtcgccagcaggagaatatgcagcgccagagccgaggagaaccccccgctccctgaggaggacctgtccaaactcttcaaaccaccacagccgcctgccaggatggactcgctgctcattgcaggccagataaacacttactgccagaacatcaaggagttcactgcccaaaacttaggcaagctcttcatggcccaggctcttcaagaatacaacaactaagaaaaggaagtttccagaaaagaagttaacatgaactcttgaagtcacaccagggcaactcttggaagaaatatatttgcatattgaaaagcacagaggatttctttagtgtcattgccgattttggctataacagtgtctttctagccataataaaataaaacaaaatcttga

SEQ ID NO: 433950 - DNA, 1244 bp, Homo sapiens
agcggctctttcttcctgtctgcttggaaagatggcgtcccgcaaggaaggtaccggctctactgccacctcttccagctccaccgccggcgcagcagggaaaggcaaaggcaaaggcggctcgggagattcagccgtgaagcaagtgcagatagatggccttgtggtattaaagataatcaaacattatcaagaagaaggacaaggaactgaagttgttcaaggagtgcttttgggtctggttgtagaagatcggcttgaaattaccaactgctttcctttccctcagcacacagaggatgatgctgactttgatgaagtccaatatcagatggaaatgatgcggagccttcgccatgtaaacattgatcatcttcacgtgggctggtatcagtccacatactatggctcattcgttacccgggcactcctggactctcagtttagttaccagcatgccattgaagaatctgtcgttctcatttatgatcccataaaaactgcccaaggatctctctcactaaaggcatacagactgactcctaaactgatggaagtttgtaaagaaaaggatttttcccctgaagcattgaaaaaagcaaatatcacctttgcgattgtaattaaaaattcacatctgatcaatgtcctaatgtgggaacttgaaaagaagtcagctgttgcagataaacatgaattgctcagccttgccagcagcaatcatttggggaagaatctacagttgctgatggacagagtggatgaaatgagccaagatatagttaaatacaacacatacatgaggaatactagtaaacaacagcagcagaaacatcagtatcagcagcgtcgccagcaggagaatatgcagcgccagagccgaggagaaccccccgctccctgaggaggacctgtccaaactcttcaaaccaccacagccgcctgccaggatggactcgctgctcattgcaggccagataaacacttactgccagaacatcaaggagttcactgcccaaaacttaggcaagctcttcatggcccaggctcttcaagaatacaacaactaagaaaaggaagtttccagaaaagaagttaacatgaactcttgaagtcacaccagggcaactcttggaagaaatatatttgcatattgaaaagcacagaggatttctttagtgtcattgccgattttggctataacagtgtctttctagccataataaaataaaacaaaatcttga

SEQ ID NO: 433951 - DNA, 827 bp, Homo sapiens
  misc_feature (765)..(765): n is a, c, g, or t
agcggctctttcttcctgtctgcttggaaagatggcgtcccgcaaggaaggtaccggctctactgccacctcttccagctccaccgccggcgcagcagggaaaggcaaaggcaaaggcggctcgggagattcagccgtgaagcaagtgcagatagatggccttgtggtattaaagataatcaaacattatcaagaagaaggacaaggaactgaagttgttcaaggagtgcttttgggtctggttgtagaagatcggcttgaaattaccaactgctttcctttccctcagcacacagaggatgatgctgactttgatgaagtccaatatcagatggaaatgatgcggagccttcgccatgtaaacattgatcatcttcacgtgggctggtatcagtccacatactatggctcattcgttacccgggcactcctggactctcagtttagttaccagcatgccattgaagaatctgtcgttctcatttatgatcccataaaaactgcccaaggatctctctcactaaaggcatacagactgactcctaaactgatggaagtttgtaaagaaaaggatttttcccctgaagcattgaaaaaagcaaatatcacctttgagtacatgtttgaagaagtgccgattgtaattaaaaattcacatctgatcaatgtcctaatgtgggaacttgaaaagaagtcagctgttgtatttaactatatcttggctcatttcatccactctgtccatcagcaactgtagattcttcnccaaatgattgctgctggcaaggctgagcaattcatgtttatctgcagtcgacgcggccgaa

SEQ ID NO: 433952 - DNA, 1078 bp, Homo sapiens
  misc_feature (983)..(983): n is a, c, g, or t
agcggctctttcttcctgtctgcttggaaagatggcgtcccgcaaggaaggtaccggctctactgccacctcttccagctccaccgccggcgcagcagggaaaggcaaaggcaaaggcggctcgggagattcagccgtgaagcaagtgcagatagatggcctttccaatatcagatggaaatgatgcggagccttcgccatgtaaacattgatcatcttcacgtgggctggtatcagtccacatactatggctcattcgttacccgggcactcctggactctcagtttagttaccagcatgccattgaagaatctgtcgttctcatttatgatcccataaaaactgcccaaggatctctctcactaaaggcatacagactgactcctaaactgatggaagtttgtaaagaaaaggatttttcccctgaagcattgaaaaaagcaaatatcacctttgagtacatgtttgaagaagtgccgattgtaattaaaaattcacatctgatcaatgtcctaatgtgggaacttgaaaagaagtcagctgttgcagataaacatgaattgctcagccttgccagcagcaatcatttggggaagaatctacagttgctgatggacagagtggatgaaatgagccaagatatagttaaatacaacacatacatgaggaatactagtaaacaacagcagcagaaacatcagtatcagcagcgtcgccagcaggagaatatgcagcgccagagccgaggagaaccccccgctccctgaggaggacctgtccaaactcttcaaaccaccacagccgcctgccaggatggactcgctgctcattgcaggccagataaacacttactgccagaacatcaaggagttcactgcccaaaacttaggcaagctcttcatggcccaggctcttcaagaatacaacaactaagaaaaggaagtttccagaaaagaagttaacatgaactcttgagttcccnggcacctggagaattttgtttgaagccgggttcttagctgcgatgggttaagtttgccttaaaaactaaaaaaagggggagtccggcggggccta

SEQ ID NO: 433953 - DNA, 2510 bp, Homo sapiens
  misc_feature (2499)..(2499): n is a, c, g, or t
atgttgatatgtcgtctgccccggaaacggtgacaggaggctcaagggggcggaggcggcgttgccgggctctccggaaggagacgtggcggcggttgggccggtgatacccgggcgctttatagtcccgccgcctcctcctccacctcctcctcctcctcctctcctcctggagcagaggaggttgtggcggtggctggagaaagcggcggcggaggatggaggaaggaggcggcggcgtacggagtctggtcccgggcgggccggtgttactggtcctctgcggcctcctggaggcgtccggcggcggccgagcccttcctcaactcagcgatgacatccctttccgagtcaactggcccggcaccgagttctctctgcccacaactggagttttatataaagaagataattatgtcatcatgacaactgcacataaagaaaaatataaatgcatacttccccttgtgacaagtggggatgaggaagaagaaaaggattataaaggccctaatccaagagagcttttggagccactatttaaacaaagcagttgttcctacagaattgagtcttattggacttacgaagtatgtcatggaaaacacattcggcagtaccatgaagagaaagaaactggtcagaaaataaatattcacgagtactaccttgggaatatgttggccaagaaccttctatttgaaaaagaacgagaagcagaagaaaaggaaaaatcaaatgagattcccactaaaaatatcgaaggtcagatgacaccatactatcctgtgggaatgggaaatggtacaccttgtagtttgaaacagaaccggcccagatcaagtactgtgatgtacatatgtcatcctgaatctaagcatgaaattctttcagtagctgaagttacaacttgtgaatatgaagttgtcattttgacaccactcttgtgcagtcatcctaaatataggttcagagcatctcctgtgaatgacatattttgtcaatcactgccaggatctccatttaagcccctcaccctgaggcagctggagcagcaggaagaaatactaagggtgccttttaggagaaataaagaggaagatttgcaatcaactaaagaagagagatttccagcgatccacaagtcgattgctattggctctcagccagtgctcactgttgggacaacccacatatccaaattgacagatgaccaactcataaaagagtttcttagtggttcttactgctttcgtgggggtgtcggttggtggaaatatgaattctgctatggcaaacatgtacatcaataccatgaggacaaggatagtgggaaaacctctgtggttgtcgggacatggaaccaagaagagcatattgaatgggctaagaagaatactgctagagcttatcatcttcaagacgatggtacccagacagtcaggatggtgtcacatttttatggaaatggagatatttgtgatataactgacaaaccaagacaggtgactgtaaaactaaagtgcaaagaatcagattcacctcatgctgttactgtatatatgctagagcctcactcctgtcaatatattcttggggttgaatctccagtgatctgtaaaatcttagatacagcagatgaaaatggacttctttctctccccaactaaaggatattaaagttaggggaaagaaaagatcattgaaagtcatgataatttctgtcccactgtgtctcattatagagttctcagccattggacctcttctaaaggatggtataaaatgactctcaaccactttgtgaatacatatgtgtatataagaggttattgataaacttctgaggcagacatttgtctcgctttttttcatttttgttgtgtcttataaactgactgtttttctttgcttggatactgtgattccaaaataaatctcatccaagcaagttagagtccagcctaatcaaatgtcataattgttgtacctattgaaagtttttaaataatagatttattatgtaaattatagtatatgtaagtagctaatgaagtaaagatcatgaagaaagaaattgataggtgtaaatgagagaccatgtaaaatatgtaaattctagtacctgaaatcctttcaacagatttttatatagcaactgctctctgcaagtagttaaactagaaactgggcacatggtagaggctcacatgggagttgtcctcacccttgttaatctcaagaaactcttatttataataggttgcttctctctcagaacttttatctattacttttttcttcttatgagtatgtttactctcagagtatctatctgatgtagacagttggtgatgcttctgagactcagaatggtttactctaacaaaacactgtgctgtctatcccttgtacttgcctactgtaatatggatttcacttctgaacagtttacagcacaatatttattttaaagtgaataaaatgtccacaagcaangttgtcatgta

SEQ ID NO: 433954 - DNA, 837 bp, Homo sapiens
atgttgatatgtcgtctgccccggaaacggtgacaggaggctcaagggggcggaggcggcgttgccgggctctccggaaggagacgtggcggcggttgggccggtgatacccgggcgctttatagtcccgccgcctcctcctccacctcctcctcctcctcctctcctcctggagcagaggaggttgtggcggtggctggagaaagcggcggcggaggatggaggaaggaggcggcggcgtacggagtctggtcccgggcgggccggtgttactggtcctctgcggcctcctggaggcgtccggcggcggccgagcccttcctcaactcagcgatgacatccctttccgagtcaactggcccggcaccgagttctctctgcccacaactggagttttatataaagaagataattatgtcatcatgacaactgcacataaagaaaaatataaatgcatacttccccttgtgacaagtggggatgaggaagaagaaaaggattataaaggccctaatccaagagagcttttggagccactatttaaacaaagcagttgttcctacagaattgagtcttattggacttacgaagtatgtcatggaaaacacattcggcagtaccatgaagagaaagaaactggtcagaaaataaatattcacgagtactaccttgggaatatgttggccaagaaccttctatttgaaaaagaacgagaagcagaagaaaggaaaaatcatatgagattccactcctttacttggaaccaaacgggccagatcaattcttggaagacctatgtatccttaactaaccataacatcttcataacttaactaa

SEQ ID NO: 433955 - DNA, 507 bp, Homo sapiens
atgttgatatgtcgtctgccccggaaacggtgacaggaggctcaagggggcggaggcggcgttgccgggctctccggaaggagacgtggcggcggttgggccggtgatacccgggcgctttatagtcccgccgcctcctcctccacctcctcctcctcctcctctcctcctggagcagaggaggttgtggcggtggctggagaaagcggcggcggaggatggaggaaggaggcggcggcgtacggagtctggtcccgggcgggccggtgttactggtcctctgcggcctcctggaggcgtccggcggcggccgagcccttcctcaactcagcgatgacatccctttccgagtcaactggcccggcaccgagttctctctgaggcagggtctcactatgttgcctaggctggtctcgaactcctgggctcaagcaatcctcgtgcctgagcctcccagaatactgggattacatgtgtgaaccaaatgttctgaatttatctaggtaa

SEQ ID NO: 433956 - DNA, 3007 bp, Homo sapiens
  misc_feature (2499)..(2499): n is a, c, g, or t
atgttgatatgtcgtctgccccggaaacggtgacaggaggctcaagggggcggaggcggcgttgccgggctctccggaaggagacgtggcggcggttgggccggtgatacccgggcgctttatagtcccgccgcctcctcctccacctcctcctcctcctcctctcctcctggagcagaggaggttgtggcggtggctggagaaagcggcggcggaggatggaggaaggaggcggcggcgtacggagtctggtcccgggcgggccggtgttactggtcctctgcggcctcctggaggcgtccggcggcggccgagcccttcctcaactcagcgatgacatccctttccgagtcaactggcccggcaccgagttctctctgcccacaactggagttttatataaagaagataattatgtcatcatgacaactgcacataaagaaaaatataaatgcatacttccccttgtgacaagtggggatgaggaagaagaaaaggattataaaggccctaatccaagagagcttttggagccactatttaaacaaagcagttgttcctacagaattgagtcttattggacttacgaagtatgtcatggaaaacacattcggcagtaccatgaagagaaagaaactggtcagaaaataaatattcacgagtactaccttgggaatatgttggccaagaaccttctatttgaaaaagaacgagaagcagaagaaaaggaaaaatcaaatgagattcccactaaaaatatcgaaggtcagatgacaccatactatcctgtgggaatgggaaatggtacaccttgtagtttgaaacagaaccggcccagatcaagtactgtgatgtacatatgtcatcctgaatctaagcatgaaattctttcagtagctgaagttacaacttgtgaatatgaagttgtcattttgacaccactcttgtgcagtcatcctaaatataggttcagagcatctcctgtgaatgacatattttgtcaatcactgccaggatctccatttaagcccctcaccctgaggcagctggagcagcaggaagaaatactaagggtgccttttaggagaaataaagaggaagatttgcaatcaactaaagaagagagatttccagcgatccacaagtcgattgctattggctctcagccagtgctcactgttgggacaacccacatatccaaattgacagatgaccaactcataaaagagtttcttagtggttcttactgctttcgtgggggtgtcggttggtggaaatatgaattctgctatggcaaacatgtacatcaataccatgaggacaaggatagtgggaaaacctctgtggttgtcgggacatggaaccaagaagagcatattgaatgggctaagaagaatactgctagagcttatcatcttcaagacgatggtacccagacagtcaggatggtgtcacatttttatggaaatggagatatttgtgatataactgacaaaccaagacaggtgactgtaaaactaaagtgcaaagaatcagattcacctcatgctgttactgtatatatgctagagcctcactcctgtcaatatattcttggggttgaatctccagtgatctgtaaaatcttagatacagcagatgaaaatggacttctttctctccccaactaaaggatattaaagttaggggaaagaaaagatcattgaaagtcatgataatttctgtcccactgtgtctcattatagagttctcagccattggacctcttctaaaggatggtataaaatgactctcaaccactttgtgaatacatatgtgtatataagaggttattgataaacttctgaggcagacatttgtctcgctttttttcatttttgttgtgtcttataaactgactgtttttctttgcttggatactgtgattccaaaataaatctcatccaagcaagttagagtccagcctaatcaaatgtcataattgttgtacctattgaaagtttttaaataatagatttattatgtaaattatagtatatgtaagtagctaatgaagtaaagatcatgaagaaagaaattgataggtgtaaatgagagaccatgtaaaatatgtaaattctagtacctgaaatcctttcaacagatttttatatagcaactgctctctgcaagtagttaaactagaaactgggcacatggtagaggctcacatgggagttgtcctcacccttgttaatctcaagaaactcttatttataataggttgcttctctctcagaacttttatctattacttttttcttcttatgagtatgtttactctcagagtatctatctgatgtagacagttggtgatgcttctgagactcagaatggtttactctaacaaaacactgtgctgtctatcccttgtacttgcctactgtaatatggatttcacttctgaacagtttacagcacaatatttattttaaagtgaataaaatgtccacaagcaangttgtcatgtaaaaagtcaatggcagattattaaatttctttatttttttcattatcctgttgtacacattttaaacatacatatctgaacaagaacagaaaagggccataaaagtcttttcctcctttttagtagttctggccaaagacagtttaagaaaaggctaatataattgactcttttagggttatttatagattttagtaggaagcagcacatagagaaagagcatgaactttgaattcagacctaggtcaaaatcctttttttttctctctctctctctacccagagatggggctgctcaggctgctctgaacccctgggctcaagcagttttcccacctcagcctcccaaatagctgggactaccaggcacacaccaacaagaccagtgcaaaatcctgtctttaacttactgtgtacaagataggaaaaaccaaacacttatacccaatacagcacagaacacgaggtcaccaaaatgtgtggtttttcttctcacgc

SEQ ID NO: 433957 - DNA, 2437 bp, Homo sapiens
  misc_feature (2426)..(2426): n is a, c, g, or t
atgttgatatgtcgtctgccccggaaacggtgacaggaggctcaagggggcggaggcggcgttgccgggctctccggaaggagacgtggcggcggttgggccggtgatacccgggcgctttatagtcccgccgcctcctcctccacctcctcctcctcctcctctcctcctggagcagaggaggttgtggcggtggctggagaaagcggcggcggaggatggaggaaggaggcggcggcgagcccttcctcaactcagcgatgacatccctttccgagtcaactggcccggcaccgagttctctctgcccacaactggagttttatataaagaagataattatgtcatcatgacaactgcacataaagaaaaatataaatgcatacttccccttgtgacaagtggggatgaggaagaagaaaaggattataaaggccctaatccaagagagcttttggagccactatttaaacaaagcagttgttcctacagaattgagtcttattggacttacgaagtatgtcatggaaaacacattcggcagtaccatgaagagaaagaaactggtcagaaaataaatattcacgagtactaccttgggaatatgttggccaagaaccttctatttgaaaaagaacgagaagcagaagaaaaggaaaaatcaaatgagattcccactaaaaatatcgaaggtcagatgacaccatactatcctgtgggaatgggaaatggtacaccttgtagtttgaaacagaaccggcccagatcaagtactgtgatgtacatatgtcatcctgaatctaagcatgaaattctttcagtagctgaagttacaacttgtgaatatgaagttgtcattttgacaccactcttgtgcagtcatcctaaatataggttcagagcatctcctgtgaatgacatattttgtcaatcactgccaggatctccatttaagcccctcaccctgaggcagctggagcagcaggaagaaatactaagggtgccttttaggagaaataaagaggaagatttgcaatcaactaaagaagagagatttccagcgatccacaagtcgattgctattggctctcagccagtgctcactgttgggacaacccacatatccaaattgacagatgaccaactcataaaagagtttcttagtggttcttactgctttcgtgggggtgtcggttggtggaaatatgaattctgctatggcaaacatgtacatcaataccatgaggacaaggatagtgggaaaacctctgtggttgtcgggacatggaaccaagaagagcatattgaatgggctaagaagaatactgctagagcttatcatcttcaagacgatggtacccagacagtcaggatggtgtcacatttttatggaaatggagatatttgtgatataactgacaaaccaagacaggtgactgtaaaactaaagtgcaaagaatcagattcacctcatgctgttactgtatatatgctagagcctcactcctgtcaatatattcttggggttgaatctccagtgatctgtaaaatcttagatacagcagatgaaaatggacttctttctctccccaactaaaggatattaaagttaggggaaagaaaagatcattgaaagtcatgataatttctgtcccactgtgtctcattatagagttctcagccattggacctcttctaaaggatggtataaaatgactctcaaccactttgtgaatacatatgtgtatataagaggttattgataaacttctgaggcagacatttgtctcgctttttttcatttttgttgtgtcttataaactgactgtttttctttgcttggatactgtgattccaaaataaatctcatccaagcaagttagagtccagcctaatcaaatgtcataattgttgtacctattgaaagtttttaaataatagatttattatgtaaattatagtatatgtaagtagctaatgaagtaaagatcatgaagaaagaaattgataggtgtaaatgagagaccatgtaaaatatgtaaattctagtacctgaaatcctttcaacagatttttatatagcaactgctctctgcaagtagttaaactagaaactgggcacatggtagaggctcacatgggagttgtcctcacccttgttaatctcaagaaactcttatttataataggttgcttctctctcagaacttttatctattacttttttcttcttatgagtatgtttactctcagagtatctatctgatgtagacagttggtgatgcttctgagactcagaatggtttactctaacaaaacactgtgctgtctatcccttgtacttgcctactgtaatatggatttcacttctgaacagtttacagcacaatatttattttaaagtgaataaaatgtccacaagcaangttgtcatgta

SEQ ID NO: 433958 - DNA, 2453 bp, Homo sapiens
  misc_feature (2442)..(2442): n is a, c, g, or t
atgttgatatgtcgtctgccccggaaacggtgacaggaggctcaagggggcggaggcggcgttgccgggctctccggaaggagacgtggcggcggttgggccggtgatacccgggcgctttatagtcccgccgcctcctcctccacctcctcctcctcctcctctcctcctggagcagaggaggttgtggcggtggctggagaaagcggcggcggaggatggaggaaggaggcggcggcgtacggagtctggtcccgggcgggccggtgttactggtcctctgcggcctcctggaggcgtccggcggcggccgagcccttcctcaactcagcgatgacatccctttccgagtcaactggcccggcaccgagttctctctgcccacaactggagttttatataaagaagataattatgtcatcatgacaactgcacataaagaaaaatataaatgcatacttccccttgtgacaagtggggatgagaaacaaagcagttgttcctacagaattgagtcttattggacttacgaagtatgtcatggaaaacacattcggcagtaccatgaagagaaagaaactggtcagaaaataaatattcacgagtactaccttgggaatatgttggccaagaaccttctatttgaaaaagaacgagaagcagaagaaaaggaaaaatcaaatgagattcccactaaaaatatcgaaggtcagatgacaccatactatcctgtgggaatgggaaatggtacaccttgtagtttgaaacagaaccggcccagatcaagtactgtgatgtacatatgtcatcctgaatctaagcatgaaattctttcagtagctgaagttacaacttgtgaatatgaagttgtcattttgacaccactcttgtgcagtcatcctaaatataggttcagagcatctcctgtgaatgacatattttgtcaatcactgccaggatctccatttaagcccctcaccctgaggcagctggagcagcaggaagaaatactaagggtgccttttaggagaaataaagaggaagatttgcaatcaactaaagaagagagatttccagcgatccacaagtcgattgctattggctctcagccagtgctcactgttgggacaacccacatatccaaattgacagatgaccaactcataaaagagtttcttagtggttcttactgctttcgtgggggtgtcggttggtggaaatatgaattctgctatggcaaacatgtacatcaataccatgaggacaaggatagtgggaaaacctctgtggttgtcgggacatggaaccaagaagagcatattgaatgggctaagaagaatactgctagagcttatcatcttcaagacgatggtacccagacagtcaggatggtgtcacatttttatggaaatggagatatttgtgatataactgacaaaccaagacaggtgactgtaaaactaaagtgcaaagaatcagattcacctcatgctgttactgtatatatgctagagcctcactcctgtcaatatattcttggggttgaatctccagtgatctgtaaaatcttagatacagcagatgaaaatggacttctttctctccccaactaaaggatattaaagttaggggaaagaaaagatcattgaaagtcatgataatttctgtcccactgtgtctcattatagagttctcagccattggacctcttctaaaggatggtataaaatgactctcaaccactttgtgaatacatatgtgtatataagaggttattgataaacttctgaggcagacatttgtctcgctttttttcatttttgttgtgtcttataaactgactgtttttctttgcttggatactgtgattccaaaataaatctcatccaagcaagttagagtccagcctaatcaaatgtcataattgttgtacctattgaaagtttttaaataatagatttattatgtaaattatagtatatgtaagtagctaatgaagtaaagatcatgaagaaagaaattgataggtgtaaatgagagaccatgtaaaatatgtaaattctagtacctgaaatcctttcaacagatttttatatagcaactgctctctgcaagtagttaaactagaaactgggcacatggtagaggctcacatgggagttgtcctcacccttgttaatctcaagaaactcttatttataataggttgcttctctctcagaacttttatctattacttttttcttcttatgagtatgtttactctcagagtatctatctgatgtagacagttggtgatgcttctgagactcagaatggtttactctaacaaaacactgtgctgtctatcccttgtacttgcctactgtaatatggatttcacttctgaacagtttacagcacaatatttattttaaagtgaataaaatgtccacaagcaangttgtcatgta

SEQ ID NO: 433959 - DNA, 2348 bp, Homo sapiens
  misc_feature (2337)..(2337): n is a, c, g, or t
atgttgatatgtcgtctgccccggaaacggtgacaggaggctcaagggggcggaggcggcgttgccgggctctccggaaggagacgtggcggcggttgggccggtgatacccgggcgctttatagtcccgccgcctcctcctccacctcctcctcctcctcctctcctcctggagcagaggaggttgtggcggtggctggagaaagcggcggcggaggatggaggaaggaggcggcggcgtacggagtctggtcccgggcgggccggtgttactggtcctctgcggcctcctggaggcgtccggcggcggccgagcccttcctcaactcagcgatgacatccctttccgagtcaactggcccggcaccgagttctctctgcccacaactggagttttatataaagaagataattatgtcatcatgacaactgcacataaagaaaaatataaatgcatacttccccttgtgacaagtggggatgaggaagaagaaaaggattataaaggccctaatccaagagagcttttggagccactatttaaacaaagcagttgttcctacagaattgagtcttattggacttacgaagtatgtcatggaaaacacattcggcagtaccatgaagagaaagaaactggtcagaaaataaatattcacgagtactaccttgggaatatgttggccaagaaccttctatttgaaaaagaacgagaagcagaagaaaaggaaaaatcaaatgagattcccactaaaaatatcgaaggtcagatgacaccatactatcctgtgggaatgggaaatggtacaccttgtagtttgaaacagaaccggcccagatcaagtactgtgatgtacatatgtcatcctgaatctaagcatgaaattctttcagtagctgaagttacaacttgtgaatatgaagttgtcattttgacaccactcttgtgcagtcatcctaaatataggttcagagcatctcctgtgaatgacatattttgtcaatcactgccaggatctccatttaagcccctcaccctgaggcagctggagcagcaggaagaaatactaagggtgccttttaggagaaataaagagggtgtcggttggtggaaatatgaattctgctatggcaaacatgtacatcaataccatgaggacaaggatagtgggaaaacctctgtggttgtcgggacatggaaccaagaagagcatattgaatgggctaagaagaatactgctagagcttatcatcttcaagacgatggtacccagacagtcaggatggtgtcacatttttatggaaatggagatatttgtgatataactgacaaaccaagacaggtgactgtaaaactaaagtgcaaagaatcagattcacctcatgctgttactgtatatatgctagagcctcactcctgtcaatatattcttggggttgaatctccagtgatctgtaaaatcttagatacagcagatgaaaatggacttctttctctccccaactaaaggatattaaagttaggggaaagaaaagatcattgaaagtcatgataatttctgtcccactgtgtctcattatagagttctcagccattggacctcttctaaaggatggtataaaatgactctcaaccactttgtgaatacatatgtgtatataagaggttattgataaacttctgaggcagacatttgtctcgctttttttcatttttgttgtgtcttataaactgactgtttttctttgcttggatactgtgattccaaaataaatctcatccaagcaagttagagtccagcctaatcaaatgtcataattgttgtacctattgaaagtttttaaataatagatttattatgtaaattatagtatatgtaagtagctaatgaagtaaagatcatgaagaaagaaattgataggtgtaaatgagagaccatgtaaaatatgtaaattctagtacctgaaatcctttcaacagatttttatatagcaactgctctctgcaagtagttaaactagaaactgggcacatggtagaggctcacatgggagttgtcctcacccttgttaatctcaagaaactcttatttataataggttgcttctctctcagaacttttatctattacttttttcttcttatgagtatgtttactctcagagtatctatctgatgtagacagttggtgatgcttctgagactcagaatggtttactctaacaaaacactgtgctgtctatcccttgtacttgcctactgtaatatggatttcacttctgaacagtttacagcacaatatttattttaaagtgaataaaatgtccacaagcaangttgtcatgta

SEQ ID NO: 433960 - DNA, 2449 bp, Homo sapiens
  misc_feature (2438)..(2438): n is a, c, g, or t
atgttgatatgtcgtctgccccggaaacggtgacaggaggctcaagggggcggaggcggcgttgccgggctctccggaaggagacgtggcggcggttgggccggtgatacccgggcgctttatagtcccgccgcctcctcctccacctcctcctcctcctcctctcctcctggagcagaggaggttgtggcggtggctggagaaagcggcggcggaggatggaggaaggaggcggcggcgtacggagtctggtcccgggcgggccggtgttactggtcctctgcggcctcctggaggcgtccggcggcggccgagcccttcctcaactcagcgatgacatccctttccgagtcaactggcccggcaccgagttctctctgcccacaactggagttttatataaagaagataattatgtcatcatgacaactgcacataaagaaaaatataaatgcatacttccccttgtgacaagtggggatgaggaagaagaaaaggattataaaggccctaatccaagagagcttttggagccactatttaaacaaagcagttgttcctacagaattgagtcttattggacttacgaagtatgtcatggaaaacacattcggcagtaccatgaagagaaagaaactggtcagaaaataaatattcacgagtactaccttgggaatatgttggccaagaaccttctatttgaaaaagaacgagaagcagaagaaaaggaaaaatcaaatgaggtacaccttgtagtttgaaacagaaccggcccagatcaagtactgtgatgtacatatgtcatcctgaatctaagcatgaaattctttcagtagctgaagttacaacttgtgaatatgaagttgtcattttgacaccactcttgtgcagtcatcctaaatataggttcagagcatctcctgtgaatgacatattttgtcaatcactgccaggatctccatttaagcccctcaccctgaggcagctggagcagcaggaagaaatactaagggtgccttttaggagaaataaagaggaagatttgcaatcaactaaagaagagagatttccagcgatccacaagtcgattgctattggctctcagccagtgctcactgttgggacaacccacatatccaaattgacagatgaccaactcataaaagagtttcttagtggttcttactgctttcgtgggggtgtcggttggtggaaatatgaattctgctatggcaaacatgtacatcaataccatgaggacaaggatagtgggaaaacctctgtggttgtcgggacatggaaccaagaagagcatattgaatgggctaagaagaatactgctagagcttatcatcttcaagacgatggtacccagacagtcaggatggtgtcacatttttatggaaatggagatatttgtgatataactgacaaaccaagacaggtgactgtaaaactaaagtgcaaagaatcagattcacctcatgctgttactgtatatatgctagagcctcactcctgtcaatatattcttggggttgaatctccagtgatctgtaaaatcttagatacagcagatgaaaatggacttctttctctccccaactaaaggatattaaagttaggggaaagaaaagatcattgaaagtcatgataatttctgtcccactgtgtctcattatagagttctcagccattggacctcttctaaaggatggtataaaatgactctcaaccactttgtgaatacatatgtgtatataagaggttattgataaacttctgaggcagacatttgtctcgctttttttcatttttgttgtgtcttataaactgactgtttttctttgcttggatactgtgattccaaaataaatctcatccaagcaagttagagtccagcctaatcaaatgtcataattgttgtacctattgaaagtttttaaataatagatttattatgtaaattatagtatatgtaagtagctaatgaagtaaagatcatgaagaaagaaattgataggtgtaaatgagagaccatgtaaaatatgtaaattctagtacctgaaatcctttcaacagatttttatatagcaactgctctctgcaagtagttaaactagaaactgggcacatggtagaggctcacatgggagttgtcctcacccttgttaatctcaagaaactcttatttataataggttgcttctctctcagaacttttatctattacttttttcttcttatgagtatgtttactctcagagtatctatctgatgtagacagttggtgatgcttctgagactcagaatggtttactctaacaaaacactgtgctgtctatcccttgtacttgcctactgtaatatggatttcacttctgaacagtttacagcacaatatttattttaaagtgaataaaatgtccacaagcaangttgtcatgta

SEQ ID NO: 433961 - DNA, 2432 bp, Homo sapiens
  misc_feature (2421)..(2421): n is a, c, g, or t
atgttgatatgtcgtctgccccggaaacggtgacaggaggctcaagggggcggaggcggcgttgccgggctctccggaaggagacgtggcggcggttgggccggtgatacccgggcgctttatagtcccgccgcctcctcctccacctcctcctcctcctcctctcctcctggagcagaggaggttgtggcggtggctggagaaagcggcggcggaggatggaggaaggaggcggcggcgtacggagtctggtcccgggcgggccggtgttactggtcctctgcggcctcctggaggcgtccggcggcggccgagcccttcctcaactcagcgatgacatccctttccgagtcaactggcccggcaccgagttctctctgcccacaactggagttttatataaagaagataattatgtcatcatgacaactgcacataaagaaaaatataaatgcatacttccccttgtgacaagtggggatgaggaagaagaaaaggattataaaggccctaatccaagagagcttttggagccactatttaaacaaagcagttgttcctacagaattgagtcttattggacttacgaagtatgtcatggaaaacacattcggcagtaccatgaagagaaagaaactggtcagaaaataaatattcacgagtactaccttgggaatatgttggccaagaaccttctatttgaaaaagaacgagaagcagaagaaaaggaaaaatcaaatgagattcccactaaaaatatcgaaggtcagatgacaccatactatcctgtgggaatgggaaatggtacaccttgtagtttgaaacagaaccggcccagatcaagtactgtgatgtacatatgtcatcctgaatctaagcatgaaattctttcagtagctgaagttacaacttgtgaatatgaagttgtcattttgacaccactcttgtgcagtcatcctaaatataggttcagagcatctcctgtgaatgacatattttgtcaatcactgccaggatctccatttaagcccctcaccctgaggcagctggagcagcaggaagaaatactaagggtgccttttaggagaaataaagaggaagatttgcaatcaactaaagaagagagatttccagcgatccacaagtcgattgctattggctctcagccagtgctcactgttgggacaacccacatatccaaattgacagatgaccaactcataaaagagtttcttagtggttcttactgctttcgtgggggtgtcggttggtggaaatatgaattctgctatggcaaacatgtacatcaataccatgaggacaaggatagtgggaaaacctctgtggttgtcgggacatggaaccaagaagagcatattgaatgggctaagaagaatactgctagagcttatcatcttcaagacgatggtacccagacagtcaggtgcaaagaatcagattcacctcatgctgttactgtatatatgctagagcctcactcctgtcaatatattcttggggttgaatctccagtgatctgtaaaatcttagatacagcagatgaaaatggacttctttctctccccaactaaaggatattaaagttaggggaaagaaaagatcattgaaagtcatgataatttctgtcccactgtgtctcattatagagttctcagccattggacctcttctaaaggatggtataaaatgactctcaaccactttgtgaatacatatgtgtatataagaggttattgataaacttctgaggcagacatttgtctcgctttttttcatttttgttgtgtcttataaactgactgtttttctttgcttggatactgtgattccaaaataaatctcatccaagcaagttagagtccagcctaatcaaatgtcataattgttgtacctattgaaagtttttaaataatagatttattatgtaaattatagtatatgtaagtagctaatgaagtaaagatcatgaagaaagaaattgataggtgtaaatgagagaccatgtaaaatatgtaaattctagtacctgaaatcctttcaacagatttttatatagcaactgctctctgcaagtagttaaactagaaactgggcacatggtagaggctcacatgggagttgtcctcacccttgttaatctcaagaaactcttatttataataggttgcttctctctcagaacttttatctattacttttttcttcttatgagtatgtttactctcagagtatctatctgatgtagacagttggtgatgcttctgagactcagaatggtttactctaacaaaacactgtgctgtctatcccttgtacttgcctactgtaatatggatttcacttctgaacagtttacagcacaatatttattttaaagtgaataaaatgtccacaagcaangttgtcatgta

SEQ ID NO: 433962 - DNA, 1072 bp, Homo sapiens
  misc_feature (1061)..(1061): n is a, c, g, or t
aggattccccaaagatctttgagcatcacctggagatatttgtgatataactgacaaaccaagacaggtgactgtaaaactaaagtgcaaagaatcagattcacctcatgctgttactgtatatatgctagagcctcactcctgtcaatatattcttggggttgaatctccagtgatctgtaaaatcttagatacagcagatgaaaatggacttctttctctccccaactaaaggatattaaagttaggggaaagaaaagatcattgaaagtcatgataatttctgtcccactgtgtctcattatagagttctcagccattggacctcttctaaaggatggtataaaatgactctcaaccactttgtgaatacatatgtgtatataagaggttattgataaacttctgaggcagacatttgtctcgctttttttcatttttgttgtgtcttataaactgactgtttttctttgcttggatactgtgattccaaaataaatctcatccaagcaagttagagtccagcctaatcaaatgtcataattgttgtacctattgaaagtttttaaataatagatttattatgtaaattatagtatatgtaagtagctaatgaagtaaagatcatgaagaaagaaattgataggtgtaaatgagagaccatgtaaaatatgtaaattctagtacctgaaatcctttcaacagatttttatatagcaactgctctctgcaagtagttaaactagaaactgggcacatggtagaggctcacatgggagttgtcctcacccttgttaatctcaagaaactcttatttataataggttgcttctctctcagaacttttatctattacttttttcttcttatgagtatgtttactctcagagtatctatctgatgtagacagttggtgatgcttctgagactcagaatggtttactctaacaaaacactgtgctgtctatcccttgtacttgcctactgtaatatggatttcacttctgaacagtttacagcacaatatttattttaaagtgaataaaatgtccacaagcaangttgtcatgta

SEQ ID NO: 433963 - DNA, 1550 bp, Homo sapiens
atgttgatatgtcgtctgccccggaaacggtgacaggaggctcaagggggcggaggcggcgttgccgggctctccggaaggagacgtggcggcggttgggccggtgatacccgggcgctttatagtcccgccgcctcctcctccacctcctcctcctcctcctctcctcctggagcagaggaggttgtggcggtggctggagaaagcggcggcggaggatggaggaaggaggcggcggcgtacggagtctggtcccgggcgggccggtgttactggtcctctgcggcctcctggaggcgtccggcggcggccgagcccttcctcaactcagcgatgacatccctttccgagtcaactggcccggcaccgagttctctctgcccacaactggagttttatataaagaagataattatgtcatcatgacaactgcacataaagaaaaatataaatgcatacttccccttgtgacaagtggggatgaggaagaagaaaaggattataaaggccctaatccaagagagcttttggagccactatttaaacaaagcagttgttcctacagaattgagtcttattggacttacgaagtatgtcatggaaaacacattcggcagtaccatgaagagaaagaaactggtcagaaaataaatattcacgagtactaccttgggaatatgttggccaagaaccttctatttgaaaaagaacgagaagcagaagaaaaggaaaaatcaaatgagattcccactaaaaatatcgaaggtcagatgacaccatactatcctgtgggaatgggaaatggtacaccttgtagtttgaaacagaaccggcccagatcaagtactgtgatgtacatatgtcatcctgaatctaagcatgaaattctttcagtagctgaagttacaacttgtgaatatgaagttgtcattttgacaccactcttgtgcagtcatcctaaatataggttcagagcatctcctgtgaatgacatattttgtcaatcactgccaggatctccatttaagcccctcaccctgaggcagctggagcagcaggaagaaatactaagggtgccttttaggagaaataaagaggaagatttgcaatcaactaaagaagagagatttccagcgatccacaagtcgattgctattggctctcagccagtgctcactgttgggacaacccacatatccaaattgacagatgaccaactcataaaagagtttcttagtggttcttactgctttcgtgggggtgtcggttggtggaaatatgaattctgctatggcaaacatgtacatcaataccatgaggacaaggatagtgggaaaacctctgtggttgtcgggacatggaaccaagaagagcatattgaatgggctaagaagaatactgctagagcttatcatcttcaagacgatggtacccagacagtcaggatggtgtcacatttttatggaaatggagatatttgtgatataactgacaaaccaagacaggtgactgtaaaactaaagtaagttagaccatcaaatcatgctgta

SEQ ID NO: 433964 - DNA, 1402 bp, Homo sapiens
atgttgatatgtcgtctgccccggaaacggtgacaggaggctcaagggggcggaggcggcgttgccgggctctccggaaggagacgtggcggcggttgggccggtgatacccgggcgctttatagtcccgccgcctcctcctccacctcctcctcctcctcctctcctcctggagcagaggaggttgtggcggtggctggagaaagcggcggcggaggatggaggaaggaggcggcggcgtacggagtctggtcccgggcgggccggtgttactggtcctctgcggcctcctggaggcgtccggcggcggccgagcccttcctcaactcagcgatgacatccctttccgagtcaactggcccggcaccgagttctctctgcccacaactggagttttatataaagaagataattatgtcatcatgacaactgcacataaagaaaaatataaatgcatacttccccttgtgacaagtggggatgaggaagaagaaaaggattataaaggccctaatccaagagagcttttggagccactatttaaacaaagcagttgttcctacagaattgagtcttattggacttacgaagtatgtcatggaaaacacattcggcagtaccatgaagagaaagaaactggtcagaaaataaatattcacgagtactaccttgggaatatgttggccaagaaccttctatttgaaaaagaacgagaagcagaagaaaaggaaaaatcaaatgagattcccactaaaaatatcgaaggtcagatgacaccatactatcctgtgggaatgggaaatggtacaccttgtagtttgaaacagaaccggcccagatcaagtactgtgatgtacatatgtcatcctgaatctaagcatgaaattctttcagtagctgaagttacaacttgtgaatatgaagttgtcattttgacaccactcttgtgcagtcatcctaaatataggttcagagcatctcctgtgaatgacatattttgtcaatcactgccaggatctccatttaagcccctcaccctgaggcagctggagcagcaggaagaaatactaagggtgccttttaggagaaataaagaggaagatttgcaatcaactaaagaagagagatttccagcgatccacaagtcgattgctattggctctcagccagtgctcactgttgggacaacccacatatccaaattgacagatgaccaactcataaaagagtttcttagtggttcttactgctttcgtgggggtgtcggttggtggaaatatgaattctgctatggcaaacatgtacatcaataccatgaggtatagaatagcatttatatatcattctaccactagatggtttaaagctttaagaatctgttgtagatttttagggggaatgg

SEQ ID NO: 433965 - DNA, 267 bp, Homo sapiens
gatccacaagtcgattgctattggctctcagccagtgctcactgttgggacaacccacatatccaaattgacagatgaccaactcataaaagagtttcttagtggttcttactgctttcgtggggtgagaagtaaatcttcagtttaaatatttattttacaactttacctgccaggtatggtcagtgggcatcagcagcactgaaaagaatttttctctagagaaatgacaggatcctttcatccccaaagaacattttctttttg

SEQ ID NO: 433966 - DNA, 4005 bp, Homo sapiens
acaggctctttcttctggggccgggaaaaccgaggaatacacatgcgcagttggacccctcaggcccttcgtgtcccttcccacccatctccccgccccggccctctgggcggggctgggccgacagtccagctgcagctcgctggagattcagtgacttccttgttgtgagccccggcccggcagtgtcccgactcgtagccccgctgttcttaatccgggccgctagcctgagtctaggtcgcagccgcagccccaccccgtcggtcaccttttcagcgcaggtcctttccccgcacgccctgcgctccctaacatgcccaaccccagcagcacctcctctccctaccccctccctgaggaaattaggaacctgttggcagatgttgaaacatttgtagcagatatactgaaaggagaaaatttatccaagaaagcaaaggaaaagagagaatcccttattaagaagataaaagatgtaaagtctatctatcttcaggaatttcaagacaaaggtgatgcagaagatggggaagaatatgatgacccttttgctgggcctccagacactatttcattagcctcagaacgatatgataaagacgatgaagccccctctgatggagcccagtttcctccaattgcagcacaagaccttccttttgttctaaaggctggctaccttgaaaaacgcagaaaagatcacagctttctgggatttgaatggcagaaacggtggtgtgctctcagtaaaacggtattctattattatggaagtgataaagacaaacaacagaaaggtgaatttgcaatagatggctacagtgtcagaatgaataacactctaagaaaggatggaaagaaagattgctgttttgaaatctctgctcctgataaacgtatatatcagtttacagcagcttctcccaaagatgctgaagaatgggtacagcagctgaaatttgtattgcaagatatggaatctgatattattcctgaggattatgatgagagaggagaattatatgatgatgttgatcatcctctaccaataagcaatccactaacaagcagtcaaccaatagatgatgaaatttatgaagaacttccagaagaagaagaggacagtgctccagtgaaagtggaagaacaaaggaagatgagtcaggatagtgtccatcacacctcaggggataagagcactgattatgctaatttttaccagggattgtgggattgtactggagctttttctgatgagttgtcatttaagcgtggtgatgtgatttacattcttagcaaggaatacaatagatatggctggtgggtaggagaaatgaagggagccattggcttggtgcctaaagcctacataatggagatgtatgatatttgagagtcctggaaaaggaaaattcttctgcttgtctgcaaatgctttggatttagaagcgtcatgaaagcacgagtgacagctcctaacctctccttgttttattaaacattacttatctttgactgttattttatgcagtcgctcattaaaatattcctctgatgtgaaattaaatgaaggatattaatgtaaattagatgcaaccagttaagttatacctgttgctattttgcaaagaaataattatagtttttatttacccatttgatttgtgtgaagaattcatcactattttatacgtaacatatagtctactatagcatagtatgctactattgctacttctggtgtgatttgtaatgtttcttaatcattggacatcaattatttttagagagtaatgtataatttcatagcattttaaatttagtgtatcatgcgagttttttttggtagatgctgaagaatgtggttgctaaacaaagaatgctaaagaatgttcaaactttatagataactttattgttattatttattttcacacatttaattcctattaagtacagccgcaagaaagaaaaaatgatgaagttgcaaatggcagtgtgctgtcacctgcaacagaagtgcgtaccagaagtatgactcatgcaaagcattttaccgtacaaatatcctggtgcgatgatgggcctggcaacattttctactgtacttttgtttaaatttaatgaaacaaaaaattcctaagaaataccaccctaccactaacaaaatggtataaagaatctcccagccaggccaacatggtgaaaccctgtctctactaaaaattagccaagtgtggtaatgttcacctgcagtcccagctacttgggaggccaaggcacgagaattgcttgaacaaggtaggcagaggttgcagtgagccaagatcgcgccactgcactccagcctgggcgacagagtgagactccatctcagaaaaaaaaaaaaaaaaaacagaatctcagtgtattctcaaagtaaaaaggcataaccaagcactctcttatcttgccttattgctatactatttacatcccactgcagaacagcagatttgaggcttttctatatacttctcagagcactgaaaagaaaggaagggtttgcagaggagagtgtagaaatcccagtggtagcatgtaccaacaggtgagtagaaaggtagtgttagcctgacatttgagttatactctgtgctgcctgagcaagatttgtagaatcatataattaccttttcatgtatatttgaaatcagaggtgtttaaaatacctatgagataccaatgtagccttaacatatgtcaaaatgcattgctggttagataattatttggactacacataaactcctaatattgaatcattacctatcaggtattatctttatggaacttttcaatatctttgctttataaagattctaaacatgtatctgagctggtaatattttaaaatctccattatttgtgtaaaactgtttataagcagtgtttgagagggtctgctttaccattaccccctcaatatcatgatcatccaatctcaaatgtgaaaaaaaaaaagaaatttgattttaggtattgtgagtaaacaagtttatatagagagacattgtgaagttaaagttttcagaagttacatttgtgcagttcttaccttttcctcatatagtgccattgaaatagactgaaattatcttggcaaaagttagacaaccaaagacgactttagtggactggttttcaaaacttgagcagctgaaaagcaaaagccgttgtttcccatgacaatgtagcctttgtggatttgggtttgtgctttgggttgaaaagaagtttttagtcctaggccagtagatggcagcagcttttcattgcagacaaaacctcttgaaacccttcccccatggcacaaactcgcccatgatggaaagcatctagatttctgcctccttttacagttaatccaggagagggagtcctttgccaactgatgaccaacagttccaagccagatagtctcgtgaacagtgacaatacagaaataaggtgttatttctgttcagatctccaccggcctttgttcttttaaaacttgaatataggtgggagacataagaaaggaaagaaaagacttaaaactggagtgacaggacaaataatcattactttcaattcatgactgctttatattcatttgatgaaatcatttgtatacaaaccagggagagttttctttacacccttgacaatatatcacatactcttcaagatcataataatatcattaatataaatttaaacaacatggcttgttagaaaatatgctaattgctatggtctcattatgtttgcttagcttttatttgtttttctgtgaacagttagagagctaatttttttcaaaggtgattgtaagtcatattttatatagcattttgcttgattatttgctctgtactgaatttgtactctattgccattagatcttacaataatgttccactctgcaaatttttaaggttcaaataaagtttaattgtttgcaaactgtaaaaaaaa

SEQ ID NO: 433967 - DNA, 3843 bp, Homo sapiens
acaggctctttcttctggggccgggaaaaccgaggaatacacatgcgcagttggacccctcaggcccttcgtgtcccttcccacccatctccccgccccggccctctgggcggggctgggccgacagtccagctgcagctcgctggagattcagtgacttccttgttgtgagccccggcccggcagtgtcccgactcgtagccccgctgttcttaatccgggccgctagcctgagtctaggtcgcagccgcagccccaccccgtcggtcaccttttcagcgcaggtcctttccccgcacgccctgcgctccctaacatgcccaaccccagcagcacctcctctccctaccccctccctgaggaaattaggaacctgttggcagatgttgaaacatttgtagcagatatactgaaaggagaaaatttatccaagaaagcaaaggaaaagagagaatcccttattaagaagataaaagatgtaaagtctatctatcttcaggaatttcaagacaaaggtgatgcagaagatggggaagaatatgatgacccttttgctgggcctccagacactatttcattagcctcagaacgatatgataaagacgatgaagccccctctgatgacaaacaacagaaaggtgaatttgcaatagatggctacagtgtcagaatgaataacactctaagaaaggatggaaagaaagattgctgttttgaaatctctgctcctgataaacgtatatatcagtttacagcagcttctcccaaagatgctgaagaatgggtacagcagctgaaatttgtattgcaagatatggaatctgatattattcctgaggattatgatgagagaggagaattatatgatgatgttgatcatcctctaccaataagcaatccactaacaagcagtcaaccaatagatgatgaaatttatgaagaacttccagaagaagaagaggacagtgctccagtgaaagtggaagaacaaaggaagatgagtcaggatagtgtccatcacacctcaggggataagagcactgattatgctaatttttaccagggattgtgggattgtactggagctttttctgatgagttgtcatttaagcgtggtgatgtgatttacattcttagcaaggaatacaatagatatggctggtgggtaggagaaatgaagggagccattggcttggtgcctaaagcctacataatggagatgtatgatatttgagagtcctggaaaaggaaaattcttctgcttgtctgcaaatgctttggatttagaagcgtcatgaaagcacgagtgacagctcctaacctctccttgttttattaaacattacttatctttgactgttattttatgcagtcgctcattaaaatattcctctgatgtgaaattaaatgaaggatattaatgtaaattagatgcaaccagttaagttatacctgttgctattttgcaaagaaataattatagtttttatttacccatttgatttgtgtgaagaattcatcactattttatacgtaacatatagtctactatagcatagtatgctactattgctacttctggtgtgatttgtaatgtttcttaatcattggacatcaattatttttagagagtaatgtataatttcatagcattttaaatttagtgtatcatgcgagttttttttggtagatgctgaagaatgtggttgctaaacaaagaatgctaaagaatgttcaaactttatagataactttattgttattatttattttcacacatttaattcctattaagtacagccgcaagaaagaaaaaatgatgaagttgcaaatggcagtgtgctgtcacctgcaacagaagtgcgtaccagaagtatgactcatgcaaagcattttaccgtacaaatatcctggtgcgatgatgggcctggcaacattttctactgtacttttgtttaaatttaatgaaacaaaaaattcctaagaaataccaccctaccactaacaaaatggtataaagaatctcccagccaggccaacatggtgaaaccctgtctctactaaaaattagccaagtgtggtaatgttcacctgcagtcccagctacttgggaggccaaggcacgagaattgcttgaacaaggtaggcagaggttgcagtgagccaagatcgcgccactgcactccagcctgggcgacagagtgagactccatctcagaaaaaaaaaaaaaaaaaacagaatctcagtgtattctcaaagtaaaaaggcataaccaagcactctcttatcttgccttattgctatactatttacatcccactgcagaacagcagatttgaggcttttctatatacttctcagagcactgaaaagaaaggaagggtttgcagaggagagtgtagaaatcccagtggtagcatgtaccaacaggtgagtagaaaggtagtgttagcctgacatttgagttatactctgtgctgcctgagcaagatttgtagaatcatataattaccttttcatgtatatttgaaatcagaggtgtttaaaatacctatgagataccaatgtagccttaacatatgtcaaaatgcattgctggttagataattatttggactacacataaactcctaatattgaatcattacctatcaggtattatctttatggaacttttcaatatctttgctttataaagattctaaacatgtatctgagctggtaatattttaaaatctccattatttgtgtaaaactgtttataagcagtgtttgagagggtctgctttaccattaccccctcaatatcatgatcatccaatctcaaatgtgaaaaaaaaaaagaaatttgattttaggtattgtgagtaaacaagtttatatagagagacattgtgaagttaaagttttcagaagttacatttgtgcagttcttaccttttcctcatatagtgccattgaaatagactgaaattatcttggcaaaagttagacaaccaaagacgactttagtggactggttttcaaaacttgagcagctgaaaagcaaaagccgttgtttcccatgacaatgtagcctttgtggatttgggtttgtgctttgggttgaaaagaagtttttagtcctaggccagtagatggcagcagcttttcattgcagacaaaacctcttgaaacccttcccccatggcacaaactcgcccatgatggaaagcatctagatttctgcctccttttacagttaatccaggagagggagtcctttgccaactgatgaccaacagttccaagccagatagtctcgtgaacagtgacaatacagaaataaggtgttatttctgttcagatctccaccggcctttgttcttttaaaacttgaatataggtgggagacataagaaaggaaagaaaagacttaaaactggagtgacaggacaaataatcattactttcaattcatgactgctttatattcatttgatgaaatcatttgtatacaaaccagggagagttttctttacacccttgacaatatatcacatactcttcaagatcataataatatcattaatataaatttaaacaacatggcttgttagaaaatatgctaattgctatggtctcattatgtttgcttagcttttatttgtttttctgtgaacagttagagagctaatttttttcaaaggtgattgtaagtcatattttatatagcattttgcttgattatttgctctgtactgaatttgtactctattgccattagatcttacaataatgttccactctgcaaatttttaaggttcaaataaagtttaattgtttgcaaactgtaaaaaaaa

SEQ ID NO: 433968 - DNA, 4074 bp, Homo sapiens
ctgcccactgtttgaaaaagtgcctatggattttatcctataatctctctattgatagactacatatcaatacatacacgctaatgtaatgctacatttgtattaaagaattgcataattttcctttctgatggtcaatagcatactaatcaatacaaatattaagtctgtactagtattaacattccctccccacatataactcaatatacatatgcacatttatctatgactcagatgctggaaaatcataacctattaaattacttttgggattgattttgaaaatttatcttatatgaaaaattaaatttgagcactacaatgcttgtgaagagtattgcttttggaagatattattcttgaaacttgaaattcattttactttgtttgtatctcactacacataaataaatttgagataaaaatacattagtcaatctggcagacatatgagaccggttatggagtattcacaatgcctaaagcagtggtgtatctgtcaaaggaggaaaaagtgggagaaaaggaggtataggtttgtttatctcaagttgcaaagtaaatgcaaaagtgactcatcgaccactctgttttagaggtagattaatattttgcgtttataccttgagatacttttatttcctattgatcttccactataagggtgactctaacagcacctttaaattccttctacctattctttatctaaggtagtttatggtcaataataaaggaataataaatgccttagggaaactattttaaaggaacctatttgtgaattattttttaagcagttttttggtattattagtgtttccgtattctctaatttatctgttaaagtgtgtatattagattttcttaagaaggggcacacatctatcaacattctaaatcattttaggtcatataagtttaagaaataagtagtttattgtaaaaaaaattattttatccttgctagatgataagcttcttgaaggcaaatataatagcttaaggatcctggctttaaccttctatagcctcttacacatgaaaggtatccccaggctctgtggagagagagagtgtccccgagagaaggcttcctgaggtagtttcattttctaggttttcatcatgagtgattgtttctgtgttctgtgcccaataataaacaggctttgtgttataccttaatttaaatcgttgcctaacagcattttaaagtgtccagaaacaaaaagatgaaaatgtttacatttgcagctcaagctcttttaactttataaatagaaataacatttctaagaagttgcatacaaacgacattgtacttacaccagtctaaaggttaatattgcatattgttttcaattaggaatacaatagatatggctggtgggtaggagaaatgaagggagccattggcttggtgcctaaagcctacataatggagatgtatgatatttgagagtcctggaaaaggaaaattcttctgcttgtctgcaaatgctttggatttagaagcgtcatgaaagcacgagtgacagctcctaacctctccttgttttattaaacattacttatctttgactgttattttatgcagtcgctcattaaaatattcctctgatgtgaaattaaatgaaggatattaatgtaaattagatgcaaccagttaagttatacctgttgctattttgcaaagaaataattatagtttttatttacccatttgatttgtgtgaagaattcatcactattttatacgtaacatatagtctactatagcatagtatgctactattgctacttctggtgtgatttgtaatgtttcttaatcattggacatcaattatttttagagagtaatgtataatttcatagcattttaaatttagtgtatcatgcgagttttttttggtagatgctgaagaatgtggttgctaaacaaagaatgctaaagaatgttcaaactttatagataactttattgttattatttattttcacacatttaattcctattaagtacagccgcaagaaagaaaaaatgatgaagttgcaaatggcagtgtgctgtcacctgcaacagaagtgcgtaccagaagtatgactcatgcaaagcattttaccgtacaaatatcctggtgcgatgatgggcctggcaacattttctactgtacttttgtttaaatttaatgaaacaaaaaattcctaagaaataccaccctaccactaacaaaatggtataaagaatctcccagccaggccaacatggtgaaaccctgtctctactaaaaattagccaagtgtggtaatgttcacctgcagtcccagctacttgggaggccaaggcacgagaattgcttgaacaaggtaggcagaggttgcagtgagccaagatcgcgccactgcactccagcctgggcgacagagtgagactccatctcagaaaaaaaaaaaaaaaaaacagaatctcagtgtattctcaaagtaaaaaggcataaccaagcactctcttatcttgccttattgctatactatttacatcccactgcagaacagcagatttgaggcttttctatatacttctcagagcactgaaaagaaaggaagggtttgcagaggagagtgtagaaatcccagtggtagcatgtaccaacaggtgagtagaaaggtagtgttagcctgacatttgagttatactctgtgctgcctgagcaagatttgtagaatcatataattaccttttcatgtatatttgaaatcagaggtgtttaaaatacctatgagataccaatgtagccttaacatatgtcaaaatgcattgctggttagataattatttggactacacataaactcctaatattgaatcattacctatcaggtattatctttatggaacttttcaatatctttgctttataaagattctaaacatgtatctgagctggtaatattttaaaatctccattatttgtgtaaaactgtttataagcagtgtttgagagggtctgctttaccattaccccctcaatatcatgatcatccaatctcaaatgtgaaaaaaaaaaagaaatttgattttaggtattgtgagtaaacaagtttatatagagagacattgtgaagttaaagttttcagaagttacatttgtgcagttcttaccttttcctcatatagtgccattgaaatagactgaaattatcttggcaaaagttagacaaccaaagacgactttagtggactggttttcaaaacttgagcagctgaaaagcaaaagccgttgtttcccatgacaatgtagcctttgtggatttgggtttgtgctttgggttgaaaagaagtttttagtcctaggccagtagatggcagcagcttttcattgcagacaaaacctcttgaaacccttcccccatggcacaaactcgcccatgatggaaagcatctagatttctgcctccttttacagttaatccaggagagggagtcctttgccaactgatgaccaacagttccaagccagatagtctcgtgaacagtgacaatacagaaataaggtgttatttctgttcagatctccaccggcctttgttcttttaaaacttgaatataggtgggagacataagaaaggaaagaaaagacttaaaactggagtgacaggacaaataatcattactttcaattcatgactgctttatattcatttgatgaaatcatttgtatacaaaccagggagagttttctttacacccttgacaatatatcacatactcttcaagatcataataatatcattaatataaatttaaacaacatggcttgttagaaaatatgctaattgctatggtctcattatgtttgcttagcttttatttgtttttctgtgaacagttagagagctaatttttttcaaaggtgattgtaagtcatattttatatagcattttgcttgattatttgctctgtactgaatttgtactctattgccattagatcttacaataatgttccactctgcaaatttttaaggttcaaataaagtttaattgtttgcaaactgtaaaaaaaa

SEQ ID NO: 433969 - DNA, 2876 bp, Homo sapiens
acaggctctttcttctggggccgggaaaaccgaggaatacacatgcgcagttggacccctcaggcccttcgtgtcccttcccacccatctccccgccccggccctctgggcggggctgggccgacagtccagctgcagctcgctggagattcagtgacttccttgttgtgagccccggcccggcagtgtcccgactcgtagccccgctgttcttaatccgggccgctagcctgagtctaggtcgcagccgcagccccaccccgtcggtcaccttttcagcgcaggtcctttccccgcacgccctgcgctccctaacatgcccaaccccagcagcacctcctctccctaccccctccctgaggaaattaggaacctgttggcagatgttgaaacatttgtagcagatatactgaaaggagaaaatttatccaagaaagcaaaggaaaagagagaatcccttattaagaagataaaagatgtaaagtctatctatcttcaggaatttcaagacaaaggtgatgcagaagatggggaagaatatgatgacccttttgctgggcctccagacactatttcattagcctcagaacgatatgataaagacgatgaagccccctctgatggagcccagtttcctccaattgcagcacaagaccttccttttgttctaaaggctggctaccttgaaaaacgcagaaaagatcacagctttctgggatttgaatggcagaaacggtggtgtgctctcagtaaaacggtattctattattatggaagtgataaagacaaacaacagaaaggtgaatttgcaatagatggctacagtgtcagaatgaataacactctaagaaaggatggaaagaaagattgctgttttgaaatctctgctcctgataaacgtatatatcagtttacagcagcttctcccaaagatgctgaagaatgggtacagcagctgaaatttgtattgcaagatatggaatctgatattattcctgaggattatgatgagagaggagaattatatgatgatgttgatcatcctctaccaataagcaatccactaacaagcagtcaaccaatagatgatgaaatttatgaagaacttccagaagaagaagaggacagtgctccagtgaaagtggaagaacaaaggaagatgagtcaggatagtgtccatcacacctcaggggataagagcactgattatgctaatttttaccagggattgtgggattgtactggagctttttctgatgagttgtcatttaagcgtggtgatgtgatttacattcttagcaaggaatacaatagatatggctggtgggtaggagaaatgaagggagccattggcttggtgcctaaagcctacataatggagatgtatgatatttgagagtcctggaaaaggaaaattcttctgcttgtctgcaaatgctttggatttagaagcgtcatgaaagcacgagtgacagctcctaacctctccttgttttattaaacattacttatctttgactgttattttatgcagtcgctcattaaaatattcctctgatgtgaaattaaatgaaggatattaatgtaaattagatgcaaccagttaagttatacctgttgctattttgcaaagaaataattatagtttttatttacccatttgatttgtgtgaagaattcatcactattttatacgtaacatatagtctactatagcatagtatgctactattgctacttctggtgtgatttgtaatgtttcttaatcattggacatcaattatttttagagagtaatgtataatttcatagcattttaaatttagtgtatcatgcgagttttttttggtagatgctgaagaatgtggttgctaaacaaagaatgctaaagaatgttcaaactttatagataactttattgttattatttattttcacacatttaattcctattaagtacagccgcaagaaagaaaaaatgatgaagttgcaaatggcagtgtgctgtcacctgcaacagaagtgcgtaccagaagtatgactcatgcaaagcattttaccgtacaaatatcctggtgcgatgatgggcctggcaacattttctactgtacttttgtttaaatttaatgaaacaaaaaattcctaagaaataccaccctaccactaacaaaatggtataaagaatctcccagccaggccaacatggtgaaaccctgtctctactaaaaattagccaagtgtggtaatgttcacctgcagtcccagctacttgggaggccaaggcacgagaattgcttgaacaaggtaggctggagtgcagtggcatgatctctgctcactacatctgcctcccgggttcaagtgattcttgtgtctcagcctcctaagtagctgggatcgcatgtgtgtgccaccatgtgtagcgtaattttcagtattgtgagtagagataggatttggctaagctggcaggttggtttcaaactcctggtctcaagtgatccgccactttgggctccaaagtgctggattacaggcgtgagccacaaactggcttaaaattatcttagaacagggaatggccacaaatccaagaaggcaaggttcatgggactaaggagcagggtatactgttggctttcctggggtattacaagaatggaggagaattccactgtaaagaatacgggggtaaccttacatatatagtgatggttcgaaggttattgctaagaggatatatatacgagggattttagaaacattgggacatagcgggagcaaaaaacgggggtaaacaagaaacagctaataaggaaagggtgaagaaaatagaaagaaaagatatcaagatatttgtgtgcgtgtttcgcttg

SEQ ID NO: 433970 - DNA, 1470 bp, Homo sapiens
ggaaggtcaatgtgtgagggtgcatagtggagactcggggaccaggctcgacaaagatgaattgttttaggtagtgttagcctgacatttgagttatactctgtgctgcctgagcaagatttgtagaatcatataattaccttttcatgtatatttgaaatcagaggtgtttaaaatacctatgagataccaatgtagccttaacatatgtcaaaatgcattgctggttagataattatttggactacacataaactcctaatattgaatcattacctatcaggtattatctttatggaacttttcaatatctttgctttataaagattctaaacatgtatctgagctggtaatattttaaaatctccattatttgtgtaaaactgtttataagcagtgtttgagagggtctgctttaccattaccccctcaatatcatgatcatccaatctcaaatgtgaaaaaaaaaaagaaatttgattttaggtattgtgagtaaacaagtttatatagagagacattgtgaagttaaagttttcagaagttacatttgtgcagttcttaccttttcctcatatagtgccattgaaatagactgaaattatcttggcaaaagttagacaaccaaagacgactttagtggactggttttcaaaacttgagcagctgaaaagcaaaagccgttgtttcccatgacaatgtagcctttgtggatttgggtttgtgctttgggttgaaaagaagtttttagtcctaggccagtagatggcagcagcttttcattgcagacaaaacctcttgaaacccttcccccatggcacaaactcgcccatgatggaaagcatctagatttctgcctccttttacagttaatccaggagagggagtcctttgccaactgatgaccaacagttccaagccagatagtctcgtgaacagtgacaatacagaaataaggtgttatttctgttcagatctccaccggcctttgttcttttaaaacttgaatataggtgggagacataagaaaggaaagaaaagacttaaaactggagtgacaggacaaataatcattactttcaattcatgactgctttatattcatttgatgaaatcatttgtatacaaaccagggagagttttctttacacccttgacaatatatcacatactcttcaagatcataataatatcattaatataaatttaaacaacatggcttgttagaaaatatgctaattgctatggtctcattatgtttgcttagcttttatttgtttttctgtgaacagttagagagctaatttttttcaaaggtgattgtaagtcatattttatatagcattttgcttgattatttgctctgtactgaatttgtactctattgccattagatcttacaataatgttccactctgcaaatttttaaggttcaaataaagtttaattgtttgcaaactgtaaaaaaaa

SEQ ID NO: 433971 - DNA, 886 bp, Homo sapiens
ctggcggaccccactactggctccactactggcttggaactgttggtcatcagttggcaaaggactccctctcctggattagctgaaaagcaaaagccgttgtttcccatgacaatgtagcctttgtggatttgggtttgtgctttgggttgaaaagaagtttttagtcctaggccagtagatggcagcagcttttcattgcagacaaaacctcttgaaacccttcccccatggcacaaactcgcccatgatggaaagcatctagatttctgcctccttttacagttaatccaggagagggagtcctttgccaactgatgaccaacagttccaagccagatagtctcgtgaacagtgacaatacagaaataaggtgttatttctgttcagatctccaccggcctttgttcttttaaaacttgaatataggtgggagacataagaaaggaaagaaaagacttaaaactggagtgacaggacaaataatcattactttcaattcatgactgctttatattcatttgatgaaatcatttgtatacaaaccagggagagttttctttacacccttgacaatatatcacatactcttcaagatcataataatatcattaatataaatttaaacaacatggcttgttagaaaatatgctaattgctatggtctcattatgtttgcttagcttttatttgtttttctgtgaacagttagagagctaatttttttcaaaggtgattgtaagtcatattttatatagcattttgcttgattatttgctctgtactgaatttgtactctattgccattagatcttacaataatgttccactctgcaaatttttaaggttcaaataaagtttaattgtttgcaaactgtaaaaaaaa

SEQ ID NO: 433972 - DNA, 448 bp, Homo sapiens
atcatccctaatacttccatgtttcagaattaaaaatgatttctaaaaacattacctaagcattatattactaaagcaatatgaccaaaaaatgttatttccaagaattgatgaagaaattttacataaaagataattgagcattaatacttagtaaatgaaattctaactggttttatcttcaacagacaaacaacagaaaggtgaatttgcaatagatggctacagtgtcagaatgaataacactctaagaaaggatggaaagaaagattgctgttttgaaatctctgctcctgataaacgtatatatcaggttgtagtttttatgttgccttgaaattaagttgataaaatgttttgatttcatttatagagacattaacatttgattaatactttccttgacatgttaacaataataaaaatactgatgtttaaatatattatg

SEQ ID NO: 433973 - DNA, 2317 bp, Homo sapiens
cgcatgcgcagaagcactccgggcgtgctgccggcggcggtaggtggcgcgcgggtccggcgggcggttggcttgagcgggaccggagctgaggcaggaagagccggcgccatggtggagaaggaggaggctggcggcggcattagcgaggaggaggcggcacagtatgaccggcagatccgcctgtggggactggaggcccagaaacggctgcgggcctctcgggtgcttcttgtcggcttgaaaggacttggggctgaaattgccaagaatctcatcttggcaggagtgaaaggactgaccatgctggatcacgaacaggtaactccagaagatcccggagctcagttcttgattcgtactgggtctgttggccgaaatagggctgaagcctctttggagcgagctcagaatctcaaccccatggtggatgtgaaggtggacactgaggatatagagaagaaaccagagtcatttttcactcaattcgatgctgtgtgtctgacttgctgctccagggatgtcatagttaaagttgaccagatctgtcacaaaaatagcatcaagttctttacaggagatgtttttggctaccatggatacacatttgccaatctaggagagcatgagtttgtagaggagaaaactaaagttgccaaagttagccaaggagtagaagatgggcccgacaccaagagagcaaaacttgattcttctgagacaacgatggtcaaaaagaaggtggtcttctgccctgttaaagaagccctggaggtggactggagcagtgagaaagcaaaggctgctctgaagcgcacgacctccgactactttctccttcaaggccctgtctcagcgggaccctcctcacaacaacttcttcttcttcgatggcatgaaggggaatgggattgtggagtgccttggccccaagtgaactcaagatttggcagccccagagatgccaactgcagcatgcccacctgtattccctgtccccttccttcatgaaggcatctccaggcaaggaaaactgaagtcattggcccgatacaaaacatttcctgcaacgaaggaggtggtgccgacgtgctgcttcccatcaccagcagctgctcgacaaggggcgcagggtggctgtctttgttccagcactgttcaggctgcctgtcatcccgggcctgccagctcccctgagtgatgagcacttccaagcacccctctgccctttctctgtccttatgctgtcccggcctcgccagccctctggggcattgtgggagatgcctgccaggaatgagcaagctctgttgctcgggagcctcttgtcaccttcttggacttattccccacctgataccttatagagaaaagtgtgaattcaggtggagagtaggcccaggccccatgaggcaccagtggaagcacagctccaagttcagacaggtgcccttagagaggaaaaccatgacaggcaaatgcatttcctctggagtttgagaccctgacaaacaacaggtggcatctggtgtgctgttcttgagttttcgtttaggattagttgagttccagctgggttttgggagaaaggagatgctaccaagtcttggatgttagggcgagaccctgcaagttgagtattagagagcttgtctttcaaggcaggttcctggggcttcagggctaggagggaggagcctgcccttttaacagaaccccagtcacatgcggctcaagtcactcagaggctgttgcatttcagggctatgttggtcctttgtttacctcctaaaccacagctgtttgtgtttcacatatgttgtgaattttccttggttctttttaaaggaatgataataaagttacttgctttaggatttgcttgtttttcttccacttcagaagcttctgagagggaatgggatgatcctaccagttgccttttcagacctgaggctctaactcaagagattcctcctctccctcaccattcctgccaccattttttctgggtgatgcagcaagagttaaattgttcacattctagaatgtgtagaagcttctggctccagttgtctaatggataattcagctaaatagtggctattttcagtggcaagaattataataataaagggaagtcaaaagtgatgcttcatatgccccaagtgccacagccgctacgggtcagagcttttattggaagaccaggtttgccttgatgcagccaaagtgcgttccagttcaccccactcttgcttgtgtttcttctttatgtaaattgtgtgatgtttcaataaatcagtctctttcctat

SEQ ID NO: 433974 - DNA, 953 bp, Homo sapiens
  misc_feature (27)..(27): n is a, c, g, or t
  misc_feature (34)..(34): n is a, c, g, or t
  misc_feature (37)..(38): n is a, c, g, or t
  misc_feature (831)..(831): n is a, c, g, or t
  misc_feature (838)..(838): n is a, c, g, or t
  misc_feature (840)..(840): n is a, c, g, or t
  misc_feature (845)..(845): n is a, c, g, or t
  misc_feature (849)..(849): n is a, c, g, or t
tacatgctattacctggtagatcgccntgttgtnaanntttttccgaaagctgcgggcctctcgggtgcttcttgtcggcttgaaaggacttggggctgaaattgccaagaatctcatcttggcaggagtgaaaggactgaccatgctggatcacgaacaggtaactccagaagatcccggagctcagttcttgattcgtactgggtctgttggccgaaatagggctgaagcctctttggagcgagctcagaatctcaaccccatggtggatgtgaaggtggacactgaggatatagagaagaaaccagagtcatttttcactcaattcgatgctgtgtgtctgacttgctgctccagggatgtcatagttaaagttgaccagatctgtcacaaaaatagcatcaagttctttacaggagatgtttttggctaccatggatacacatttgccaatctaggagagcatgagtttgtagaggagaaaactaaagttgccaaagttagccaaggagtagaagatgggcccgacaccaagagagcaaaacttgattcttctgagacaacgatggtcaaaaagaaggtggtcttctgccctgttaaagaagccctggaggtggactggagcagtgagaaagcaaaggctgctctgaagcgcacgacctccgactactttctccttcaagtgctcttaaagttccgtacagataaaggaagagatcccagttctgatacatatgaggaagattctgagttgttgctccagatacgaaatgatgtgcttgactcactgggtattagtcctgacctgcttcctgaggactttgtcaggncggacgntnccggnaggnccaggtgggggggtgaggggattggcagaatggaggccggtcagaaccccacaaaattctttgggatagggaggtaggggagggcccaggaaatggggaagaag

SEQ ID NO: 433975 - DNA, 301 bp, Homo sapiens
ctgctgcctgtcaagaacatggctttcttcctgcccccctccactgctgctaactggagtctgaccttcgagagagcttgtctttcaaggcaggttcctggggcttcagggctaggagggaggagcctgcccttttaacagaaccccagtcacatgcggctcaagtcactcagaggctgttgcatttcagggctatgttggtcctttgtttacctcctaaaccacagctgtttgtgtttcacatatgttgtgaattttccttggttctttttaaaggaatgataataaagttacttgcttt

SEQ ID NO: 433976 - DNA, 2458 bp, Homo sapiens
  misc_feature (3)..(3): n is a, c, g, or t
  misc_feature (6)..(6): n is a, c, g, or t
aantcngctaggtacgaggctggtgttaaccggcgccatggtggagaaggaggaggctggcggcggcattagcgaggaggaggcggcacagtatgaccggcagatccgcctgtggggactggaggcccagaaacggctgcgggcctctcgggtgcttcttgtcggcttgaaaggacttggggctgaaattgccaagaatctcatcttggcaggagtgaaaggactgaccatgctggatcacgaacaggtaactccagaagatcccggagctcagttcttgattcgtactgggtctgttggccgaaatagggctgaagcctctttggagcgagctcagaatctcaaccccatggtggatgtgaaggtggacactgaggatatagagaagaaaccagagtcatttttcactcaattcgatgctgtgtgtctgacttgctgctccagggatgtcatagttaaagttgaccagatctgtcacaaaaatagcatcaagttctttacaggagatgtttttggctaccatggatacacatttgccaatctaggagagcatgagtttgtagaggagaaaactaaagttgccaaagttagccaaggagtagaagatgggcccgacaccaagagagcaaaacttgattcttctgagacaacgatggtcaaaaagaaggtggtcttctgccctgttaaagaagccctggaggtggactggagcagtgagaaagcaaaggctgctctgaagcgcacgacctccgactactttctccttcaagtgctcttaaagttccgtacagataaaggaagagatcccagttctgatacatatgaggaagattctgagttgttgctccagatacgaaatgatgtgcttgactcactgggtattagtcctgacctgcttcctgaggactttgtcaggtactgcttctccgagatggccccagtgtgtgcggtggttggagggattttggcacaggaaattgtgaaggccctgtctcagcgggaccctcctcacaacaacttcttcttcttcgatggcatgaaggggaatgggattgtggagtgccttggccccaagtgaactcaagatttggcagccccagagatgccaactgcagcatgcccacctgtattccctgtccccttccttcatgaaggcatctccaggcaaggaaaactgaagtcattggcccgatacaaaacatttcctgcaacgaaggaggtggtgccgacgtgctgcttcccatcaccagcagctgctcgacaaggggcgcagggtggctgtctttgttccagcactgttcaggctgcctgtcatcccgggcctgccagctcccctgagtgatgagcacttccaagcacccctctgccctttctctgtccttatgctgtcccggcctcgccagccctctggggcattgtgggagatgcctgccaggaatgagcaagctctgttgctcgggagcctcttgtcaccttcttggacttattccccacctgataccttatagagaaaagtgtgaattcaggtggagagtaggcccaggccccatgaggcaccagtggaagcacagctccaagttcagacaggtgcccttagagaggaaaaccatgacaggcaaatgcatttcctctggagtttgagaccctgacaaacaacaggtggcatctggtgtgctgttcttgagttttcgtttaggattagttgagttccagctgggttttgggagaaaggagatgctaccaagtcttggatgttagggcgagaccctgcaagttgagtattagagagcttgtctttcaaggcaggttcctggggcttcagggctaggagggaggagcctgcccttttaacagaaccccagtcacatgcggctcaagtcactcagaggctgttgcatttcagggctatgttggtcctttgtttacctcctaaaccacagctgtttgtgtttcacatatgttgtgaattttccttggttctttttaaaggaatgataataaagttacttgctttaggatttgcttgtttttcttccacttcagaagcttctgagagggaatgggatgatcctaccagttgccttttcagacctgaggctctaactcaagagattcctcctctccctcaccattcctgccaccattttttctgggtgatgcagcaagagttaaattgttcacattctagaatgtgtagaagcttctggctccagttgtctaatggataattcagctaaatagtggctattttcagtggcaagaattataataataaagggaagtcaaaagtgatgcttcatatgccccaagtgccacagccgctacgggtcagagcttttattggaagaccaggtttgccttgatgcagccaaagtgcgttccagttcaccccactcttgcttgtgtttcttctttatgtaaattgtgtgatgtttcaataaatcagtctctttcctat

SEQ ID NO: 433977 - DNA, 2014 bp, Homo sapiens
  misc_feature (3)..(3): n is a, c, g, or t
  misc_feature (6)..(6): n is a, c, g, or t
aantcngctaggtacgaggctggtgttaaccggcgccatggtggagaaggaggaggctggcggcggcattagcgaggaggaggcggcacagtatgaccggcagatccgcctgtggggactggaggcccagaaacggctgcgggcctctcgggtgcttcttgtcggcttgaaaggacttggggctgaaattgccaagaatctcatcttggcaggagtgaaaggactgaccatgctggatcacgaacaggtaactccagaagatcccggagctcagttcttgattcgtactgggtctgttggccgaaatagggctgaagcctctttggagcgagctcagaatctcaaccccatggtggatgtgaaggtggacactgaggatatagagaagaaaccagagtcatttttcactcaattcgatgctgtgtgtctgacttgctgctccagggatgtcatagttaaagttgaccagatctgtcacaaaaatagcatcaagttctttacaggagatgtttttggctaccatggatacacatttgccaatctaggagagcatgagtttgtagaggagaaaactaaagttgccaaagttagccaaggagtagaagatgggcccgacaccaagagagcaaaacttgattcttctgagacaacgatggtcaaaaagaaggtggtcttctgccctgttaaagaagccctggaggtggactggagcagtgagaaagcaaaggctgctctgaagcgcacgacctccgactactttctccttcaagtgctcttaaagttccgtacagataaaggaagagatcccagttctgatacatatgaggaagattctgagttgttgctccagatacgaaatgatgtgcttgactcactgggtattagtcctgacctgcttcctgaggactttgtcaggtactgcttctccgagatggccccagtgtgtgcggtggttggagggattttggcacaggaaattgtgaaggccctgtctcagcgggaccctcctcacaacaacttcttcttcttcgatggcatgaaggggaatgggattgtggagtgccttggccccaagtgaactcaagatttggcagccccagagatgccaactgcagcatgcccacctgtattccctgtccccttccttcatgaaggcatctccaggcaaggaaaactgaagtcattggcccgatacaaaacatttcctgcaacgaaggaggtggtgccgacgtgctgcttcccatcaccagcagctgctcgacaaggggcgcagggtggctgtctttgttccagcactgttcaggctgcctgtcatcccgggcctgccagctcccctgagtgatgagcacttccaagcacccctctgccctttctctgtccttatgctgtcccggcctcgccagccctctggggcattgtgggagatgcctgccaggaatgagcaagctctgttgctcgggagcctcttgtcaccttcttggacttattccccacctgataccttatagagaaaagtgtgaattcaggtggagagtaggcccaggccccatgaggcaccagtggaagcacagctccaagttcagacaggtgcccttagagaggaaaaccatgacaggcaaatgcatttcctctggagtttgagaccctgacaaacaacaggtggcatctggtgtgctgttcttgagttttcgtttaggattagttgagttccagctgggttttgggagaaaggagatgctaccaagtcttggatgttagggcgagaccctgcaagttgagtattagagagcttgtctttcaaggcaggttcctggggcttcagggctaggagggaggagcctgcccttttaacagaaccccagtcacatgcggctcaagtcactcagaggctgttgcatttcagggctatgttggtcctttgtttacctcctaaaccacagctgtttgtgtttcacatatgttgtgaattttccttggttctttttaaaggaatgataataaagttacttgcttt

SEQ ID NO: 433978 - DNA, 2205 bp, Homo sapiens
  misc_feature (3)..(3): n is a, c, g, or t
  misc_feature (6)..(6): n is a, c, g, or t
aantcngctaggtacgaggctggtgttaaccggcgccatggtggagaaggaggaggctggcggcggcattagcgaggaggaggcggcacagtatgaccggcagatccgcctgtggggactggaggcccagaaacggctgcgggcctctcgggtgcttcttgtcggcttgaaaggacttggggctgaaattgccaagaatctcatcttggcaggagtgaaaggactgaccatgctggatcacgaacaggtaactccagaagatcccggagctcagttcttgattcgtactgggtctgttggccgaaatagggctgaagcctctttggagcgagctcagaatctcaaccccatggtggatgtgaaggtggacactgaggatatagagaagaaaccagagtcatttttcactcaattcgatgctgtgtgtctgacttgctgctccagggatgtcatagttaaagttgaccagatctgtcacaaaaatagcatcaagttctttacaggagatgtttttggctaccatggatacacatttgccaatctaggagagcatgagtttgtagaggagaaaactaaagttgccaaagttagccaaggagtagaagatgggcccgacaccaagagagcaaaacttgattcttctgagacaacgatggtcaaaaagaaggtggtcttctgccctgttaaagaagccctggaggtggactggagcagtgagaaagcaaaggctgctctgaagcgcacgacctccgactactttctccttcaagtgctcttaaagttccgtacagataaaggaagagatcccagttctgatacatatgaggaagattctgagttgttgctccagatacgaaatgatgtgcttgactcactgggtattagtcctgacctgcttcctgaggactttgtcaggtactgcttctccgagatggccccagtgtgtgcggtggttggagggattttggcacaggaaattgtgaaggccctgtctcagcgggaccctcctcacaacaacttcttcttcttcgatggcatgaaggggaatgggattgtggagtgccttggccccaagtgaactcaagatttggcagccccagagatgccaactgcagcatgcccacctgtattccctgtccccttccttcatgaaggcatctccaggcaaggaaaactgaagtcattggcccgatacaaaacatttcctgcaacgaaggaggtggtgccgacgtgctgcttcccatcaccagcagctgctcgacaaggggcgcagggtggctgtctttgttccagcactgttcaggctgcctgtcatcccgggcctgccagctcccctgagtgatgagcacttccaagcacccctctgccctttctctgtccttatgctgtcccggcctcgccagccctctggggcattgtgggagatgcctgccaggaatgagcaagctctgttgctcgggagcctcttgtcaccttcttggacttattccccacctgataccttatagagaaaagtgtgaattcaggtggagagtaggcccaggccccatgaggcaccagtggaagcacagctccaagttcagacaggtgcccttagagaggaaaaccatgacaggcaaatgcatttcctctggagtttgagaccctgacaaacaacaggtggcatctggtgtgctgttcttgagttttcgtttaggattagttgagttccagctgggttttgggagaaaggagatgctaccaagtcttggatgttagggcgagaccctgcaagttgagtattagagagcttgtctttcaaggcaggttcctggggcttcagggctaggagggaggagcctgcccttttaacagaaccccagtcacatgcggctcaagtcactcagaggctgttgcatttcagggctatgttggtcctttgtttacctcctaaaccacagctgtttgtgtttcacatatgttgtgaattttccttggttctttttaaaggaatgataataaagttacttgctttaaaaaaaaaaaaaaaaaaaaaaaaaaaaaaaaactcgggggtctttttgggggggggggaacacgggggtttttagaatggggcttggggtcatagtttttccgtggccccgttttttttgtcccagggggggaaatctggggggcccccatataggagggcggaattaatttggaaaacgcgggtacggt

SEQ ID NO: 433979 - DNA, 2525 bp, Homo sapiens
  misc_feature (3)..(3): n is a, c, g, or t
  misc_feature (6)..(6): n is a, c, g, or t
aantcngctaggtacgaggctggtgttaaccggcgccatggtggagaaggaggaggctggcggcggcattagcgaggaggaggcggcacagtatgaccggcagatccgcctgtggggactggaggcccagaaacggctgcgggcctctcgggtgcttcttgtcggcttgaaaggacttggggctgaaattgccaagaatctcatcttggcaggagtgaaaggactgaccatgctggatcacgaacaggtaactccagaagatcccggagctcagttcttgattcgtactgggtctgttggccgaaatagggctgaagcctctttggagcgagctcagaatctcaaccccatggtggatgtgaaggtggacactgaggatatagagaagaaaccagagtcatttttcactcaattcgatgctgtgtgtctgacttgctgctccagggatgtcatagttaaagttgaccagatctgtcacaaaaatagcatcaagttctttacaggagatgtttttggctaccatggatacacatttgccaatctaggagagcatgagtttgtagaggagaaaactaaagttgccaaagttagccaaggagtagaagatgggcccgacaccaagagagcaaaacttgattcttctgagacaacgatggtcaaaaagaaggtggtcttctgccctgttaaagaagccctggaggtggactggagcagtgagaaagcaaaggctgctctgaagcgcacgacctccgactactttctccttcaagtgctcttaaagttccgtacagataaaggaagagatcccagttctgatacatatgaggaagattctgagttgttgctccagatacgaaatgatgtgcttgactcactgggtattagtcctgacctgcttcctgaggactttgtcaggtactgcttctccgagatggccccagtgtgtgcggtggttggagggattttggcacaggaaattgtgaaggccctgtctcagcgggaccctcctcacaacaacttcttcttcttcgatggcatgaaggggaatgggattgtggagtgccttggccccaagtgaactcaagatttggcagccccagagatgccaactgcagcatgcccacctgtattccctgtccccttccttcatgaaggcatctccaggcaaggaaaactgaagtcattggcccgatacaaaacatttcctgcaacgaaggaggtggtgccgacgtgctgcttcccatcaccagcagctgctcgacaaggggcgcagggtggctgtctttgttccagcactgttcaggctgcctgtcatcccgggcctgccagctcccctgagtgatgagcacttccaagcacccctctgccctttctctgtccttatgctgtcccggcctcgccagccctctggggcattgtgggagatgcctgccaggaatgagcaagctctgttgctcgggagcctcttgtcaccttcttggacttattccccacctgataccttatagagaaaagtgtgaattcaggtggagagtaggcccaggccccatgaggcaccagtggaagcacagctccaagttcagacaggtgcccttagagaggaaaaccatgacaggcaaatgcatttcctctggagtttgagaccctgacaaacaacaggtggcatctggtgtgctgttcttgagttttcgtttaggattagttgagttccagctgggttttgggagaaaggagatgctaccaagtcttggatgttagggcgagaccctgcaagttgagtattagagagcttgtctttcaaggcaggttcctggggcttcagggctaggagggaggagcctgcccttttaacagaaccccagtcacatgcggctcaagtcactcagaggctgttgcatttcagggctatgttggtcctttgtttacctcctaaaccacagctgtttgtgtttcacatatgttgtgaattttccttggttctttttaaaggaatgataataaagttacttgctttaaaaaaaaaaaaaaaaaaaaaaaaaaaaaaaaaaaaaaaaaaaaaaaaaaaaaaaaaaaaaaaaaaaaaaagggggggggaaaaaaaacaccaatcagcggcgagagccagtaaaccaccagtcagcacaggccgcaccacggttgttgaaataagcgaagacgcggccacagccagcagagggaggagtaattacaaacggcgggcggggcactccagcgtgacaccacaaacacggcgccgggcagacggcaaaaccagcgcgccggacgcacgggagcacgagcggagaggcgccacaccctgatggggcggggggggagaccaaacgacgcagggtcacccgcccaggcgtgaagcgaatcccccgacaccgggggaacgcatcaacaacaccacgcgagcggccagctgaatggagagagcgagaagcgccgagggccgaaggcacggggcaacaaaagaagtggccggcgcaggtaatgaacaagagactccgcccagggacagc

SEQ ID NO: 433980 - DNA, 2360 bp, Homo sapiens
  misc_feature (3)..(3): n is a, c, g, or t
  misc_feature (6)..(6): n is a, c, g, or t
aantcngctaggtacgaggctggtgttaaccggcgccatggtggagaaggaggaggctggcggcggcattagcgaggaggaggcggcacagtatgaccggcagatccgcctgtggggactggaggcccagaaacggctgcgggcctctcgggtgcttcttgtcggcttgaaaggacttggggctgaaattgccaagaatctcatcttggcaggagtgaaaggactgaccatgctggatcacgaacaggtaactccagaagatcccggagctcagttcttgattcgtactgggtctgttggccgaaatagggctgaagcctctttggagcgagctcagaatctcaaccccatggtggatgtgaaggtggacactgaggatatagagaagaaaccagagtcatttttcactcaattcgatgctgtgtgtctgacttgctgctccagggatgtcatagttaaagttgaccagatctgtcacaaaaatagcatcaagttctttacaggagatgtttttggctaccatggatacacatttgccaatctaggagagcatgagtttgtagaggagaaaactaaagttgccaaagttagccaaggagtagaagatgggcccgacaccaagagagcaaaacttgattcttctgagacaacgatggtcaaaaagaaggtggtcttctgccctgttaaagaagccctggaggtggactggagcagtgagaaagcaaaggctgctctgaagcgcacgacctccgactactttctccttcaagtgctcttaaagttccgtacagataaaggaagagatcccagttctgatacatatgaggaagattctgagttgttgctccagatacgaaatgatgtgcttgactcactgggtattagtcctgacctgcttcctgaggactttgtcaggtactgcttctccgagatggccccagtgtgtgcggtggttggagggattttggcacaggaaattgtgaaggccctgtctcagcgggaccctcctcacaacaacttcttcttcttcgatggcatgaaggggaatgggattgtggagtgccttggccccaagtgaactcaagatttggcagccccagagatgccaactgcagcatgcccacctgtattccctgtccccttccttcatgaaggcatctccaggcaaggaaaactgaagtcattggcccgatacaaaacatttcctgcaacgaaggaggtggtgccgacgtgctgcttcccatcaccagcagctgctcgacaaggggcgcagggtggctgtctttgttccagcactgttcaggctgcctgtcatcccgggcctgccagctcccctgagtgatgagcacttccaagcacccctctgccctttctctgtccttatgctgtcccggcctcgccagccctctggggcattgtgggagatgcctgccaggaatgagcaagctctgttgctcgggagcctcttgtcaccttcttggacttattccccacctgataccttatagagaaaagtgtgaattcaggtggagagtaggcccaggccccatgaggcaccagtggaagcacagctccaagttcagacaggtgcccttagagaggaaaaccatgacaggcaaatgcatttcctctggagtttgagaccctgacaaacaacaggtggcatctggtgtgctgttcttgagttttcgtttaggattagttgagttccagctgggttttgggagaaaggagatgctaccaagtcttggatgttagggcgagaccctgcaagttgagtattagagagcttgtctttcaaggcaggttcctggggcttcagggctaggagggaggagcctgcccttttaacagaaccccagtcacatgcggctcaagtcactcagaggctgttgcatttcagggctatgttggtcctttgtttacctcctaaaccacagctgtttgtgtttcacatatgttgtgaattttccttggttctttttaaaggaatgataataaagttacttgctttaaaaaaaaaaaaaaaaaaaaaaaaaaaaaaaagggggggggggtaaaaaattcccccgaggagggcggccaagtttatagcgcgtccccaggtttctgtggtacaaggggccccaatagggggaggcggaaataaagcagcaggcggacgggcgcggcgtaaacaaagcgtcgttgcggggaaactgggtccttggcactcttggggaaaggacccctactgcggggggcgacacttttggcacagcaacaacaaaaaattaaagccaagggacattaaccattaggtgtattctgtgcacccaacggatattgcggccggaattgggcaccggttattgacatca

SEQ ID NO: 433981 - DNA, 2156 bp, Homo sapiens
  misc_feature (3)..(3): n is a, c, g, or t
  misc_feature (6)..(6): n is a, c, g, or t
  misc_feature (2154)..(2154): n is a, c, g, or t
aantcngctaggtacgaggctggtgttaaccggcgccatggtggagaaggaggaggctggcggcggcattagcgaggaggaggcggcacagtatgaccggcagatccgcctgtggggactggaggcccagaaacggctgcgggcctctcgggtgcttcttgtcggcttgaaaggacttggggctgaaattgccaagaatctcatcttggcaggagtgaaaggactgaccatgctggatcacgaacaggtaactccagaagatcccggagctcagttcttgattcgtactgggtctgttggccgaaatagggctgaagcctctttggagcgagctcagaatctcaaccccatggtggatgtgaaggtggacactgaggatatagagaagaaaccagagtcatttttcactcaattcgatgctgtgtgtctgacttgctgctccagggatgtcatagttaaagttgaccagatctgtcacaaaaatagcatcaagttctttacaggagatgtttttggctaccatggatacacatttgccaatctaggagagcatgagtttgtagaggagaaaactaaagttgccaaagttagccaaggagtagaagatgggcccgacaccaagagagcaaaacttgattcttctgagacaacgatggtcaaaaagaaggtggtcttctgccctgttaaagaagccctggaggtggactggagcagtgagaaagcaaaggctgctctgaagcgcacgacctccgactactttctccttcaagtgctcttaaagttccgtacagataaaggaagagatcccagttctgatacatatgaggaagattctgagttgttgctccagatacgaaatgatgtgcttgactcactgggtattagtcctgacctgcttcctgaggactttgtcaggtactgcttctccgagatggccccagtgtgtgcggtggttggagggattttggcacaggaaattgtgaaggccctgtctcagcgggaccctcctcacaacaacttcttcttcttcgatggcatgaaggggaatgggattgtggagtgccttggccccaagtgaactcaagatttggcagccccagagatgccaactgcagcatgcccacctgtattccctgtccccttccttcatgaaggcatctccaggcaaggaaaactgaagtcattggcccgatacaaaacatttcctgcaacgaaggaggtggtgccgacgtgctgcttcccatcaccagcagctgctcgacaaggggcgcagggtggctgtctttgttccagcactgttcaggctgcctgtcatcccgggcctgccagctcccctgagtgatgagcacttccaagcacccctctgccctttctctgtccttatgctgtcccggcctcgccagccctctggggcattgtgggagatgcctgccaggaatgagcaagctctgttgctcgggagcctcttgtcaccttcttggacttattccccacctgataccttatagagaaaagtgtgaattcaggtggagagtaggcccaggccccatgaggcaccagtggaagcacagctccaagttcagacaggtgcccttagagaggaaaaccatgacaggcaaatgcatttcctctggagtttgagaccctgacaaacaacaggtggcatctggtgtgctgttcttgagttttcgtttaggattagttgagttccagctgggttttgggagaaaggagatgctaccaagtcttggatgttagggcgagaccctgcaagttgagtattagagagcttgtctttcaaggcaggttcctggggcttcagggctaggagggaggagcctgcccttttaacagaaccccagtcacatgcggctcaagtcactcagaggctgttgcatttcagggctatgttggtcctttgtttacctcctaaaccacagctgtttgtgtttcacatatgttgtgaattttccttggttctttttaaaggaatgataataaagttacttgctttaaaaaaaaaaaaaaaaaaaaaaaaaaaaactcgagactagttctctctctctcctggggttagggttctttgtttttggggtttggcagagatgtgtttaagtgctgtggccagaagcggggggagggggggtttggtgnaa

SEQ ID NO: 433982 - DNA, 2542 bp, Homo sapiens
  misc_feature (3)..(3): n is a, c, g, or t
  misc_feature (6)..(6): n is a, c, g, or t
aantcngctaggtacgaggctggtgttaaccggcgccatggtggagaaggaggaggctggcggcggcattagcgaggaggaggcggcacagtatgaccggcagatccgcctgtggggactggaggcccagaaacggtcagggccggcgcggcttgaggccgcgagggtctggagggggcgtctattctgaggcgtttgcggcccggaaggagcgggaaggctgcgggcctctcgggtgcttcttgtcggcttgaaaggacttggggctgaaattgccaagaatctcatcttggcaggagtgaaaggactgaccatgctggatcacgaacaggtaactccagaagatcccggagctcagttcttgattcgtactgggtctgttggccgaaatagggctgaagcctctttggagcgagctcagaatctcaaccccatggtggatgtgaaggtggacactgaggatatagagaagaaaccagagtcatttttcactcaattcgatgctgtgtgtctgacttgctgctccagggatgtcatagttaaagttgaccagatctgtcacaaaaatagcatcaagttctttacaggagatgtttttggctaccatggatacacatttgccaatctaggagagcatgagtttgtagaggagaaaactaaagttgccaaagttagccaaggagtagaagatgggcccgacaccaagagagcaaaacttgattcttctgagacaacgatggtcaaaaagaaggtggtcttctgccctgttaaagaagccctggaggtggactggagcagtgagaaagcaaaggctgctctgaagcgcacgacctccgactactttctccttcaagtgctcttaaagttccgtacagataaaggaagagatcccagttctgatacatatgaggaagattctgagttgttgctccagatacgaaatgatgtgcttgactcactgggtattagtcctgacctgcttcctgaggactttgtcaggtactgcttctccgagatggccccagtgtgtgcggtggttggagggattttggcacaggaaattgtgaaggccctgtctcagcgggaccctcctcacaacaacttcttcttcttcgatggcatgaaggggaatgggattgtggagtgccttggccccaagtgaactcaagatttggcagccccagagatgccaactgcagcatgcccacctgtattccctgtccccttccttcatgaaggcatctccaggcaaggaaaactgaagtcattggcccgatacaaaacatttcctgcaacgaaggaggtggtgccgacgtgctgcttcccatcaccagcagctgctcgacaaggggcgcagggtggctgtctttgttccagcactgttcaggctgcctgtcatcccgggcctgccagctcccctgagtgatgagcacttccaagcacccctctgccctttctctgtccttatgctgtcccggcctcgccagccctctggggcattgtgggagatgcctgccaggaatgagcaagctctgttgctcgggagcctcttgtcaccttcttggacttattccccacctgataccttatagagaaaagtgtgaattcaggtggagagtaggcccaggccccatgaggcaccagtggaagcacagctccaagttcagacaggtgcccttagagaggaaaaccatgacaggcaaatgcatttcctctggagtttgagaccctgacaaacaacaggtggcatctggtgtgctgttcttgagttttcgtttaggattagttgagttccagctgggttttgggagaaaggagatgctaccaagtcttggatgttagggcgagaccctgcaagttgagtattagagagcttgtctttcaaggcaggttcctggggcttcagggctaggagggaggagcctgcccttttaacagaaccccagtcacatgcggctcaagtcactcagaggctgttgcatttcagggctatgttggtcctttgtttacctcctaaaccacagctgtttgtgtttcacatatgttgtgaattttccttggttctttttaaaggaatgataataaagttacttgctttaggatttgcttgtttttcttccacttcagaagcttctgagagggaatgggatgatcctaccagttgccttttcagacctgaggctctaactcaagagattcctcctctccctcaccattcctgccaccattttttctgggtgatgcagcaagagttaaattgttcacattctagaatgtgtagaagcttctggctccagttgtctaatggataattcagctaaatagtggctattttcagtggcaagaattataataataaagggaagtcaaaagtgatgcttcatatgccccaagtgccacagccgctacgggtcagagcttttattggaagaccaggtttgccttgatgcagccaaagtgcgttccagttcaccccactcttgcttgtgtttcttctttatgtaaattgtgtgatgtttcaataaatcagtctctttcctat

SEQ ID NO: 433983 - DNA, 2452 bp, Homo sapiens
gcagagatgcgcgggtctgcctaatgtagtgtcgagaagcgaggatgtgctagtgcaggcgtgccatatcagctgacgtgatggcggcggccagataagggtgatcgctgtggcgactggagtgccagaaacggtgcgggctcttgtcatccttgtcggcttgaaaggacttggggctgaaattgccaagaatctcatcttggcaggagtgaaaggactgaccatgctggatcacgaacaggtaactccagaagatcccggagctcagttcttgattcgtactgggtctgttggccgaaatagggctgaagcctctttggagcgagctcagaatctcaaccccatggtggatgtgaaggtggacactgaggatatagagaagaaaccagagtcatttttcactcaattcgatgctgtgtgtctgacttgctgctccagggatgtcatagttaaagttgaccagatctgtcacaaaaatagcatcaagttctttacaggagatgtttttggctaccatggatacacatttgccaatctaggagagcatgagtttgtagaggagaaaactaaagttgccaaagttagccaaggagtagaagatgggcccgacaccaagagagcaaaacttgattcttctgagacaacgatggtcaaaaagaaggtggtcttctgccctgttaaagaagccctggaggtggactggagcagtgagaaagcaaaggctgctctgaagcgcacgacctccgactactttctccttcaagtgctcttaaagttccgtacagataaaggaagagatcccagttctgatacatatgaggaagattctgagttgttgctccagatacgaaatgatgtgcttgactcactgggtattagtcctgacctgcttcctgaggactttgtcaggtactgcttctccgagatggccccagtgtgtgcggtggttggagggattttggcacaggaaattgtgaaggccctgtctcagcgggaccctcctcacaacaacttcttcttcttcgatggcatgaaggggaatgggattgtggagtgccttggccccaagtgaactcaagatttggcagccccagagatgccaactgcagcatgcccacctgtattccctgtccccttccttcatgaaggcatctccaggcaaggaaaactgaagtcattggcccgatacaaaacatttcctgcaacgaaggaggtggtgccgacgtgctgcttcccatcaccagcagctgctcgacaaggggcgcagggtggctgtctttgttccagcactgttcaggctgcctgtcatcccgggcctgccagctcccctgagtgatgagcacttccaagcacccctctgccctttctctgtccttatgctgtcccggcctcgccagccctctggggcattgtgggagatgcctgccaggaatgagcaagctctgttgctcgggagcctcttgtcaccttcttggacttattccccacctgataccttatagagaaaagtgtgaattcaggtggagagtaggcccaggccccatgaggcaccagtggaagcacagctccaagttcagacaggtgcccttagagaggaaaaccatgacaggcaaatgcatttcctctggagtttgagaccctgacaaacaacaggtggcatctggtgtgctgttcttgagttttcgtttaggattagttgagttccagctgggttttgggagaaaggagatgctaccaagtcttggatgttagggcgagaccctgcaagttgagtattagagagcttgtctttcaaggcaggttcctggggcttcagggctaggagggaggagcctgcccttttaacagaaccccagtcacatgcggctcaagtcactcagaggctgttgcatttcagggctatgttggtcctttgtttacctcctaaaccacagctgtttgtgtttcacatatgttgtgaattttccttggttctttttaaaggaatgataataaagttacttgctttaggatttgcttgtttttcttccacttcagaagcttctgagagggaatgggatgatcctaccagttgccttttcagacctgaggctctaactcaagagattcctcctctccctcaccattcctgccaccattttttctgggtgatgcagcaagagttaaattgttcacattctagaatgtgtagaagcttctggctccagttgtctaatggataattcagctaaatagtggctattttcagtggcaagaattataataataaagggaagtcaaaagtgatgcttcatatgccccaagtgccacagccgctacgggtcagagcttttattggaagaccaggtttgccttgatgcagccaaagtgcgttccagttcaccccactcttgcttgtgtttcttctttatgtaaattgtgtgatgtttcaataaatcagtctctttcctat

SEQ ID NO: 433984 - DNA, 2616 bp, Homo sapiens
  misc_feature (3)..(3): n is a, c, g, or t
  misc_feature (6)..(6): n is a, c, g, or t
aantcngctaggtacgaggctggtgttaaccggcgccatggtggagaaggaggaggctggcggcggcattagcgaggaggaggcggcacagtatgaccggcagatccgcctgtggggactggaggcccagaaacggctgcgggcctctcgggtgcttcttgtcggcttgaaaggacttggggctgaaattgccaagaatctcatcttggcaggagtgaaaggactgaccatgctggatcacgaacaggtaactccagaagatcccggagctcagttcttgattcgtactgggtctgttggccgaaatagggctgaagcctctttggagcgagctcagaatctcaaccccatggtggatgtgaaggtggacactgaggatatagagaagaaaccagagtcatttttcactcaattcgatgctgtgtgtctgacttgctgctccagggatgtcatagttaaagttgaccagatctgtcacaaaaatagcatcaagttctttacaggagatgtttttggctaccatggatacacatttgccaatctaggagagcatgagtttgtagaggagaaaactaaagttgccaaagttagccaaggagtagaagatgggcccgacaccaagagagcaaaacttgattcttctgagacaacgatggtcaaaaagaaggtggtcttctgccctgttaaagaagccctggaggtggactggagcagtgagaaagcaaaggctgctctgaagcgcacgacctccgactactttctccttcaagaattgtttcctagaattgttgagagggtttatgcccagagacatcccagaagcactgaacgcactcatgccaagatgttaatacctttcctcactaaagagaaaccagggttccttggagaaatggctgtttccagatctggggtaggaaaattacagtgctcttaaagttccgtacagataaaggaagagatcccagttctgatacatatgaggaagattctgagttgttgctccagatacgaaatgatgtgcttgactcactgggtattagtcctgacctgcttcctgaggactttgtcaggtactgcttctccgagatggccccagtgtgtgcggtggttggagggattttggcacaggaaattgtgaaggccctgtctcagcgggaccctcctcacaacaacttcttcttcttcgatggcatgaaggggaatgggattgtggagtgccttggccccaagtgaactcaagatttggcagccccagagatgccaactgcagcatgcccacctgtattccctgtccccttccttcatgaaggcatctccaggcaaggaaaactgaagtcattggcccgatacaaaacatttcctgcaacgaaggaggtggtgccgacgtgctgcttcccatcaccagcagctgctcgacaaggggcgcagggtggctgtctttgttccagcactgttcaggctgcctgtcatcccgggcctgccagctcccctgagtgatgagcacttccaagcacccctctgccctttctctgtccttatgctgtcccggcctcgccagccctctggggcattgtgggagatgcctgccaggaatgagcaagctctgttgctcgggagcctcttgtcaccttcttggacttattccccacctgataccttatagagaaaagtgtgaattcaggtggagagtaggcccaggccccatgaggcaccagtggaagcacagctccaagttcagacaggtgcccttagagaggaaaaccatgacaggcaaatgcatttcctctggagtttgagaccctgacaaacaacaggtggcatctggtgtgctgttcttgagttttcgtttaggattagttgagttccagctgggttttgggagaaaggagatgctaccaagtcttggatgttagggcgagaccctgcaagttgagtattagagagcttgtctttcaaggcaggttcctggggcttcagggctaggagggaggagcctgcccttttaacagaaccccagtcacatgcggctcaagtcactcagaggctgttgcatttcagggctatgttggtcctttgtttacctcctaaaccacagctgtttgtgtttcacatatgttgtgaattttccttggttctttttaaaggaatgataataaagttacttgctttaggatttgcttgtttttcttccacttcagaagcttctgagagggaatgggatgatcctaccagttgccttttcagacctgaggctctaactcaagagattcctcctctccctcaccattcctgccaccattttttctgggtgatgcagcaagagttaaattgttcacattctagaatgtgtagaagcttctggctccagttgtctaatggataattcagctaaatagtggctattttcagtggcaagaattataataataaagggaagtcaaaagtgatgcttcatatgccccaagtgccacagccgctacgggtcagagcttttattggaagaccaggtttgccttgatgcagccaaagtgcgttccagttcaccccactcttgcttgtgtttcttctttatgtaaattgtgtgatgtttcaataaatcagtctctttcctat

SEQ ID NO: 433985 - DNA, 2516 bp, Homo sapiens
  misc_feature (3)..(3): n is a, c, g, or t
  misc_feature (6)..(6): n is a, c, g, or t
aantcngctaggtacgaggctggtgttaaccggcgccatggtggagaaggaggaggctggcggcggcattagcgaggaggaggcggcacagtatgaccggcagatccgcctgtggggactggaggcccagaaacggctgcgggcctctcgggtgcttcttgtcggcttgaaaggacttggggctgaaattgccaagaatctcatcttggcaggagtgaaaggactgaccatgctggatcacgaacaggtaactccagaagatcccggagctcagttcttgattcgtactgggtctgttggccgaaatagggctgaagcctctttggagcgagctcagaatctcaaccccatggtggatgtgaaggtggacactgaggatatagagaagaaaccagagtcatttttcactcaattcgatgctatgggatttttccttgggtggctgcattctttgaaacaccaaaggaacacatttctctgtgtgtctgacttgctgctccagggatgtcatagttaaagttgaccagatctgtcacaaaaatagcatcaagttctttacaggagatgtttttggctaccatggatacacatttgccaatctaggagagcatgagtttgtagaggagaaaactaaagttgccaaagttagccaaggagtagaagatgggcccgacaccaagagagcaaaacttgattcttctgagacaacgatggtcaaaaagaaggtggtcttctgccctgttaaagaagccctggaggtggactggagcagtgagaaagcaaaggctgctctgaagcgcacgacctccgactactttctccttcaagtgctcttaaagttccgtacagataaaggaagagatcccagttctgatacatatgaggaagattctgagttgttgctccagatacgaaatgatgtgcttgactcactgggtattagtcctgacctgcttcctgaggactttgtcaggtactgcttctccgagatggccccagtgtgtgcggtggttggagggattttggcacaggaaattgtgaaggccctgtctcagcgggaccctcctcacaacaacttcttcttcttcgatggcatgaaggggaatgggattgtggagtgccttggccccaagtgaactcaagatttggcagccccagagatgccaactgcagcatgcccacctgtattccctgtccccttccttcatgaaggcatctccaggcaaggaaaactgaagtcattggcccgatacaaaacatttcctgcaacgaaggaggtggtgccgacgtgctgcttcccatcaccagcagctgctcgacaaggggcgcagggtggctgtctttgttccagcactgttcaggctgcctgtcatcccgggcctgccagctcccctgagtgatgagcacttccaagcacccctctgccctttctctgtccttatgctgtcccggcctcgccagccctctggggcattgtgggagatgcctgccaggaatgagcaagctctgttgctcgggagcctcttgtcaccttcttggacttattccccacctgataccttatagagaaaagtgtgaattcaggtggagagtaggcccaggccccatgaggcaccagtggaagcacagctccaagttcagacaggtgcccttagagaggaaaaccatgacaggcaaatgcatttcctctggagtttgagaccctgacaaacaacaggtggcatctggtgtgctgttcttgagttttcgtttaggattagttgagttccagctgggttttgggagaaaggagatgctaccaagtcttggatgttagggcgagaccctgcaagttgagtattagagagcttgtctttcaaggcaggttcctggggcttcagggctaggagggaggagcctgcccttttaacagaaccccagtcacatgcggctcaagtcactcagaggctgttgcatttcagggctatgttggtcctttgtttacctcctaaaccacagctgtttgtgtttcacatatgttgtgaattttccttggttctttttaaaggaatgataataaagttacttgctttaggatttgcttgtttttcttccacttcagaagcttctgagagggaatgggatgatcctaccagttgccttttcagacctgaggctctaactcaagagattcctcctctccctcaccattcctgccaccattttttctgggtgatgcagcaagagttaaattgttcacattctagaatgtgtagaagcttctggctccagttgtctaatggataattcagctaaatagtggctattttcagtggcaagaattataataataaagggaagtcaaaagtgatgcttcatatgccccaagtgccacagccgctacgggtcagagcttttattggaagaccaggtttgccttgatgcagccaaagtgcgttccagttcaccccactcttgcttgtgtttcttctttatgtaaattgtgtgatgtttcaataaatcagtctctttcctat

SEQ ID NO: 433986 - DNA, 2540 bp, Homo sapiens
  misc_feature (3)..(3): n is a, c, g, or t
  misc_feature (6)..(6): n is a, c, g, or t
aantcngctaggtacgaggctggtgttaaccggcgccatggtggagaaggaggaggctggcggcggcattagcgaggaggaggcggcacagtatgaccggcagatccgcctgtggggactggaggcccagaaacggctgcgggcctctcgggtgcttcttgtcggcttgaaaggacttggggctgaaattgccaagaatctcatcttggcaggagtgaaaggactgaccatgctggatcacgaacaggtaactccagaagatcccggagctcagttcttgattcgtactgggtctgttggccgaaatagggctgaagcctctttggagcgagctcagaatctcaaccccatggtggatgtgaaggtggacactgaggatatagagaagaaaccagagtcatttttcactcaattcgatgctgtgtgtctgacttgctgctccagggatgtcatagttaaagttgaccagatctgtcacaaaaatagcatcaagttctttacaggagatgtttttggctaccatggatacacatttgccaatctaggagagcatgagtttgtagaggagaaaactaaagttgccaaagttagccaaggagtagaagatgggcccgacaccaagagagcaaaacttgattcttctgagacaacgatggtcaaaaagaaggtggtcttctgccctgttaaagaagccctggaggtggactggagcagtgagaaagcaaaggctgctctgaagcgcacgacctccgactactttctccttcaaggaaactgaaggtctgaccatctttggggagttgtgaagtcttgacagaggaggggagatctgagctgtatttctcggaacagtgctcttaaagttccgtacagataaaggaagagatcccagttctgatacatatgaggaagattctgagttgttgctccagatacgaaatgatgtgcttgactcactgggtattagtcctgacctgcttcctgaggactttgtcaggtactgcttctccgagatggccccagtgtgtgcggtggttggagggattttggcacaggaaattgtgaaggccctgtctcagcgggaccctcctcacaacaacttcttcttcttcgatggcatgaaggggaatgggattgtggagtgccttggccccaagtgaactcaagatttggcagccccagagatgccaactgcagcatgcccacctgtattccctgtccccttccttcatgaaggcatctccaggcaaggaaaactgaagtcattggcccgatacaaaacatttcctgcaacgaaggaggtggtgccgacgtgctgcttcccatcaccagcagctgctcgacaaggggcgcagggtggctgtctttgttccagcactgttcaggctgcctgtcatcccgggcctgccagctcccctgagtgatgagcacttccaagcacccctctgccctttctctgtccttatgctgtcccggcctcgccagccctctggggcattgtgggagatgcctgccaggaatgagcaagctctgttgctcgggagcctcttgtcaccttcttggacttattccccacctgataccttatagagaaaagtgtgaattcaggtggagagtaggcccaggccccatgaggcaccagtggaagcacagctccaagttcagacaggtgcccttagagaggaaaaccatgacaggcaaatgcatttcctctggagtttgagaccctgacaaacaacaggtggcatctggtgtgctgttcttgagttttcgtttaggattagttgagttccagctgggttttgggagaaaggagatgctaccaagtcttggatgttagggcgagaccctgcaagttgagtattagagagcttgtctttcaaggcaggttcctggggcttcagggctaggagggaggagcctgcccttttaacagaaccccagtcacatgcggctcaagtcactcagaggctgttgcatttcagggctatgttggtcctttgtttacctcctaaaccacagctgtttgtgtttcacatatgttgtgaattttccttggttctttttaaaggaatgataataaagttacttgctttaggatttgcttgtttttcttccacttcagaagcttctgagagggaatgggatgatcctaccagttgccttttcagacctgaggctctaactcaagagattcctcctctccctcaccattcctgccaccattttttctgggtgatgcagcaagagttaaattgttcacattctagaatgtgtagaagcttctggctccagttgtctaatggataattcagctaaatagtggctattttcagtggcaagaattataataataaagggaagtcaaaagtgatgcttcatatgccccaagtgccacagccgctacgggtcagagcttttattggaagaccaggtttgccttgatgcagccaaagtgcgttccagttcaccccactcttgcttgtgtttcttctttatgtaaattgtgtgatgtttcaataaatcagtctctttcctat

SEQ ID NO: 433987 - DNA, 2313 bp, Homo sapiens
  misc_feature (3)..(3): n is a, c, g, or t
  misc_feature (6)..(6): n is a, c, g, or t
aantcngctaggtacgaggctggtgttaaccggcgccatggtggagaaggaggaggctggcggcggcattagcgaggaggaggcggcacagtatgaccggcagatccgcctgtggggactggaggcccagaaacggctgcgggcctctcgggtgcttcttgtcggcttgaaaggacttggggctgaaattgccaagaatctcatcttggcaggagtgaaaggactgaccatgctggatcacgaacaggtaactccagaagatcccggagctcagttcttgattcgtactgggtctgttggccgaaatagggctgaagcctctttggagcgagctcagaatctcaaccccatggtggatgtgaaggtggacactgaggatatagagaagaaaccagagtcatttttcactcaattcgatgctgtgtgtctgacttgctgctccagggatgtcatagttaaagttgaccagatctgtcacaaaaatagcatcaagttctttacaggagatgtttttggctaccatggatacacatttgccaatctaggagagcatgagtttgtagaggagaaaactaaagttgccaaagttagccaaggagtagaagatgggcccgacaccaagagagcaaaacttgattcttctgagacaacgatggtcaaaaagaaggtggtcttctgccctgttaaagaagccctggaggtggactggagcagtgagaaagcaaaggctgctctgaagcgcacgacctccgactactttctccttcaaggtactgcttctccgagatggccccagtgtgtgcggtggttggagggattttggcacaggaaattgtgaaggccctgtctcagcgggaccctcctcacaacaacttcttcttcttcgatggcatgaaggggaatgggattgtggagtgccttggccccaagtgaactcaagatttggcagccccagagatgccaactgcagcatgcccacctgtattccctgtccccttccttcatgaaggcatctccaggcaaggaaaactgaagtcattggcccgatacaaaacatttcctgcaacgaaggaggtggtgccgacgtgctgcttcccatcaccagcagctgctcgacaaggggcgcagggtggctgtctttgttccagcactgttcaggctgcctgtcatcccgggcctgccagctcccctgagtgatgagcacttccaagcacccctctgccctttctctgtccttatgctgtcccggcctcgccagccctctggggcattgtgggagatgcctgccaggaatgagcaagctctgttgctcgggagcctcttgtcaccttcttggacttattccccacctgataccttatagagaaaagtgtgaattcaggtggagagtaggcccaggccccatgaggcaccagtggaagcacagctccaagttcagacaggtgcccttagagaggaaaaccatgacaggcaaatgcatttcctctggagtttgagaccctgacaaacaacaggtggcatctggtgtgctgttcttgagttttcgtttaggattagttgagttccagctgggttttgggagaaaggagatgctaccaagtcttggatgttagggcgagaccctgcaagttgagtattagagagcttgtctttcaaggcaggttcctggggcttcagggctaggagggaggagcctgcccttttaacagaaccccagtcacatgcggctcaagtcactcagaggctgttgcatttcagggctatgttggtcctttgtttacctcctaaaccacagctgtttgtgtttcacatatgttgtgaattttccttggttctttttaaaggaatgataataaagttacttgctttaggatttgcttgtttttcttccacttcagaagcttctgagagggaatgggatgatcctaccagttgccttttcagacctgaggctctaactcaagagattcctcctctccctcaccattcctgccaccattttttctgggtgatgcagcaagagttaaattgttcacattctagaatgtgtagaagcttctggctccagttgtctaatggataattcagctaaatagtggctattttcagtggcaagaattataataataaagggaagtcaaaagtgatgcttcatatgccccaagtgccacagccgctacgggtcagagcttttattggaagaccaggtttgccttgatgcagccaaagtgcgttccagttcaccccactcttgcttgtgtttcttctttatgtaaattgtgtgatgtttcaataaatcagtctctttcctat

SEQ ID NO: 433988 - DNA, 2062 bp, Homo sapiens
  misc_feature (3)..(3): n is a, c, g, or t
  misc_feature (6)..(6): n is a, c, g, or t
  misc_feature (2060)..(2060): n is a, c, g, or t
aantcngctaggtacgaggctggtgttaaccggcgccatggtggagaaggaggaggctggcggcggcattagcgaggaggaggcggcacagtatgaccggcagatccgcctgtggggactggaggcccagaaacggctgcgggcctctcgggtgcttcttgtcggcttgaaaggacttggggctgaaattgccaagaatctcatcttggcaggagtgaaaggactgaccatgctggatcacgaacaggtaactccagaagatcccggagctcagttcttgattcgtactgggtctgttggccgaaatagggctgaagcctctttggagcgagctcagaatctcaaccccatggtggatgtgaaggtggacactgaggatatagagaagaaaccagagtcatttttcactcaattcgatgctgtgtgtctgacttgctgctccagggatgtcatagttaaagttgaccagatctgtcacaaaaatagcatcaagttctttacaggagatgtttttggctaccatggatacacatttgccaatctaggagagcatgagtttgtagaggagaaaactaaagttgccaaagttagccaaggagtagaagatgggcccgacaccaagagagcaaaacttgattcttctgagacaacgatggtcaaaaagaaggtggtcttctgccctgttaaagaagccctggaggtggactggagcagtgagaaagcaaaggctgctctgaagcgcacgacctccgactactttctccttcaagtgctcttaaagttccgtacagataaaggaagagatcccagttctgatacatatgaggaagattctgagttgttgctccagatacgaaatgatgtgcttgactcactgggtattagtcctgacctgcttcctgaggactttgtcaggtactgcttctccgagatggccccagtgtgtgcggtggttggagggattttggcacaggaaattgtgaaggccctgtctcagcgggaccctcctcacaacaacttcttcttcttcgatggcatgaaggggaatgggattgtggagtgccttggccccaagtgaactcaagatttggcagccccagagatgccaactgcagcatgcccacctgtattccctgtccccttccttcatgaaggcatctccaggcaaggaaaactgaagtcattggcccgatacaaaacatttcctgcaacgaaggaggtggtgccgacgtgctgcttcccatcaccagcagctgctcgacaaggggcgcagggtggctgtctttgttccagcactgttcaggctgcctgtcatcccgggcctgccagctcccctgagtgatgagcacttccaagcacccctctgccctttctctgtccttatgctgtcccggcctcgccagccctctggggcattgtgggagatgcctgccaggaatgagcaagctctgttgctcgggagcctcttgtcaccttcttggacttattccccacctgataccttatagagaaaagtgtgaattcaggtggagagtaggcccaggccccatgaggcaccagtggaagcacagctccaagttcagacaggtgcccttagagaggaaaaccatgacaggcaaatgcatttcctctggagtttgagaccctgacaaacaacaggtggcatctggtgtgctgttcttgagttttcgtttaggattagttgagttccagttcctggggcttcagggctaggagggaggagcctgcccttttaacagaaccccagtcacatgcggctcaagtcactcagaggctgttgcatttcagggctatgttggtcctttgtttacctcctaaaccacagctgtttgtgtttcacatatgttgtgaattttccttggttctttttaaaggaatgataataaagttacttgctttaaaaaaaaaaaaaaaaaaaaaaaaaaaaactcgagactagttctctctctctcctggggttagggttctttgtttttggggtttggcagagatgtgtttaagtgctgtggccagaagcggggggagggggggtttggtgnaa

SEQ ID NO: 433989 - DNA, 2401 bp, Homo sapiens
  misc_feature (3)..(3): n is a, c, g, or t
  misc_feature (6)..(6): n is a, c, g, or t
aantcngctaggtacgaggctggtgttaaccggcgccatggtggagaaggaggaggctggcggcggcattagcgaggaggaggcggcacagtatgaccggcagatccgcctgtggggactggaggcccagaaacggctgcgggcctctcgggtgcttcttgtcggcttgaaaggacttggggctgaaattgccaagaatctcatcttggcaggagtgaaaggactgaccatgctggatcacgaacaggtaactccagaagatcccggagctcagttcttgattcgtactgggtctgttggccgaaatagggctgaagcctctttggagcgagctcagaatctcaaccccatggtggatgtgaaggtggacactgaggatatagagaagaaaccagagtcatttttcactcaattcgatgctgtgtgtctgacttgctgctccagggatgtcatagttaaagttgaccagatctgtcacaaaaatagcatcaagttctttacaggagatgtttttggctaccatggatacacatttgccaatctaggagagcatgagtttgtagaggagaaaactaaagttgccaaagttagccaaggagtagaagatgggcccgacaccaagagagcaaaacttgattcttctgagacaacgatggtcaaaaagaaggtggtcttctgccctgttaaagaagccctggaggtggactggagcagtgagaaagcaaaggctgctctgaagcgcacgacctccgactactttctccttcaagtgctcttaaagttccgtacagataaaggaagagatcccagttctgatacatatgaggaagattctgagttgttgctccagatacgaaatgatgtgcttgactcactgggtattagtcctgacctgcttcctgaggactttgtcaggtactgcttctccgagatggccccagtgtgtgcggtggttggagggattttggcacaggaaattgtgaaggccctgtctcagcgggaccctcctcacaacaacttcttcttcttcgatggcatgaaggggaatgggattgtggagtgccttggccccaagtgaactcaagatttggcagccccagagatgccaactgcagcatgcccacctgtattccctgtccccttccttcatgaaggcatctccaggcaaggaaaactgaagtcattggcccgatacaaaacatttcctgcaacgaaggaggtggtgccgacgtgctgcttcccatcaccagcagctgctcgacaaggggcgcagggtggctgtctttgttccagcactgttcaggctgcctgtcatcccgggcctgccagctcccctgagtgatgagcacttccaagcacccctctgccctttctctgtccttatgctgtcccggcctcgccagccctctggggcattgtgggagatgcctgccaggaatgagcaagctctgttgctcgggagcctcttgtcaccttcttggacttattccccacctgataccttatagagaaaagtgtgaattcaggtggagagtaggcccaggccccatgaggcaccagtggaagcacagctccaagttcagacaggtgcccttagagaaggtggcatctggtgtgctgttcttgagttttcgtttaggattagttgagttccagctgggttttgggagaaaggagatgctaccaagtcttggatgttagggcgagaccctgcaagttgagtattagagagcttgtctttcaaggcaggttcctggggcttcagggctaggagggaggagcctgcccttttaacagaaccccagtcacatgcggctcaagtcactcagaggctgttgcatttcagggctatgttggtcctttgtttacctcctaaaccacagctgtttgtgtttcacatatgttgtgaattttccttggttctttttaaaggaatgataataaagttacttgctttaggatttgcttgtttttcttccacttcagaagcttctgagagggaatgggatgatcctaccagttgccttttcagacctgaggctctaactcaagagattcctcctctccctcaccattcctgccaccattttttctgggtgatgcagcaagagttaaattgttcacattctagaatgtgtagaagcttctggctccagttgtctaatggataattcagctaaatagtggctattttcagtggcaagaattataataataaagggaagtcaaaagtgatgcttcatatgccccaagtgccacagccgctacgggtcagagcttttattggaagaccaggtttgccttgatgcagccaaagtgcgttccagttcaccccactcttgcttgtgtttcttctttatgtaaattgtgtgatgtttcaataaatcagtctctttcctat

SEQ ID NO: 433990 - DNA, 2243 bp, Homo sapiens
  misc_feature (3)..(3): n is a, c, g, or t
  misc_feature (6)..(6): n is a, c, g, or t
aantcngctaggtacgaggctggtgttaaccggcgccatggtggagaaggaggaggctggcggcggcattagcgaggaggaggcggcacagtatgaccggcagatccgcctgtggggactggaggcccagaaacggctgcgggcctctcgggtgcttcttgtcggcttgaaaggacttggggctgaaattgccaagaatctcatcttggcaggagtgaaaggactgaccatgctggatcacgaacaggtaactccagaagatcccggagctcagttcttgattcgtactgggtctgttggccgaaatagggctgaagcctctttggagcgagctcagaatctcaaccccatggtggatgtgaaggtggacactgaggatatagagaagaaaccagagtcatttttcactcaattcgatgctgtgtgtctgacttgctgctccagggatgtcatagttaaagttgaccagatctgtcacaaaaatagcatcaagttctttacaggagatgtttttggctaccatggatacacatttgccaatctaggagagcatgagtttgtagaggagaaaactaaagttgccaaagttagccaaggagtagaagatgggcccgacaccaagagagcaaaacttgattcttctgagacaacgatggtcaaaaagaaggtggtcttctgccctgttaaagaagccctggaggtggactggagcagtgagaaagcaaaggctgctctgaagcgcacgacctccgactactttctccttcaaggccctgtctcagcgggaccctcctcacaacaacttcttcttcttcgatggcatgaaggggaatgggattgtggagtgccttggccccaagtgaactcaagatttggcagccccagagatgccaactgcagcatgcccacctgtattccctgtccccttccttcatgaaggcatctccaggcaaggaaaactgaagtcattggcccgatacaaaacatttcctgcaacgaaggaggtggtgccgacgtgctgcttcccatcaccagcagctgctcgacaaggggcgcagggtggctgtctttgttccagcactgttcaggctgcctgtcatcccgggcctgccagctcccctgagtgatgagcacttccaagcacccctctgccctttctctgtccttatgctgtcccggcctcgccagccctctggggcattgtgggagatgcctgccaggaatgagcaagctctgttgctcgggagcctcttgtcaccttcttggacttattccccacctgataccttatagagaaaagtgtgaattcaggtggagagtaggcccaggccccatgaggcaccagtggaagcacagctccaagttcagacaggtgcccttagagaggaaaaccatgacaggcaaatgcatttcctctggagtttgagaccctgacaaacaacaggtggcatctggtgtgctgttcttgagttttcgtttaggattagttgagttccagctgggttttgggagaaaggagatgctaccaagtcttggatgttagggcgagaccctgcaagttgagtattagagagcttgtctttcaaggcaggttcctggggcttcagggctaggagggaggagcctgcccttttaacagaaccccagtcacatgcggctcaagtcactcagaggctgttgcatttcagggctatgttggtcctttgtttacctcctaaaccacagctgtttgtgtttcacatatgttgtgaattttccttggttctttttaaaggaatgataataaagttacttgctttaggatttgcttgtttttcttccacttcagaagcttctgagagggaatgggatgatcctaccagttgccttttcagacctgaggctctaactcaagagattcctcctctccctcaccattcctgccaccattttttctgggtgatgcagcaagagttaaattgttcacattctagaatgtgtagaagcttctggctccagttgtctaatggataattcagctaaatagtggctattttcagtggcaagaattataataataaagggaagtcaaaagtgatgcttcatatgccccaagtgccacagccgctacgggtcagagcttttattggaagaccaggtttgccttgatgcagccaaagtgcgttccagttcaccccactcttgcttgtgtttcttctttatgtaaattgtgtgatgtttcaataaatcagtctctttcctat

SEQ ID NO: 433991 - DNA, 2105 bp, Homo sapiens
  misc_feature (335)..(335): n is a, c, g, or t
cccacgcgtccggacccacgcgtgcgcccacagctgtccgtggaaccgaggcgtccgcccacgcgtccggatacacattgtgccaaatctaggagatgcatgagtttgtagaggtagaaaactaaagtggccgaacgttagccaaggagtagaacgagtgggcccgagcaccacgaggagactcaacgtgattcttctgagacaaccgatgggtgcagaacaatgaaatgggtgagtcatatcctaagcctcagtgatgtcagaaatgtataagcacgccttggtaagggtgtgaacttggtaagacaagttgacgaaaaggtcgtaatgagctngtcgttctgacagtcaggcactgacccttcgcgacgtacgtttcgtcacttctaatgttggctcattagaaggttatcgcagttagcatggataaatggtacagtagcatcacgcgaggtctcaggagtacatatgaggaagattctgagttgttgctccagatacgaaatgatgtgcttgactcactgggtattagtcctgacctgcttcctgaggactttgtcaggtactgcttctccgagatggccccagtgtgtgcggtggttggagggattttggcacaggaaattgtgaaggccctgtctcagcgggaccctcctcacaacaacttcttcttcttcgatggcatgaaggggaatgggattgtggagtgccttggccccaagtgaactcaagatttggcagccccagagatgccaactgcagcatgcccacctgtattccctgtccccttccttcatgaaggcatctccaggcaaggaaaactgaagtcattggcccgatacaaaacatttcctgcaacgaaggaggtggtgccgacgtgctgcttcccatcaccagcagctgctcgacaaggggcgcagggtggctgtctttgttccagcactgttcaggctgcctgtcatcccgggcctgccagctcccctgagtgatgagcacttccaagcacccctctgccctttctctgtccttatgctgtcccggcctcgccagccctctggggcattgtgggagatgcctgccaggaatgagcaagctctgttgctcgggagcctcttgtcaccttcttggacttattccccacctgataccttatagagaaaagtgtgaattcaggtggagagtaggcccaggccccatgaggcaccagtggaagcacagctccaagttcagacaggtgcccttagagaggaaaaccatgacaggcaaatgcatttcctctggagtttgagaccctgacaaacaacaggtggcatctggtgtgctgttcttgagttttcgtttaggattagttgagttccagctgggttttgggagaaaggagatgctaccaagtcttggatgttagggcgagaccctgcaagttgagtattagagagcttgtctttcaaggcaggttcctggggcttcagggctaggagggaggagcctgcccttttaacagaaccccagtcacatgcggctcaagtcactcagaggctgttgcatttcagggctatgttggtcctttgtttacctcctaaaccacagctgtttgtgtttcacatatgttgtgaattttccttggttctttttaaaggaatgataataaagttacttgctttaggatttgcttgtttttcttccacttcagaagcttctgagagggaatgggatgatcctaccagttgccttttcagacctgaggctctaactcaagagattcctcctctccctcaccattcctgccaccattttttctgggtgatgcagcaagagttaaattgttcacattctagaatgtgtagaagcttctggctccagttgtctaatggataattcagctaaatagtggctattttcagtggcaagaattataataataaagggaagtcaaaagtgatgcttcatatgccccaagtgccacagccgctacgggtcagagcttttattggaagaccaggtttgccttgatgcagccaaagtgcgttccagttcaccccactcttgcttgtgtttcttctttatgtaaattgtgtgatgtttcaataaatcagtctctttcctat

SEQ ID NO: 433992 - DNA, 1539 bp, Homo sapiens
  misc_feature (3)..(3): n is a, c, g, or t
  misc_feature (6)..(6): n is a, c, g, or t
  misc_feature (1455)..(1457): n is a, c, g, or t
  misc_feature (1460)..(1460): n is a, c, g, or t
  misc_feature (1468)..(1468): n is a, c, g, or t
  misc_feature (1471)..(1471): n is a, c, g, or t
  misc_feature (1476)..(1476): n is a, c, g, or t
  misc_feature (1478)..(1479): n is a, c, g, or t
  misc_feature (1482)..(1482): n is a, c, g, or t
  misc_feature (1486)..(1486): n is a, c, g, or t
  misc_feature (1493)..(1493): n is a, c, g, or t
aantcngctaggtacgaggctggtgttaaccggcgccatggtggagaaggaggaggctggcggcggcattagcgaggaggaggcggcacagtatgaccggcagatccgcctgtggggactggaggcccagaaacggctgcgggcctctcgggtgcttcttgtcggcttgaaaggacttggggctgaaattgccaagaatctcatcttggcaggagtgaaaggactgaccatgctggatcacgaacaggtaactccagaagatcccggagctcagttcttgattcgtactgggtctgttggccgaaatagggctgaagcctctttggagcgagctcagaatctcaaccccatggtggatgtgaaggtggacactgaggatatagagaagaaaccagagtcatttttcactcaattcgatgctgtgtgtctgacttgctgctccagggatgtcatagttaaagttgaccagatctgtcacaaaaatagcatcaagttctttacaggagatgtttttggctaccatggatacacatttgccaatctaggagagcatgagtttgtagaggagaaaactaaagttgccaaagttagccaaggagtagaagatgggcccgacaccaagagagcaaaacttgattcttctgagacaacgatggtcaaaaagaaggtggtcttctgccctgttaaagaagccctggaggtggactggagcagtgagaaagcaaaggctgctctgaagcgcacgacctccgactactttctccttcaagtgctcttaaagttccgtacagataaaggaagagatcccagttctgatacatatgaggaagattctgagttgttgctccagatacgaaatgatgtgcttgactcactgggtattagtcctgacctgcttcctgaggactttgtcaggtactgcttctccgagatggccccagtgtgtgcggtggttggagggattttggcacaggaaattgtgaaggccctgtctcagcgggaccctcctcacaacaacttcttcttcttcgatggcatgaaggggaatgggattgtggagtgccttggccccaagtgaactcaagatttggcagccccagagatgccaactgcagcatgcccacctgtattccctgtccccttccttcatgaaggcatctccaggcaaggaaaactgaagtcattggcccgatacaaaacatttcctgcaacgaaggaggtggtgccgacgtgctgcttcccatcaccagcagctgctcgacaaggggcgcagggtggctgtctttgttccagcactgttcaggctgcctgtcatcccgggcctgccagctcccctgagtgatgagcacttccaagcacccctctgccctttctctgtccttatgctgtcccggcctcgccagccctctggggcattgtgggagatgcctgccaggaatgagcaagctgtcggannnctngactttgngtnttccncnngancttngagaagnggatcgggggatgccagcctggggcgggcgtccttagggtaaagac

SEQ ID NO: 433993 - DNA, 2371 bp, Homo sapiens
  misc_feature (3)..(3): n is a, c, g, or t
  misc_feature (6)..(6): n is a, c, g, or t
aantcngctaggtacgaggctggtgttaaccggcgccatggtggagaaggaggaggctggcggcggcattagcgaggaggaggcggcacagtatgaccggcagatccgcctgtggggactggaggcccagaaacggctgcgggcctctcgggtgcttcttgtcggcttgaaaggacttggggctgaaattgccaagaatctcatcttggcaggagtgaaaggactgaccatgctggatcacgaacaggtaactccagaagatcccggagctcagttcttgattcgtactgggtctgttggccgaaatagggctgaagcctctttggagcgagctcagaatctcaaccccatggtggatgtgaaggtggacactgaggatatagagaagaaaccagagtcatttttcactcaattcgatgctatgggatttttccttgggtggctgcattctttgaaacaccaaaggaacacatttctctgtgtgtctgacttgctgctccagggatgtcatagttaaagttgaccagatctgtcacaaaaatagcatcaagttctttacaggagatgtttttggctaccatggatacacatttgccaatctaggagagcatgagtttgtagaggagaaaactaaagttgccaaagttagccaaggagtagaagatgggcccgacaccaagagagcaaaacttgattcttctgagacaacgatggtcaaaaagaaggtggtcttctgccctgttaaagaagccctggaggtggactggagcagtgagaaagcaaaggctgctctgaagcgcacgacctccgactactttctccttcaaggtactgcttctccgagatggccccagtgtgtgcggtggttggagggattttggcacaggaaattgtgaaggccctgtctcagcgggaccctcctcacaacaacttcttcttcttcgatggcatgaaggggaatgggattgtggagtgccttggccccaagtgaactcaagatttggcagccccagagatgccaactgcagcatgcccacctgtattccctgtccccttccttcatgaaggcatctccaggcaaggaaaactgaagtcattggcccgatacaaaacatttcctgcaacgaaggaggtggtgccgacgtgctgcttcccatcaccagcagctgctcgacaaggggcgcagggtggctgtctttgttccagcactgttcaggctgcctgtcatcccgggcctgccagctcccctgagtgatgagcacttccaagcacccctctgccctttctctgtccttatgctgtcccggcctcgccagccctctggggcattgtgggagatgcctgccaggaatgagcaagctctgttgctcgggagcctcttgtcaccttcttggacttattccccacctgataccttatagagaaaagtgtgaattcaggtggagagtaggcccaggccccatgaggcaccagtggaagcacagctccaagttcagacaggtgcccttagagaggaaaaccatgacaggcaaatgcatttcctctggagtttgagaccctgacaaacaacaggtggcatctggtgtgctgttcttgagttttcgtttaggattagttgagttccagctgggttttgggagaaaggagatgctaccaagtcttggatgttagggcgagaccctgcaagttgagtattagagagcttgtctttcaaggcaggttcctggggcttcagggctaggagggaggagcctgcccttttaacagaaccccagtcacatgcggctcaagtcactcagaggctgttgcatttcagggctatgttggtcctttgtttacctcctaaaccacagctgtttgtgtttcacatatgttgtgaattttccttggttctttttaaaggaatgataataaagttacttgctttaggatttgcttgtttttcttccacttcagaagcttctgagagggaatgggatgatcctaccagttgccttttcagacctgaggctctaactcaagagattcctcctctccctcaccattcctgccaccattttttctgggtgatgcagcaagagttaaattgttcacattctagaatgtgtagaagcttctggctccagttgtctaatggataattcagctaaatagtggctattttcagtggcaagaattataataataaagggaagtcaaaagtgatgcttcatatgccccaagtgccacagccgctacgggtcagagcttttattggaagaccaggtttgccttgatgcagccaaagtgcgttccagttcaccccactcttgcttgtgtttcttctttatgtaaattgtgtgatgtttcaataaatcagtctctttcctat

SEQ ID NO: 433994 - DNA, 2201 bp, Homo sapiens
  misc_feature (3)..(3): n is a, c, g, or t
  misc_feature (6)..(6): n is a, c, g, or t
aantcngctaggtacgaggctggtgttaaccggcgccatggtggagaaggaggaggctggcggcggcattagcgaggaggaggcggcacagtatgaccggcagatccgcctgtggggactggaggcccagaaacggctgcgggcctctcgggtgcttcttgtcggcttgaaaggacttggggctgaaattgccaagaatctcatcttggcaggagtgaaaggactgaccatgctggatcacgaacaggtaactccagaagatcccggagctcagttcttgattcgtactgggtctgttggccgaaatagggctgaagcctctttggagcgagctcagaatctcaaccccatggtggatgtgaaggtggacactgaggatatagagaagaaaccagagtcatttttcactcaattcgatgctgtgtgtctgacttgctgctccagggatgtcatagttaaagttgaccagatctgtcacaaaaatagcatcaagttctttacaggagatgtttttggctaccatggatacacatttgccaatctaggagagcatgagtttgtagaggagaaaactaaagttgccaaagttagccaaggagtagaagatgggcccgacaccaagagagcaaaacttgattcttctgagacaacgatggtcaaaaagaaggtggtcttctgccctgttaaagaagccctggaggtggactggagcagtgagaaagcaaaggctgctctgaagcgcacgacctccgactactttctccttcaagtgctcttaaagttccgtacagataaaggaagagatcccagttctgatacatatgaggaagattctgagttgttgctccagatacgaaatgatgtgcttgactcactgggtattagtcctgacctgcttcctgaggactttgtcaggtactgcttctccgagatggccccagtgtgtgcggtggttggagggattttggcacaggaaattgtgaaggccctgtctcagcgggaccctcctcacaacaacttcttcttcttcgatggcatgaaggggaatgggattgtggagtgccttggccccaagtgaactcaagatttggcagccccagagatgccaactgcagcatgcccacctgtattccctgtccccttccttcatgaaggcatctccaggcaaggaaaactgaagtcattggcccgatacaaaacatttcctgcaacgaaggaggtggtgccgacgtgctgcttcccatcaccagcagctgctcgacaaggggcgcagggtggctgtctttgttccagcactgttcaggctgcctgtcatcccgggcctgccagctcccctgagtgatgagcacttccaagcacccctctgccctttctctgtccttatgctggctgggttttgggagaaaggagatgctaccaagtcttggatgttagggcgagaccctgcaagttgagtattagagagcttgtctttcaaggcaggttcctggggcttcagggctaggagggaggagcctgcccttttaacagaaccccagtcacatgcggctcaagtcactcagaggctgttgcatttcagggctatgttggtcctttgtttacctcctaaaccacagctgtttgtgtttcacatatgttgtgaattttccttggttctttttaaaggaatgataataaagttacttgctttaaaaaaaaaaaaaaaaaaaaaaaaaaaaaaaaaaaaaaaaaaaaaaaaaaaaaaaaaaaaaaaaaaaaaaagggggggggaaaaaaaacaccaatcagcggcgagagccagtaaaccaccagtcagcacaggccgcaccacggttgttgaaataagcgaagacgcggccacagccagcagagggaggagtaattacaaacggcgggcggggcactccagcgtgacaccacaaacacggcgccgggcagacggcaaaaccagcgcgccggacgcacgggagcacgagcggagaggcgccacaccctgatggggcggggggggagaccaaacgacgcagggtcacccgcccaggcgtgaagcgaatcccccgacaccgggggaacgcatcaacaacaccacgcgagcggccagctgaatggagagagcgagaagcgccgagggccgaaggcacggggcaacaaaagaagtggccggcgcaggtaatgaacaagagactccgcccagggacagc

SEQ ID NO: 433995 - DNA, 2204 bp, Homo sapiens
  misc_feature (3)..(3): n is a, c, g, or t
  misc_feature (6)..(6): n is a, c, g, or t
aantcngctaggtacgaggctggtgttaaggctgaagcctctttggagcgagctcagaatctcaaccccatggtggatgtgaaggtggacactgaggatatagagaagaaaccagagtcatttttcactcaattcgatgctgtgtgtctgacttgctgctccagggatgtcatagttaaagttgaccagatctgtcacaaaaatagcatcaagttctttacaggagatgtttttggctaccatggatacacatttgccaatctaggagagcatgagtttgtagaggagaaaactaaagttgccaaagttagccaaggagtagaagatgggcccgacaccaagagagcaaaacttgattcttctgagacaacgatggtcaaaaagaaggtggtcttctgccctgttaaagaagccctggaggtggactggagcagtgagaaagcaaaggctgctctgaagcgcacgacctccgactactttctccttcaagtgctcttaaagttccgtacagataaaggaagagatcccagttctgatacatatgaggaagattctgagttgttgctccagatacgaaatgatgtgcttgactcactgggtattagtcctgacctgcttcctgaggactttgtcaggtactgcttctccgagatggccccagtgtgtgcggtggttggagggattttggcacaggaaattgtgaaggttcttggctgccttcgtggactccggccctgtctcagcgggaccctcctcacaacaacttcttcttcttcgatggcatgaaggggaatgggattgtggagtgccttggccccaagtgaactcaagatttggcagccccagagatgccaactgcagcatgcccacctgtattccctgtccccttccttcatgaaggcatctccaggcaaggaaaactgaagtcattggcccgatacaaaacatttcctgcaacgaaggaggtggtgccgacgtgctgcttcccatcaccagcagctgctcgacaaggggcgcagggtggctgtctttgttccagcactgttcaggctgcctgtcatcccgggcctgccagctcccctgagtgatgagcacttccaagcacccctctgccctttctctgtccttatgctgtcccggcctcgccagccctctggggcattgtgggagatgcctgccaggaatgagcaagctctgttgctcgggagcctcttgtcaccttcttggacttattccccacctgataccttatagagaaaagtgtgaattcaggtggagagtaggcccaggccccatgaggcaccagtggaagcacagctccaagttcagacaggtgcccttagagaggaaaaccatgacaggcaaatgcatttcctctggagtttgagaccctgacaaacaacaggtggcatctggtgtgctgttcttgagttttcgtttaggattagttgagttccagctgggttttgggagaaaggagatgctaccaagtcttggatgttagggcgagaccctgcaagttgagtattagagagcttgtctttcaaggcaggttcctggggcttcagggctaggagggaggagcctgcccttttaacagaaccccagtcacatgcggctcaagtcactcagaggctgttgcatttcagggctatgttggtcctttgtttacctcctaaaccacagctgtttgtgtttcacatatgttgtgaattttccttggttctttttaaaggaatgataataaagttacttgctttaggatttgcttgtttttcttccacttcagaagcttctgagagggaatgggatgatcctaccagttgccttttcagacctgaggctctaactcaagagattcctcctctccctcaccattcctgccaccattttttctgggtgatgcagcaagagttaaattgttcacattctagaatgtgtagaagcttctggctccagttgtctaatggataattcagctaaatagtggctattttcagtggcaagaattataataataaagggaagtcaaaagtgatgcttcatatgccccaagtgccacagccgctacgggtcagagcttttattggaagaccaggtttgccttgatgcagccaaagtgcgttccagttcaccccactcttgcttgtgtttcttctttatgtaaattgtgtgatgtttcaataaatcagtctctttcctat

SEQ ID NO: 433996 - DNA, 1967 bp, Homo sapiens
  misc_feature (3)..(3): n is a, c, g, or t
  misc_feature (6)..(6): n is a, c, g, or t
aantcngctaggtacgaggctggtgttaaccggcgccatggtggagaaggaggaggctggcggcggcattagcgaggaggaggcggcacagtatgaccggcagatccgcctgtggggactggaggcccagaaacggctgcgggcctctcgggtgcttcttgtcggcttgaaaggacttggggctgaaattgccaagaatctcatcttggcaggagtgaaaggactgaccatgctggatcacgaacaggtaactccagaagatcccggagctcagttcttgattcgtactgggtctgttggccgaaatagggctgaagcctctttggagcgagctcagaatctcaaccccatggtggatgtgaaggtggacactgaggatatagagaagaaaccagagtcatttttcactcaattcgatgctgtgtgtctgacttgctgctccagggatgtcatagttaaagttgaccagatctgtcacaaaaatagcatcaagttctttacaggagatgtttttggctaccatggatacacatttgccaatctaggagagcatgagtttgtagaggagaaaactaaagttgccaaagttagccaaggagtagaagatgggcccgacaccaagagagcaaaacttgattcttctgagacaacgatggtcaaaaagaaggtggtcttctgccctgttaaagaagccctggaggtggactggagcagtgagaaagcaaaggctgctctgaagcgcacgacctccgactactttctccttcaagtgctcttaaagttccgtacagataaaggaagagatcccagttctgatacatatgaggaagattctgagttgttgctccagatacgaaatgatgtgcttgactcactgggtattagtcctgacctgcttcctgaggactttgtcaggtactgcttctccgagatggccccagtgtgtgcggtggttggagggattttggcacaggaaattgtgaaggccctgtctcagcgggaccctcctcacaacaacttcttcttcttcgatggcatgaaggggaatgggattgtggagtgccttggccccaagtgaactcaagatttggcagccccagagatgccaaggaaaaccatgacaggcaaatgcatttcctctggagtttgagaccctgacaaacaacaggtggcatctggtgtgctgttcttgagttttcgtttaggattagttgagttccagctgggttttgggagaaaggagatgctaccaagtcttggatgttagggcgagaccctgcaagttgagtattagagagcttgtctttcaaggcaggttcctggggcttcagggctaggagggaggagcctgcccttttaacagaaccccagtcacatgcggctcaagtcactcagaggctgttgcatttcagggctatgttggtcctttgtttacctcctaaaccacagctgtttgtgtttcacatatgttgtgaattttccttggttctttttaaaggaatgataataaagttacttgctttaggatttgcttgtttttcttccacttcagaagcttctgagagggaatgggatgatcctaccagttgccttttcagacctgaggctctaactcaagagattcctcctctccctcaccattcctgccaccattttttctgggtgatgcagcaagagttaaattgttcacattctagaatgtgtagaagcttctggctccagttgtctaatggataattcagctaaatagtggctattttcagtggcaagaattataataataaagggaagtcaaaagtgatgcttcatatgccccaagtgccacagccgctacgggtcagagcttttattggaagaccaggtttgccttgatgcagccaaagtgcgttccagttcaccccactcttgcttgtgtttcttctttatgtaaattgtgtgatgtttcaataaatcagtctctttcctat

SEQ ID NO: 433997 - DNA, 1188 bp, Homo sapiens
  misc_feature (3)..(3): n is a, c, g, or t
  misc_feature (6)..(6): n is a, c, g, or t
aantcngctaggtacgaggctggtgttaaccggcgccatggtggagaaggaggaggctggcggcggcattagcgaggaggaggcggcacagtatgaccggcagatccgcctgtggggactggaggcccagaaacggctgcgggcctctcgggtgcttcttgtcggcttgaaaggacttggggctgaaattgccaagaatctcatcttggcaggagtgaaaggactgaccatgctggatcacgaacaggtaactccagaagatcccggagctcagttcttgattcgtactgggtctgttggccgaaatagggctgaagcctctttggagcgagctcagaatctcaaccccatggtggatgtgaaggtggacactgaggatatagagaagaaaccagagtcatttttcactcaattcgatgctgtgtgtctgacttgctgctccagggatgtcatagttaaagttgaccagatctgtcacaaaaatagcatcaagttctttacaggagatgtttttggctaccatggatacacatttgccaatctaggagagcatgagtttgtagaggagaaaactaaagttgccaaagttagccaaggagtagaagatgggcccgacaccaagagagcaaaacttgattcttctgagacaacgatggtcaaaaagaaggtggtcttctgccctgttaaagaagccctggaggtggactggagcagtgagaaagcaaaggctgctctgaagcgcacgacctccgactactttctccttcaagtgctcttaaagttccgtacagataaaggaagagatcccagttctgatacatatgaggaagattctgagttgttgctccagatacgaaatgatgtgcttgactcactgggtattagtcctgacctgcttcctgaggactttgtcaggtactgcttctccgagatggccccagtgtgtgcggtggttggagggattttggcacaggaaattgtgaaggttcttggctgccttcgtggactccggccctgtctcagcgggaccctcctcacaacaacttcttcttcttcgatggcatgaaggggaatgggattgtggagtgccttggccccaagtgaactcaagatttggcagccccagagatgccaaggacccactgcagggacccagtcggcagggacccacacggcagggaccactcg

SEQ ID NO: 433998 - DNA, 1039 bp, Homo sapiens
  misc_feature (3)..(3): n is a, c, g, or t
  misc_feature (6)..(6): n is a, c, g, or t
  misc_feature (917)..(917): n is a, c, g, or t
  misc_feature (924)..(924): n is a, c, g, or t
  misc_feature (926)..(926): n is a, c, g, or t
  misc_feature (931)..(931): n is a, c, g, or t
  misc_feature (935)..(935): n is a, c, g, or t
aantcngctaggtacgaggctggtgttaaccggcgccatggtggagaaggaggaggctggcggcggcattagcgaggaggaggcggcacagtatgaccggcagatccgcctgtggggactggaggcccagaaacggctgcgggcctctcgggtgcttcttgtcggcttgaaaggacttggggctgaaattgccaagaatctcatcttggcaggagtgaaaggactgaccatgctggatcacgaacaggtaactccagaagatcccggagctcagttcttgattcgtactgggtctgttggccgaaatagggctgaagcctctttggagcgagctcagaatctcaaccccatggtggatgtgaaggtggacactgaggatatagagaagaaaccagagtcatttttcactcaattcgatgctgtgtgtctgacttgctgctccagggatgtcatagttaaagttgaccagatctgtcacaaaaatagcatcaagttctttacaggagatgtttttggctaccatggatacacatttgccaatctaggagagcatgagtttgtagaggagaaaactaaagttgccaaagttagccaaggagtagaagatgggcccgacaccaagagagcaaaacttgattcttctgagacaacgatggtcaaaaagaaggtggtcttctgccctgttaaagaagccctggaggtggactggagcagtgagaaagcaaaggctgctctgaagcgcacgacctccgactactttctccttcaagtgctcttaaagttccgtacagataaaggaagagatcccagttctgatacatatgaggaagattctgagttgttgctccagatacgaaatgatgtgcttgactcactgggtattagtcctgacctgcttcctgaggactttgtcaggncggacgntnccggnaggnccaggtgggggggtgaggggattggcagaatggaggccggtcagaaccccacaaaattctttgggatagggaggtaggggagggcccaggaaatggggaagaag

SEQ ID NO: 433999 - DNA, 1833 bp, Homo sapiens
  misc_feature (3)..(3): n is a, c, g, or t
  misc_feature (6)..(6): n is a, c, g, or t
aantcngctaggtacgaggctggtgttaaccggcgccatggtggagaaggaggaggctggcggcggcattagcgaggaggaggcggcacagtatgaccggcagatccgcctgtggggactggaggcccagaaacggctgcgggcctctcgggtgcttcttgtcggcttgaaaggacttggggctgaaattgccaagaatctcatcttggcaggagtgaaaggactgaccatgctggatcacgaacaggtaactccagaagatcccggagctcagttcttgattcgtactgggtctgttggccgaaatagggctgaagcctctttggagcgagctcagaatctcaaccccatggtggatgtgaaggtggacactgaggatatagagaagaaaccagagtcatttttcactcaattcgatgctgtgtgtctgacttgctgctccagggatgtcatagttaaagttgaccagatctgtcacaaaaatagcatcaagttctttacaggagatgtttttggctaccatggatacacatttgccaatctaggagagcatgagtttgtagaggagaaaactaaagttgccaaagttagccaaggagtagaagatgggcccgacaccaagagagcaaaacttgattcttctgagacaacgatggtcaaaaagaaggtggtcttctgccctgttaaagaagccctggaggtggactggagcagtgagaaagcaaaggctgctctgaagcgcacgacctccgactactttctccttcaagcatgatgttatattcctttggatgtaccgtcatctatgaccagtctcatcttgaaaggcatgcttattttccatttttcccagtgcttggaatttgtttccaaaattgtttctaggaacatgactaatgtgactgacgatgccttaggaattcctagtggggacaaggtgcttggctgggatgcatacctaagaatatctcacaaagaaacctgattttgtttcactattgcctaatggcgcacatagtaggtgctcaataaataaatattttttgcatgagtggtttttgcttgtctggtcatttgccctattgtagagggagagtagtgtgcccactggagtccccacagggtccttttgcctgcatgcctacccctgtggcacccatcaggcttttgattccaatgttgccctgggctctcactcacaggtagatgttttttattgccccattcacaattcagccacctgctgtccgcatgcatgtgcttgccatgtttagatattgggtgtttttccagtttacttaataagttagtggccagactgtacgcttcctgctgcatttttccactgtcttgagagttggcctcgccatctgtgagcaaaaggtctcttctttttattattctcccatggcatgttgcaaaacagtaagcgtgagctggtttcctgtggcaaaaaaatgactttgatttgttctttttgaggttactgtgagtttatcataacaggagtgctaaaaatacctagtctggtatggaaacagcattcacttaccagcatgaacaataacatacaggtttagcctagagcaggaagaaatggacttcatctcaagatgagaatacttatcagagaattcttggcaatcttaacttgctcagtctctgttctgatgagttatggaaaagtacttagaccatctttgagccacagaattgaagctgaaaatattcttagaccaaacattttgtgagcacctgctatgtaccagatctcatagctgggactaatcagaggaagaggaatagaataagtgttcttgccaatgtgaaaga

SEQ ID NO: 434000 - DNA, 850 bp, Homo sapiens
  misc_feature (3)..(3): n is a, c, g, or t
  misc_feature (6)..(6): n is a, c, g, or t
aantcngctaggtacgaggctggtgttaaccggcgccatggtggagaaggaggaggctggcggcggcattagcgaggaggaggcggcacagtatgaccggcagatccgcctgtggggactggaggcccagaaacggctgcgggcctctcgggtgcttcttgtcggcttgaaaggacttggggctgaaattgccaagaatctcatcttggcaggagtgaaaggactgaccatgctggatcacgaacaggtaactccagaagatcccggagctcagttcttgattcgtactgggtctgttggccgaaatagggctgaagcctctttggagcgagctcagaatctcaaccccatggtggatgtgaaggtggacactgaggatatagagaagaaaccagagtcatttttcactcaattcgatgctgtgtgtctgacttgctgctccagggatgtcatagttaaagttgaccagatctgtcacaaaaatagcatcaagttctttacaggagatgtttttggctaccatggatacacatttgccaatctaggagagcatgagtttgtagaggagaaaactaaagttgccaaagttacctcccgagtagctgggactacaggtgcccgccaccatgcccggctaatttttttgtatttttagtagagacggggtttcaccatgttagccaggatggtctcgatgttctgacctcgtgatccgcctgcctcagcctcccaaagtgctgggattacaggcgtgagccaccgcgcctggccagaacaaatacctttaaaaagctgggacctgtggtgtacctaaaggataatacagatgttcctctcaacttagcatggc

SEQ ID NO: 434001 - DNA, 682 bp, Homo sapiens
  misc_feature (3)..(3): n is a, c, g, or t
  misc_feature (6)..(6): n is a, c, g, or t
aantcngctaggtacgaggctggtgttaaccggcgccatggtggagaaggaggaggctggcggcggcattagcgaggaggaggcggcacagtatgaccggcagatccgcctgtggggactggaggcccagaaacggctgcgggcctctcgggtgcttcttgtcggcttgaaaggacttggggctgaaattgccaagaatctcatcttggcaggagtgaaaggactgaccatgctggatcacgaacaggtaactccagaagatcccggagctcagttcttgattcgtactgggtctgttggccgaaatagggctgaagcctctttggagcgagctcagaatctcaaccccatggtggatgtgaaggtggacactgaggatatagagaagaaaccagagtcatttttcactcaattcgatgctgtgtgtctgacttgctgctccagggatgtcatagttaaagttgaccagatctgtcacaaaaatagcatcaagttctttacaggagatgtttttggctaccatggatacacatttgccaatctaggagagcatgagtttgtagaggagaaaactaaagttgccgatgggaatggtctgtcacaatctgctccttttttttgtccgccacacgtaactgagatgctcctttaaataaagcgtttgtgtttcaagttaaaaaaa

SEQ ID NO: 434002 - DNA, 1170 bp, Homo sapiens
  misc_feature (3)..(3): n is a, c, g, or t
  misc_feature (6)..(6): n is a, c, g, or t
  misc_feature (760)..(760): n is a, c, g, or t
  misc_feature (892)..(892): n is a, c, g, or t
aantcngctaggtacgaggctggtgttaaccggcgccatggtggagaaggaggaggctggcggcggcattagcgaggaggaggcggcacagtatgaccggcagatccgcctgtggggactggaggcccagaaacggtcagggccggcgcggcttgaggccgcgagggtctggagggggcgtctattctgaggcgtttgcggcccggaaggagcgggaaggctgcgggcctctcgggtgcttcttgtcggcttgaaaggacttggggctgaaattgccaagaatctcatcttggcaggagtgaaaggactgaccatgctggatcacgaacaggtaactccagaagatcccggagctcagttcttgattcgtactgggtctgttggccgaaatagggctgaagcctctttggagcgagctcagaatctcaaccccatggtggatgtgaaggtggacactgaggatatagagaagaaaccagagtcatttttcactcaattcgatgctgtgtgtctgacttgctgctccagggatgtcatagttaaagttgaccagatctgtcacaaaaatagcatcaagttctttacaggagatgtttttggctaccatggatacacatttgccaatctaggagagcatgagtttgtagaggagaaaactaaagttgccaaagttagccaaggagtagaagatgggcccgacaccaagagagcaaaacttgattcttctgagacaacgatggtcaaaaaggtggtcttctgncctggtttaagaaagccctggtagttggactgggagcagtggggaaaggcaaagggggtcttgaaagggccagaacagtcggagaaaatatatccgctcaaaggggggccttaaagtccgggcagataaagnaggggagaagtcccacggctggtaataaatagaggggagacaacatcgagggagggggccccataacaaacaacgcagggtgggacgcccacagcggagagagatacatgaagcagaaccgctaaagacagaggctagcaagagcatcgccaggcacgcaactatcggacgaggagagaaccagagtaagcaaaaaagcacggataggggaagaccaacaacgacattacctggacagcaacgacgaagaaggacggacacaacagagcgaccgaaca

SEQ ID NO: 434003 - DNA, 720 bp, Homo sapiens
caatcaaaattgtctccagacattgccaaatagccctttgggagcaaaatcgaccccagttaagaaccactgccctagactgcttttagaatttttttttccctctattcctcttaaagcacttgagctaaaccctcttttcatttttctccccaggccctgtctcagcgggaccctcctcacaacaacttcttcttcttcgatggcatgaaggggaatgggattgtggagtgccttggccccaagtgaactcaagatttggcagccccagagatgccaactgcagcatgcccacctgtattccctgtccccttccttcatgaaggcatctccaggcaaggaaaactgaagtcattggcccgatacaaaacatttcctgcaacgaaggaggtggtgccgacgtgctgcttcccatcaccagcagctgctcgacaaggggcgcagggtggctgtctttgttccagcactgttcaggctgcctgtcatcccgggcctgccagctcccctgagtgatgagcacttccaagcacccctctgccctttctctgtccttatgctgtcccggcctcgccagccctctggggcattgtgggagatgcctgccaggaatgagcaagctctgttgctcgggagcctcttgtcaccttcttggacttattccccacctgataccttatagagaaaagtgtgaattcaggtggagagtaggcccaggcccca

SEQ ID NO: 434004 - DNA, 571 bp, Homo sapiens
ttataattattggattgcctctctgactatgtttgttgaataaataaaaaaaggtggccaggtgccgtggctcacacctgtaatcccagcactttgggaggccgaggcgggcggatcacgaggtcaggagtttgagacaagcctgaccaacatggtgaaaacccgtctctactaaatatacaaaaattagccaggcatggtggttcgtgcctgtagtcctagctactcaggaggctgaggcagaagaatcacttgaacccgggaggcagaggttgcagtgagccaagattgtgccattgcactccagcctgggcgacagtgtgagcctccatctccaaaaaaaaaaaaaagtggctttataacctgccttctttttcttattcccagtgctcttaaagttccgtacagataaaggaagagatcccagttctgatacatatgaggaagattctgagttgttgctccagatacgaaatgatgtgcttgactcactgggtattagtcctgacctgcttcctgaggactttgtcagggttggtgtcagtatttatcactgtttagtctggacaga

SEQ ID NO: 434005 - DNA, 4761 bp, Homo sapiens
agccccgcccccgtagttagcgcggtgcttctcttccgctccgggtcggctccgtttccctttccgggcgggcaggcggcggaccccagtgtctttatccctcttttgcacagtcagcttctgcagctctcccgggctagcatggcagcgtggaagagttggacggccctgcggctctgcgccacagttgttgtacttgatatggtcgtctgtaaaggatttgtagaagatttagatgaatcgtttaaagaaaatcgaaatgatgacatttggcttgtagatttttatgcgccatggtgtggccattgtaaaaagctggaaccaatttggaatgaagttggtcttgagatgaaaagcattggttctccagttaaggttggaaagatggatgctacttcctattctagcattgcttcagagtttggagttcgaggttatccaacaattaagctattaaaaggggacttggcatataattatagaggaccacgaacaaaagatgatattattgagtttgctcacagagtatctggggctctaattcggccacttccaagtcaacaaatgtttgaacatatgcagaagagacaccgtgtatttttcgtttatgtaggtggagaatcacctttgaaagagaaatacatagatgctgcttcagaattgattgtatatacatacttcttttctgcctcagaagaagtggttcctgagtatgtgacactaaaagagatgccagctgtgcttgttttcaaagatgaaacttactttgtttatgatgagtatgaagatggtgatctgtcatcatggatcaacagggaaaggtttcagaattaccttgctatggatggcttcctcttgtatgaacttggagacacaggaaagcttgtggctcttgcagttattgatgagaaaaatacatcagttgaacataccagattgaagtcaattattcaggaagttgcaagagattacagagacctcttccatagggattttcagtttggccacatggatggaaatgactacataaataccttgctgatggatgaattgacagtcccaactgtagttgtactgaatacttcaaaccagcaatatttcttgctagatagacagattaagaatgttgaagacatggtccagtttattaataacattttggatggcacagtagaagcccaaggaggtgatagcattttgcagagattgaaaagaatagtatttgatgccaaatctactattgtgtctatattcaagagctcaccactgatgggctgctttctctttggcctgccactgggtgtcatcagtatcatgtgctatggaatctacacagccgacacagatggaggttatatagaagaacgatatgaagtgtctaaaagtgaaaatgaaaaccaagaacagatagaagagagcaaagaacagcaggagcccagcagtggaggatctgtagtgcctacagtgcaggagcccaaggatgtattagaaaagaagaaagattgagacttgatgactataaaatatttgttaggacttcaaattattaaagagtctatttattgaatttagacatttaatcatgatctttacagaaaagaacatgttattcgtattttgctaatatcaactgcatggattaaagtagtccctccatacatggggaagtgtttggagcaaagagatgaacagtttgtctgaaacaaacacagagcactccatcaaaatttacctgatctttgtgattagaacagaacaattctatttgcatgtttctctatctgaatattctgtgacaaaaagttaagattcttgggcagaatatttaaattggtcagtcaggtagaagatacatgtgtgatatagaaaaataatgcctctcctgctgccatccgtttccctcatatattttggacaagatttatatggacaaaattaagtctttaaaatttaggcactttaaggagaactaataactttttccatgtatcaagattatgaggttaaaaataatgtggttttatatagcatagtggttttattttgttagttatttttaaaggagaagaaatgttactttttaactttatactcagttgcattatcataaaattttcatatatgcctagataatggggaaaaaaagtcttgtgattgactttcgcaaaataaacaggatttactgagtagaggtttcagcccattccttggaatactaacaggtatttcatcagtcattgtaggttgggaagggtctctgttaatcctactctgctttagccagaatagcctagtattttatttctattttatatattgagatttcttctaacatttcctttgataaaaatcttctgctttttgaaaagtggtatgtatcatatttttatgtttctggtgtgtgaactttatggtaacttctactctagaatacgtacgtatgcacccacagacacacacagtttattgacacatctattatgtaatgctgtagacctgtccgtgtctgcttcataaggagtaacgactgacattagcatgtccagtgacaagtcacatccggtgtaaaaaaaagagatcagccagttaccttctccattgtcttagttctgtcacccatttcgtcaagtgacctctcatcttctataaactaatacaggaattctttccaaagcaatgtctaaaaactctttttttaaaagtaacagtttggtatgtttattgtagataaattatttttgaggccttcattttagctaagtttagaatttatattaggcaactatgatttgagtggttattcattgagtaattttccactataaagaattttattgaacatttattaaaaaataatgtaatgcatggtcaaaaaatatgtaattcatggtctggacactgacgttgtttagggatttagtcatcaaggacagccctctgttgtttctaatgccgtactaatcaagactgtatggacacttgcatcttaagtactaaggaattactagtgattgttttattttatccatgtactcttttagtatttaataattaaatacctattcttagtgtttgacactccatatttcttttttttggaaatgaaacaaatatgcagtccaaaattcaggaactactagagtgaaatgatattaagtggaaaccagagataaatgctgttaatttaacaagtagattcttctccaaagaatgatgagtgattcttgggaagataaatgttaatgttcccaatagtcaagcttgttttgcagtagtgaaaagcttagatgagtacggatacctcatttgaaactcagcctagtaaggaagtgaaaacttagcagtcagtgacatggggaaatagttatagaaaatgtcactgaattttttcatatttataattagtcatttacatatttttgtcttgttgatcattacctgtaaatgaaagaccttaataggaaaaaaagagtaaagctcagtgtgaatgcaaacatccacaaaatatgatcttcgtttatattctgtgatgttgtttataaatgaatgcctcagttctctgctacccttttcacagctttgtactgtttgccttatattctatttgtgcttttaaagtgtgtctgttgggaaaacaaaatgtgtaggtggtttgtaagtgaataatttttatttcttcttgtattaaaattttgtttttttctctactttgggagatgtttatttacattgtcagactattcacaaaacagattctaaaatttgtttgctcgtatgctgttcccttcaatgtgatatcagagattactatgaatgttagtttcattccgtgaaacattacttccatataaagacagatctcttaataagtgaatctagtggaagaacataggtatcattctaattccatggtaaattttgtcatgattctatatgaataatggggtccttcaggaagttggaatttttgccttctcttttaattgcagtgaagttctctttataacttctaaaattcggaattctagatccttgcttttgcagaatttggtgctcagacaatatttaaggacatttcagcgagacaaagtgcatgtttttatcgagtaccctgtgcaccacattatatctggcaattctttttgtttcattatgtgcatcaatatttttctcagctactattacctgaaacttgtttaacatgtattagacctagaattttcattttctttctcacatagttgcttcctggtatctgatttagaaataacatttaaatgccaagtatctgggggattgaaggaagggtctatatgagcaggtgaattagcagtactgtttttgtttagtggatattgttagtgactttttgtgtgtgttttgctttgggacctttttattttggtgttgcaaaaagtaacatattttcatcattgcttcatacgacatggagttaggacagggaaaaatcattcaacactccttatgcattaaatgatcaaataaaccagtgtaggatattaagactatcaattggtgggattaggcttgacattttatttttataaatatatattttttctgaatgtgtctgagtccaagagtgggcaaaaaataattttctactttggactaatctatagaggtttttgaaagtctgcattactaacttgttgaattcatgatattctgcctatggcacaaattgtaaacctttgtttttctaaaataaagtaattgaaaacctgcaaaaaaaaaata

SEQ ID NO: 434006 - DNA, 5272 bp, Homo sapiens
agccccgcccccgtagttagcgcggtgcttctcttccgctccgggtcggctccgtttccctttccgggcgggcaggcggcggaccccagtgtctttatccctcttttgcacagtcagcttctgcagctctcccgggctagcatggcagcgtggaagagttggacggccctgcggctctgcgccacagttgttgtacttgatatggtcgtctgtaaaggatttgtagaagatttagatgaatcgtttaaagaaaatcgaaatgatgacatttggcttgtagatttttatgcgccatggtgtggccattgtaaaaagctggaaccaatttggaatgaagttggtcttgagatgaaaagcattggttctccagttaaggttggaaagatggatgctacttcctattctagcattgcttcagagtttggagttcgaggttatccaacaattaagctattaaaaggggacttggcatataattatagaggaccacgaacaaaagatgatattattgagtttgctcacagagtatctggggctctaattcggccacttccaagtcaacaaatgtttgaacatatgcagaagagacaccgtgtatttttcgtttatgtaggtggagaatcacctttgaaagagaaatacatagatgctgcttcagaattgattgtatatacatacttcttttctgcctcagaagaagtggttcctgagtatgtgacactaaaagagatgccagctgtgcttgttttcaaagatgaaacttactttgtttatgatgcttttattttagattcagagtctacatgtgcaggttgttacatgggtgtatggatgatgctgaggttggggtacaaatgatcccgtcacccaggtaataagcatagtacccaacaggtagtttttttagcccttgtcctcctccccatctccctagtgtctgttattcccatctttatgtccgtatgtacccaatgtttaccgccacttataaatgagaacttgcgatatttgggatagtttattttcgaatgaaattcaaattgatcactgtatgcaatctcgtagaaaatttgcttttagcatgcagtggacattgtggcccagtaatcaatttctagttttatgtttattttcctaatttataaatttaaatcaataaattctttgagatttgcattgcatcacttattttatgggtttgataacttgaaaatgttttgtttagcaatgcaagaaaaagcatacctttgaagaggtcattaaaatccattcttcaaccagatgtattgagtatgaagatggtgatctgtcatcatggatcaacagggaaaggtttcagaattaccttgctatggatggcttcctcttgtatgaacttggagacacaggaaagcttgtggctcttgcagttattgatgagaaaaatacatcagttgaacataccagattgaagtcaattattcaggaagttgcaagagattacagagacctcttccatagggattttcagtttggccacatggatggaaatgactacataaataccttgctgatggatgaattgacagtcccaactgtagttgtactgaatacttcaaaccagcaatatttcttgctagatagacagattaagaatgttgaagacatggtccagtttattaataacattttggatggcacagtagaagcccaaggaggtgatagcattttgcagagattgaaaagaatagtatttgatgccaaatctactattgtgtctatattcaagagctcaccactgatgggctgctttctctttggcctgccactgggtgtcatcagtatcatgtgctatggaatctacacagccgacacagatggaggttatatagaagaacgatatgaagtgtctaaaagtgaaaatgaaaaccaagaacagatagaagagagcaaagaacagcaggagcccagcagtggaggatctgtagtgcctacagtgcaggagcccaaggatgtattagaaaagaagaaagattgagacttgatgactataaaatatttgttaggacttcaaattattaaagagtctatttattgaatttagacatttaatcatgatctttacagaaaagaacatgttattcgtattttgctaatatcaactgcatggattaaagtagtccctccatacatggggaagtgtttggagcaaagagatgaacagtttgtctgaaacaaacacagagcactccatcaaaatttacctgatctttgtgattagaacagaacaattctatttgcatgtttctctatctgaatattctgtgacaaaaagttaagattcttgggcagaatatttaaattggtcagtcaggtagaagatacatgtgtgatatagaaaaataatgcctctcctgctgccatccgtttccctcatatattttggacaagatttatatggacaaaattaagtctttaaaatttaggcactttaaggagaactaataactttttccatgtatcaagattatgaggttaaaaataatgtggttttatatagcatagtggttttattttgttagttatttttaaaggagaagaaatgttactttttaactttatactcagttgcattatcataaaattttcatatatgcctagataatggggaaaaaaagtcttgtgattgactttcgcaaaataaacaggatttactgagtagaggtttcagcccattccttggaatactaacaggtatttcatcagtcattgtaggttgggaagggtctctgttaatcctactctgctttagccagaatagcctagtattttatttctattttatatattgagatttcttctaacatttcctttgataaaaatcttctgctttttgaaaagtggtatgtatcatatttttatgtttctggtgtgtgaactttatggtaacttctactctagaatacgtacgtatgcacccacagacacacacagtttattgacacatctattatgtaatgctgtagacctgtccgtgtctgcttcataaggagtaacgactgacattagcatgtccagtgacaagtcacatccggtgtaaaaaaaagagatcagccagttaccttctccattgtcttagttctgtcacccatttcgtcaagtgacctctcatcttctataaactaatacaggaattctttccaaagcaatgtctaaaaactctttttttaaaagtaacagtttggtatgtttattgtagataaattatttttgaggccttcattttagctaagtttagaatttatattaggcaactatgatttgagtggttattcattgagtaattttccactataaagaattttattgaacatttattaaaaaataatgtaatgcatggtcaaaaaatatgtaattcatggtctggacactgacgttgtttagggatttagtcatcaaggacagccctctgttgtttctaatgccgtactaatcaagactgtatggacacttgcatcttaagtactaaggaattactagtgattgttttattttatccatgtactcttttagtatttaataattaaatacctattcttagtgtttgacactccatatttcttttttttggaaatgaaacaaatatgcagtccaaaattcaggaactactagagtgaaatgatattaagtggaaaccagagataaatgctgttaatttaacaagtagattcttctccaaagaatgatgagtgattcttgggaagataaatgttaatgttcccaatagtcaagcttgttttgcagtagtgaaaagcttagatgagtacggatacctcatttgaaactcagcctagtaaggaagtgaaaacttagcagtcagtgacatggggaaatagttatagaaaatgtcactgaattttttcatatttataattagtcatttacatatttttgtcttgttgatcattacctgtaaatgaaagaccttaataggaaaaaaagagtaaagctcagtgtgaatgcaaacatccacaaaatatgatcttcgtttatattctgtgatgttgtttataaatgaatgcctcagttctctgctacccttttcacagctttgtactgtttgccttatattctatttgtgcttttaaagtgtgtctgttgggaaaacaaaatgtgtaggtggtttgtaagtgaataatttttatttcttcttgtattaaaattttgtttttttctctactttgggagatgtttatttacattgtcagactattcacaaaacagattctaaaatttgtttgctcgtatgctgttcccttcaatgtgatatcagagattactatgaatgttagtttcattccgtgaaacattacttccatataaagacagatctcttaataagtgaatctagtggaagaacataggtatcattctaattccatggtaaattttgtcatgattctatatgaataatggggtccttcaggaagttggaatttttgccttctcttttaattgcagtgaagttctctttataacttctaaaattcggaattctagatccttgcttttgcagaatttggtgctcagacaatatttaaggacatttcagcgagacaaagtgcatgtttttatcgagtaccctgtgcaccacattatatctggcaattctttttgtttcattatgtgcatcaatatttttctcagctactattacctgaaacttgtttaacatgtattagacctagaattttcattttctttctcacatagttgcttcctggtatctgatttagaaataacatttaaatgccaagtatctgggggattgaaggaagggtctatatgagcaggtgaattagcagtactgtttttgtttagtggatattgttagtgactttttgtgtgtgttttgctttgggacctttttattttggtgttgcaaaaagtaacatattttcatcattgcttcatacgacatggagttaggacagggaaaaatcattcaacactccttatgcattaaatgatcaaataaaccagtgtaggatattaagactatcaattggtgggattaggcttgacattttatttttataaatatatattttttctgaatgtgtctgagtccaagagtgggcaaaaaataattttctactttggactaatctatagaggtttttgaaagtctgcattactaacttgttgaattcatgatattctgcctatggcacaaattgtaaacctttgtttttctaaaataaagtaattgaaaacctgcaaaaaaaaaata

SEQ ID NO: 434007 - DNA, 5284 bp, Homo sapiens
agccccgcccccgtagttagcgcggtgcttctcttccgctccgggtcggctccgtttccctttccgggcgggcaggcggcggaccccagtgtctttatccctcttttgcacagtcagcttctgcagctctcccgggctagcatggcagcgtggaagagttggacggccctgcggctctgcgccacagttgttgtacttgatatggtcgtctgtaaaggatttgtagaagatttagatgaatcgtttaaagaaaatcgaaatgatgacatttggcttgtagatttttatgcgccatggtgtggccattgtaaaaagctggaaccaatttggaatgaagttggtcttgagatgaaaagcattggttctccagttaaggttggaaagatggatgctacttcctattctagcattgcttcagagtttggagttcgaggttatccaacaattaagcttagattccctggaggattgaagattggggtttggccattcttcataggtgaaattaaaaggggacttggcatataattatagaggaccacgaaggctctaattcggccacttccaagtcaacaaatgtttgaacatatgcagaagagacaccgtgtatttttcgtttatgtaggtggagaatcacctttgaaagagaaatacatagatgctgcttcagaattgattgtatatacatacttcttttctgcctcagaagaagtggttcctgagtatgtgacactaaaagagatgccagctgtgcttgttttcaaagatgaaacttactttgtttatgatgcttttattttagattcagagtctacatgtgcaggttgttacatgggtgtatggatgatgctgaggttggggtacaaatgatcccgtcacccaggtaataagcatagtacccaacaggtagtttttttagcccttgtcctcctccccatctccctagtgtctgttattcccatctttatgtccgtatgtacccaatgtttaccgccacttataaatgagaacttgcgatatttgggatagtttattttcgaatgaaattcaaattgatcactgtatgcaatctcgtagaaaatttgcttttagcatgcagtggacattgtggcccagtaatcaatttctagttttatgtttattttcctaatttataaatttaaatcaataaattctttgagatttgcattgcatcacttattttatgggtttgataacttgaaaatgttttgtttagcaatgcaagaaaaagcatacctttgaagaggtcattaaaatccattcttcaaccagatgtattgagtatgaagatggtgatctgtcatcatggatcaacagggaaaggtttcagaattaccttgctatggatggcttcctcttgtatgaacttggagacacaggaaagcttgtggctcttgcagttattgatgagaaaaatacatcagttgaacataccagattgaagtcaattattcaggaagttgcaagagattacagagacctcttccatagggattttcagtttggccacatggatggaaatgactacataaataccttgctgatggatgaattgacagtcccaactgtagttgtactgaatacttcaaaccagcaatatttcttgctagatagacagattaagaatgttgaagacatggtccagtttattaataacattttggatggcacagtagaagcccaaggaggtgatagcattttgcagagattgaaaagaatagtatttgatgccaaatctactattgtgtctatattcaagagctcaccactgatgggctgctttctctttggcctgccactgggtgtcatcagtatcatgtgctatggaatctacacagccgacacagatggaggttatatagaagaacgatatgaagtgtctaaaagtgaaaatgaaaaccaagaacagatagaagagagcaaagaacagcaggagcccagcagtggaggatctgtagtgcctacagtgcaggagcccaaggatgtattagaaaagaagaaagattgagacttgatgactataaaatatttgttaggacttcaaattattaaagagtctatttattgaatttagacatttaatcatgatctttacagaaaagaacatgttattcgtattttgctaatatcaactgcatggattaaagtagtccctccatacatggggaagtgtttggagcaaagagatgaacagtttgtctgaaacaaacacagagcactccatcaaaatttacctgatctttgtgattagaacagaacaattctatttgcatgtttctctatctgaatattctgtgacaaaaagttaagattcttgggcagaatatttaaattggtcagtcaggtagaagatacatgtgtgatatagaaaaataatgcctctcctgctgccatccgtttccctcatatattttggacaagatttatatggacaaaattaagtctttaaaatttaggcactttaaggagaactaataactttttccatgtatcaagattatgaggttaaaaataatgtggttttatatagcatagtggttttattttgttagttatttttaaaggagaagaaatgttactttttaactttatactcagttgcattatcataaaattttcatatatgcctagataatggggaaaaaaagtcttgtgattgactttcgcaaaataaacaggatttactgagtagaggtttcagcccattccttggaatactaacaggtatttcatcagtcattgtaggttgggaagggtctctgttaatcctactctgctttagccagaatagcctagtattttatttctattttatatattgagatttcttctaacatttcctttgataaaaatcttctgctttttgaaaagtggtatgtatcatatttttatgtttctggtgtgtgaactttatggtaacttctactctagaatacgtacgtatgcacccacagacacacacagtttattgacacatctattatgtaatgctgtagacctgtccgtgtctgcttcataaggagtaacgactgacattagcatgtccagtgacaagtcacatccggtgtaaaaaaaagagatcagccagttaccttctccattgtcttagttctgtcacccatttcgtcaagtgacctctcatcttctataaactaatacaggaattctttccaaagcaatgtctaaaaactctttttttaaaagtaacagtttggtatgtttattgtagataaattatttttgaggccttcattttagctaagtttagaatttatattaggcaactatgatttgagtggttattcattgagtaattttccactataaagaattttattgaacatttattaaaaaataatgtaatgcatggtcaaaaaatatgtaattcatggtctggacactgacgttgtttagggatttagtcatcaaggacagccctctgttgtttctaatgccgtactaatcaagactgtatggacacttgcatcttaagtactaaggaattactagtgattgttttattttatccatgtactcttttagtatttaataattaaatacctattcttagtgtttgacactccatatttcttttttttggaaatgaaacaaatatgcagtccaaaattcaggaactactagagtgaaatgatattaagtggaaaccagagataaatgctgttaatttaacaagtagattcttctccaaagaatgatgagtgattcttgggaagataaatgttaatgttcccaatagtcaagcttgttttgcagtagtgaaaagcttagatgagtacggatacctcatttgaaactcagcctagtaaggaagtgaaaacttagcagtcagtgacatggggaaatagttatagaaaatgtcactgaattttttcatatttataattagtcatttacatatttttgtcttgttgatcattacctgtaaatgaaagaccttaataggaaaaaaagagtaaagctcagtgtgaatgcaaacatccacaaaatatgatcttcgtttatattctgtgatgttgtttataaatgaatgcctcagttctctgctacccttttcacagctttgtactgtttgccttatattctatttgtgcttttaaagtgtgtctgttgggaaaacaaaatgtgtaggtggtttgtaagtgaataatttttatttcttcttgtattaaaattttgtttttttctctactttgggagatgtttatttacattgtcagactattcacaaaacagattctaaaatttgtttgctcgtatgctgttcccttcaatgtgatatcagagattactatgaatgttagtttcattccgtgaaacattacttccatataaagacagatctcttaataagtgaatctagtggaagaacataggtatcattctaattccatggtaaattttgtcatgattctatatgaataatggggtccttcaggaagttggaatttttgccttctcttttaattgcagtgaagttctctttataacttctaaaattcggaattctagatccttgcttttgcagaatttggtgctcagacaatatttaaggacatttcagcgagacaaagtgcatgtttttatcgagtaccctgtgcaccacattatatctggcaattctttttgtttcattatgtgcatcaatatttttctcagctactattacctgaaacttgtttaacatgtattagacctagaattttcattttctttctcacatagttgcttcctggtatctgatttagaaataacatttaaatgccaagtatctgggggattgaaggaagggtctatatgagcaggtgaattagcagtactgtttttgtttagtggatattgttagtgactttttgtgtgtgttttgctttgggacctttttattttggtgttgcaaaaagtaacatattttcatcattgcttcatacgacatggagttaggacagggaaaaatcattcaacactccttatgcattaaatgatcaaataaaccagtgtaggatattaagactatcaattggtgggattaggcttgacattttatttttataaatatatattttttctgaatgtgtctgagtccaagagtgggcaaaaaataattttctactttggactaatctatagaggtttttgaaagtctgcattactaacttgttgaattcatgatattctgcctatggcacaaattgtaaacctttgtttttctaaaataaagtaattgaaaacctgcaaaaaaaaaata

SEQ ID NO: 434008 - DNA, 5324 bp, Homo sapiens
agccccgcccccgtagttagcgcggtgcttctcttccgctccgggtcggctccgtttccctttccgggcgggcaggcggcggaccccagtgtctttatccctcttttgcacagtcagcttctgcagctctcccgggctagcatggcagcgtggaagagttggacggccctgcggctctgcgccacagttgttgtacttgatatggtcgtctgtaaaggatttgtagaagatttagatgaatcgtttaaagaaaatcgaaatgatgacatttggcttgtagatttttatgcgccatggtgtggccattgtaaaaagctggaaccaatttggaatgaagttggtcttgagatgaaaagcattggttctccagttaaggttggaaagatggatgctacttcctattctagcattgcttcagagtttggagttcgaggttatccaacaattaagcttagattccctggaggattgaagattggggtttggccattcttcataggtgaaattaaaaggggacttggcatataattatagaggaccacgaacaaaagatgatattattgagtttgctcacagagtatctggggctctaattcggccacttccaagtcaacaaatgtttgaacatatgcagaagagacaccgtgtatttttcgtttatgtaggtggagaatcacctttgaaagagaaatacatagatgctgcttcagaattgattgtatatacatacttcttttctgcctcagaagaagtggttcctgagtatgtgacactaaaagagatgccagctgtgcttgttttcaaagatgaaacttactttgtttatgatgcttttattttagattcagagtctacatgtgcaggttgttacatgggtgtatggatgatgctgaggttggggtacaaatgatcccgtcacccaggtaataagcatagtacccaacaggtagtttttttagcccttgtcctcctccccatctccctagtgtctgttattcccatctttatgtccgtatgtacccaatgtttaccgccacttataaatgagaacttgcgatatttgggatagtttattttcgaatgaaattcaaattgatcactgtatgcaatctcgtagaaaatttgcttttagcatgcagtggacattgtggcccagtaatcaatttctagttttatgtttattttcctaatttataaatttaaatcaataaattctttgagatttgcattgcatcacttattttatgggtttgataacttgaaaatgttttgtttagcaatgcaagaaaaagcatacctttgaagaggtcattaaaatccattcttcaaccagatgtattgagtatgaagatggtgatctgtcatcatggatcaacagggaaaggtttcagaattaccttgctatggatggcttcctcttgtatgaacttggagacacaggaaagcttgtggctcttgcagttattgatgagaaaaatacatcagttgaacataccagattgaagtcaattattcaggaagttgcaagagattacagagacctcttccatagggattttcagtttggccacatggatggaaatgactacataaataccttgctgatggatgaattgacagtcccaactgtagttgtactgaatacttcaaaccagcaatatttcttgctagatagacagattaagaatgttgaagacatggtccagtttattaataacattttggatggcacagtagaagcccaaggaggtgatagcattttgcagagattgaaaagaatagtatttgatgccaaatctactattgtgtctatattcaagagctcaccactgatgggctgctttctctttggcctgccactgggtgtcatcagtatcatgtgctatggaatctacacagccgacacagatggaggttatatagaagaacgatatgaagtgtctaaaagtgaaaatgaaaaccaagaacagatagaagagagcaaagaacagcaggagcccagcagtggaggatctgtagtgcctacagtgcaggagcccaaggatgtattagaaaagaagaaagattgagacttgatgactataaaatatttgttaggacttcaaattattaaagagtctatttattgaatttagacatttaatcatgatctttacagaaaagaacatgttattcgtattttgctaatatcaactgcatggattaaagtagtccctccatacatggggaagtgtttggagcaaagagatgaacagtttgtctgaaacaaacacagagcactccatcaaaatttacctgatctttgtgattagaacagaacaattctatttgcatgtttctctatctgaatattctgtgacaaaaagttaagattcttgggcagaatatttaaattggtcagtcaggtagaagatacatgtgtgatatagaaaaataatgcctctcctgctgccatccgtttccctcatatattttggacaagatttatatggacaaaattaagtctttaaaatttaggcactttaaggagaactaataactttttccatgtatcaagattatgaggttaaaaataatgtggttttatatagcatagtggttttattttgttagttatttttaaaggagaagaaatgttactttttaactttatactcagttgcattatcataaaattttcatatatgcctagataatggggaaaaaaagtcttgtgattgactttcgcaaaataaacaggatttactgagtagaggtttcagcccattccttggaatactaacaggtatttcatcagtcattgtaggttgggaagggtctctgttaatcctactctgctttagccagaatagcctagtattttatttctattttatatattgagatttcttctaacatttcctttgataaaaatcttctgctttttgaaaagtggtatgtatcatatttttatgtttctggtgtgtgaactttatggtaacttctactctagaatacgtacgtatgcacccacagacacacacagtttattgacacatctattatgtaatgctgtagacctgtccgtgtctgcttcataaggagtaacgactgacattagcatgtccagtgacaagtcacatccggtgtaaaaaaaagagatcagccagttaccttctccattgtcttagttctgtcacccatttcgtcaagtgacctctcatcttctataaactaatacaggaattctttccaaagcaatgtctaaaaactctttttttaaaagtaacagtttggtatgtttattgtagataaattatttttgaggccttcattttagctaagtttagaatttatattaggcaactatgatttgagtggttattcattgagtaattttccactataaagaattttattgaacatttattaaaaaataatgtaatgcatggtcaaaaaatatgtaattcatggtctggacactgacgttgtttagggatttagtcatcaaggacagccctctgttgtttctaatgccgtactaatcaagactgtatggacacttgcatcttaagtactaaggaattactagtgattgttttattttatccatgtactcttttagtatttaataattaaatacctattcttagtgtttgacactccatatttcttttttttggaaatgaaacaaatatgcagtccaaaattcaggaactactagagtgaaatgatattaagtggaaaccagagataaatgctgttaatttaacaagtagattcttctccaaagaatgatgagtgattcttgggaagataaatgttaatgttcccaatagtcaagcttgttttgcagtagtgaaaagcttagatgagtacggatacctcatttgaaactcagcctagtaaggaagtgaaaacttagcagtcagtgacatggggaaatagttatagaaaatgtcactgaattttttcatatttataattagtcatttacatatttttgtcttgttgatcattacctgtaaatgaaagaccttaataggaaaaaaagagtaaagctcagtgtgaatgcaaacatccacaaaatatgatcttcgtttatattctgtgatgttgtttataaatgaatgcctcagttctctgctacccttttcacagctttgtactgtttgccttatattctatttgtgcttttaaagtgtgtctgttgggaaaacaaaatgtgtaggtggtttgtaagtgaataatttttatttcttcttgtattaaaattttgtttttttctctactttgggagatgtttatttacattgtcagactattcacaaaacagattctaaaatttgtttgctcgtatgctgttcccttcaatgtgatatcagagattactatgaatgttagtttcattccgtgaaacattacttccatataaagacagatctcttaataagtgaatctagtggaagaacataggtatcattctaattccatggtaaattttgtcatgattctatatgaataatggggtccttcaggaagttggaatttttgccttctcttttaattgcagtgaagttctctttataacttctaaaattcggaattctagatccttgcttttgcagaatttggtgctcagacaatatttaaggacatttcagcgagacaaagtgcatgtttttatcgagtaccctgtgcaccacattatatctggcaattctttttgtttcattatgtgcatcaatatttttctcagctactattacctgaaacttgtttaacatgtattagacctagaattttcattttctttctcacatagttgcttcctggtatctgatttagaaataacatttaaatgccaagtatctgggggattgaaggaagggtctatatgagcaggtgaattagcagtactgtttttgtttagtggatattgttagtgactttttgtgtgtgttttgctttgggacctttttattttggtgttgcaaaaagtaacatattttcatcattgcttcatacgacatggagttaggacagggaaaaatcattcaacactccttatgcattaaatgatcaaataaaccagtgtaggatattaagactatcaattggtgggattaggcttgacattttatttttataaatatatattttttctgaatgtgtctgagtccaagagtgggcaaaaaataattttctactttggactaatctatagaggtttttgaaagtctgcattactaacttgttgaattcatgatattctgcctatggcacaaattgtaaacctttgtttttctaaaataaagtaattgaaaacctgcaaaaaaaaaata

SEQ ID NO: 434009 - DNA, 5226 bp, Homo sapiens
agccccgcccccgtagttagcgcggtgcttctcttccgctccgggtcggctccgtttccctttccgggcgggcaggcggcggaccccagtgtctttatccctcttttgcacagtcagcttctgcagctctcccgggctagcatggcagcgtggaagagttggacggccctgcggctctgcgccacagttgttgtacttgatatggtcgtctgtaaaggatttgtagaagatttagatgaatcgtttaaagaaaatcgaaatgatgacatttggcttgtagatttttatgcgccatggtgtggccattgtaaaaagctggaaccaatttggaatgaagttggtcttgagatgaaaagcattggttctccagttaaggttggaaagatggatgctacttcctattctaattaaaaggggacttggcatataattatagaggaccacgaacaaaagatgatattattgagtttgctcacagagtatctggggctctaattcggccacttccaagtcaacaaatgtttgaacatatgcagaagagacaccgtgtatttttcgtttatgtaggtggagaatcacctttgaaagagaaatacatagatgctgcttcagaattgattgtatatacatacttcttttctgcctcagaagaagtggttcctgagtatgtgacactaaaagagatgccagctgtgcttgttttcaaagatgaaacttactttgtttatgatgcttttattttagattcagagtctacatgtgcaggttgttacatgggtgtatggatgatgctgaggttggggtacaaatgatcccgtcacccaggtaataagcatagtacccaacaggtagtttttttagcccttgtcctcctccccatctccctagtgtctgttattcccatctttatgtccgtatgtacccaatgtttaccgccacttataaatgagaacttgcgatatttgggatagtttattttcgaatgaaattcaaattgatcactgtatgcaatctcgtagaaaatttgcttttagcatgcagtggacattgtggcccagtaatcaatttctagttttatgtttattttcctaatttataaatttaaatcaataaattctttgagatttgcattgcatcacttattttatgggtttgataacttgaaaatgttttgtttagcaatgcaagaaaaagcatacctttgaagaggtcattaaaatccattcttcaaccagatgtattgagtatgaagatggtgatctgtcatcatggatcaacagggaaaggtttcagaattaccttgctatggatggcttcctcttgtatgaacttggagacacaggaaagcttgtggctcttgcagttattgatgagaaaaatacatcagttgaacataccagattgaagtcaattattcaggaagttgcaagagattacagagacctcttccatagggattttcagtttggccacatggatggaaatgactacataaataccttgctgatggatgaattgacagtcccaactgtagttgtactgaatacttcaaaccagcaatatttcttgctagatagacagattaagaatgttgaagacatggtccagtttattaataacattttggatggcacagtagaagcccaaggaggtgatagcattttgcagagattgaaaagaatagtatttgatgccaaatctactattgtgtctatattcaagagctcaccactgatgggctgctttctctttggcctgccactgggtgtcatcagtatcatgtgctatggaatctacacagccgacacagatggaggttatatagaagaacgatatgaagtgtctaaaagtgaaaatgaaaaccaagaacagatagaagagagcaaagaacagcaggagcccagcagtggaggatctgtagtgcctacagtgcaggagcccaaggatgtattagaaaagaagaaagattgagacttgatgactataaaatatttgttaggacttcaaattattaaagagtctatttattgaatttagacatttaatcatgatctttacagaaaagaacatgttattcgtattttgctaatatcaactgcatggattaaagtagtccctccatacatggggaagtgtttggagcaaagagatgaacagtttgtctgaaacaaacacagagcactccatcaaaatttacctgatctttgtgattagaacagaacaattctatttgcatgtttctctatctgaatattctgtgacaaaaagttaagattcttgggcagaatatttaaattggtcagtcaggtagaagatacatgtgtgatatagaaaaataatgcctctcctgctgccatccgtttccctcatatattttggacaagatttatatggacaaaattaagtctttaaaatttaggcactttaaggagaactaataactttttccatgtatcaagattatgaggttaaaaataatgtggttttatatagcatagtggttttattttgttagttatttttaaaggagaagaaatgttactttttaactttatactcagttgcattatcataaaattttcatatatgcctagataatggggaaaaaaagtcttgtgattgactttcgcaaaataaacaggatttactgagtagaggtttcagcccattccttggaatactaacaggtatttcatcagtcattgtaggttgggaagggtctctgttaatcctactctgctttagccagaatagcctagtattttatttctattttatatattgagatttcttctaacatttcctttgataaaaatcttctgctttttgaaaagtggtatgtatcatatttttatgtttctggtgtgtgaactttatggtaacttctactctagaatacgtacgtatgcacccacagacacacacagtttattgacacatctattatgtaatgctgtagacctgtccgtgtctgcttcataaggagtaacgactgacattagcatgtccagtgacaagtcacatccggtgtaaaaaaaagagatcagccagttaccttctccattgtcttagttctgtcacccatttcgtcaagtgacctctcatcttctataaactaatacaggaattctttccaaagcaatgtctaaaaactctttttttaaaagtaacagtttggtatgtttattgtagataaattatttttgaggccttcattttagctaagtttagaatttatattaggcaactatgatttgagtggttattcattgagtaattttccactataaagaattttattgaacatttattaaaaaataatgtaatgcatggtcaaaaaatatgtaattcatggtctggacactgacgttgtttagggatttagtcatcaaggacagccctctgttgtttctaatgccgtactaatcaagactgtatggacacttgcatcttaagtactaaggaattactagtgattgttttattttatccatgtactcttttagtatttaataattaaatacctattcttagtgtttgacactccatatttcttttttttggaaatgaaacaaatatgcagtccaaaattcaggaactactagagtgaaatgatattaagtggaaaccagagataaatgctgttaatttaacaagtagattcttctccaaagaatgatgagtgattcttgggaagataaatgttaatgttcccaatagtcaagcttgttttgcagtagtgaaaagcttagatgagtacggatacctcatttgaaactcagcctagtaaggaagtgaaaacttagcagtcagtgacatggggaaatagttatagaaaatgtcactgaattttttcatatttataattagtcatttacatatttttgtcttgttgatcattacctgtaaatgaaagaccttaataggaaaaaaagagtaaagctcagtgtgaatgcaaacatccacaaaatatgatcttcgtttatattctgtgatgttgtttataaatgaatgcctcagttctctgctacccttttcacagctttgtactgtttgccttatattctatttgtgcttttaaagtgtgtctgttgggaaaacaaaatgtgtaggtggtttgtaagtgaataatttttatttcttcttgtattaaaattttgtttttttctctactttgggagatgtttatttacattgtcagactattcacaaaacagattctaaaatttgtttgctcgtatgctgttcccttcaatgtgatatcagagattactatgaatgttagtttcattccgtgaaacattacttccatataaagacagatctcttaataagtgaatctagtggaagaacataggtatcattctaattccatggtaaattttgtcatgattctatatgaataatggggtccttcaggaagttggaatttttgccttctcttttaattgcagtgaagttctctttataacttctaaaattcggaattctagatccttgcttttgcagaatttggtgctcagacaatatttaaggacatttcagcgagacaaagtgcatgtttttatcgagtaccctgtgcaccacattatatctggcaattctttttgtttcattatgtgcatcaatatttttctcagctactattacctgaaacttgtttaacatgtattagacctagaattttcattttctttctcacatagttgcttcctggtatctgatttagaaataacatttaaatgccaagtatctgggggattgaaggaagggtctatatgagcaggtgaattagcagtactgtttttgtttagtggatattgttagtgactttttgtgtgtgttttgctttgggacctttttattttggtgttgcaaaaagtaacatattttcatcattgcttcatacgacatggagttaggacagggaaaaatcattcaacactccttatgcattaaatgatcaaataaaccagtgtaggatattaagactatcaattggtgggattaggcttgacattttatttttataaatatatattttttctgaatgtgtctgagtccaagagtgggcaaaaaataattttctactttggactaatctatagaggtttttgaaagtctgcattactaacttgttgaattcatgatattctgcctatggcacaaattgtaaacctttgtttttctaaaataaagtaattgaaaacctgcaaaaaaaaaata

SEQ ID NO: 434010 - DNA, 5270 bp, Homo sapiens
agccccgcccccgtagttagcgcggtgcttctcttccgctccgggtcggctccgtttccctttccgggcgggcaggcggcggaccccagtgtctttatccctcttttgcacagtcagcttctgcagctctcccgggctagcatggcagcgtggaagagttggacggccctgcggctctgcgccacagttgttgtacttgatatggtcgtctgtaaaggatttgtagaagatttagatgaatcgtttaaagaaaatcgaaatgatgacatttggcttgtagatttttatgcgccatggtgtggccattgtaaaaagctggaaccaatttggaatgaagttggtcttgagatgagcattgcttcagagtttggagttcgaggttatccaacaattaagcttagattccctggaggattgaagattggggtttggccattcttcataggtgaaattaaaaggggacttggcatataattatagaggaccacgaacaaaagatgatattattgagtttgctcacagagtatctggggctctaattcggccacttccaagtcaacaaatgtttgaacatatgcagaagagacaccgtgtatttttcgtttatgtaggtggagaatcacctttgaaagagaaatacatagatgctgcttcagaattgattgtatatacatacttcttttctgcctcagaagaagtggttcctgagtatgtgacactaaaagagatgccagctgtgcttgttttcaaagatgaaacttactttgtttatgatgcttttattttagattcagagtctacatgtgcaggttgttacatgggtgtatggatgatgctgaggttggggtacaaatgatcccgtcacccaggtaataagcatagtacccaacaggtagtttttttagcccttgtcctcctccccatctccctagtgtctgttattcccatctttatgtccgtatgtacccaatgtttaccgccacttataaatgagaacttgcgatatttgggatagtttattttcgaatgaaattcaaattgatcactgtatgcaatctcgtagaaaatttgcttttagcatgcagtggacattgtggcccagtaatcaatttctagttttatgtttattttcctaatttataaatttaaatcaataaattctttgagatttgcattgcatcacttattttatgggtttgataacttgaaaatgttttgtttagcaatgcaagaaaaagcatacctttgaagaggtcattaaaatccattcttcaaccagatgtattgagtatgaagatggtgatctgtcatcatggatcaacagggaaaggtttcagaattaccttgctatggatggcttcctcttgtatgaacttggagacacaggaaagcttgtggctcttgcagttattgatgagaaaaatacatcagttgaacataccagattgaagtcaattattcaggaagttgcaagagattacagagacctcttccatagggattttcagtttggccacatggatggaaatgactacataaataccttgctgatggatgaattgacagtcccaactgtagttgtactgaatacttcaaaccagcaatatttcttgctagatagacagattaagaatgttgaagacatggtccagtttattaataacattttggatggcacagtagaagcccaaggaggtgatagcattttgcagagattgaaaagaatagtatttgatgccaaatctactattgtgtctatattcaagagctcaccactgatgggctgctttctctttggcctgccactgggtgtcatcagtatcatgtgctatggaatctacacagccgacacagatggaggttatatagaagaacgatatgaagtgtctaaaagtgaaaatgaaaaccaagaacagatagaagagagcaaagaacagcaggagcccagcagtggaggatctgtagtgcctacagtgcaggagcccaaggatgtattagaaaagaagaaagattgagacttgatgactataaaatatttgttaggacttcaaattattaaagagtctatttattgaatttagacatttaatcatgatctttacagaaaagaacatgttattcgtattttgctaatatcaactgcatggattaaagtagtccctccatacatggggaagtgtttggagcaaagagatgaacagtttgtctgaaacaaacacagagcactccatcaaaatttacctgatctttgtgattagaacagaacaattctatttgcatgtttctctatctgaatattctgtgacaaaaagttaagattcttgggcagaatatttaaattggtcagtcaggtagaagatacatgtgtgatatagaaaaataatgcctctcctgctgccatccgtttccctcatatattttggacaagatttatatggacaaaattaagtctttaaaatttaggcactttaaggagaactaataactttttccatgtatcaagattatgaggttaaaaataatgtggttttatatagcatagtggttttattttgttagttatttttaaaggagaagaaatgttactttttaactttatactcagttgcattatcataaaattttcatatatgcctagataatggggaaaaaaagtcttgtgattgactttcgcaaaataaacaggatttactgagtagaggtttcagcccattccttggaatactaacaggtatttcatcagtcattgtaggttgggaagggtctctgttaatcctactctgctttagccagaatagcctagtattttatttctattttatatattgagatttcttctaacatttcctttgataaaaatcttctgctttttgaaaagtggtatgtatcatatttttatgtttctggtgtgtgaactttatggtaacttctactctagaatacgtacgtatgcacccacagacacacacagtttattgacacatctattatgtaatgctgtagacctgtccgtgtctgcttcataaggagtaacgactgacattagcatgtccagtgacaagtcacatccggtgtaaaaaaaagagatcagccagttaccttctccattgtcttagttctgtcacccatttcgtcaagtgacctctcatcttctataaactaatacaggaattctttccaaagcaatgtctaaaaactctttttttaaaagtaacagtttggtatgtttattgtagataaattatttttgaggccttcattttagctaagtttagaatttatattaggcaactatgatttgagtggttattcattgagtaattttccactataaagaattttattgaacatttattaaaaaataatgtaatgcatggtcaaaaaatatgtaattcatggtctggacactgacgttgtttagggatttagtcatcaaggacagccctctgttgtttctaatgccgtactaatcaagactgtatggacacttgcatcttaagtactaaggaattactagtgattgttttattttatccatgtactcttttagtatttaataattaaatacctattcttagtgtttgacactccatatttcttttttttggaaatgaaacaaatatgcagtccaaaattcaggaactactagagtgaaatgatattaagtggaaaccagagataaatgctgttaatttaacaagtagattcttctccaaagaatgatgagtgattcttgggaagataaatgttaatgttcccaatagtcaagcttgttttgcagtagtgaaaagcttagatgagtacggatacctcatttgaaactcagcctagtaaggaagtgaaaacttagcagtcagtgacatggggaaatagttatagaaaatgtcactgaattttttcatatttataattagtcatttacatatttttgtcttgttgatcattacctgtaaatgaaagaccttaataggaaaaaaagagtaaagctcagtgtgaatgcaaacatccacaaaatatgatcttcgtttatattctgtgatgttgtttataaatgaatgcctcagttctctgctacccttttcacagctttgtactgtttgccttatattctatttgtgcttttaaagtgtgtctgttgggaaaacaaaatgtgtaggtggtttgtaagtgaataatttttatttcttcttgtattaaaattttgtttttttctctactttgggagatgtttatttacattgtcagactattcacaaaacagattctaaaatttgtttgctcgtatgctgttcccttcaatgtgatatcagagattactatgaatgttagtttcattccgtgaaacattacttccatataaagacagatctcttaataagtgaatctagtggaagaacataggtatcattctaattccatggtaaattttgtcatgattctatatgaataatggggtccttcaggaagttggaatttttgccttctcttttaattgcagtgaagttctctttataacttctaaaattcggaattctagatccttgcttttgcagaatttggtgctcagacaatatttaaggacatttcagcgagacaaagtgcatgtttttatcgagtaccctgtgcaccacattatatctggcaattctttttgtttcattatgtgcatcaatatttttctcagctactattacctgaaacttgtttaacatgtattagacctagaattttcattttctttctcacatagttgcttcctggtatctgatttagaaataacatttaaatgccaagtatctgggggattgaaggaagggtctatatgagcaggtgaattagcagtactgtttttgtttagtggatattgttagtgactttttgtgtgtgttttgctttgggacctttttattttggtgttgcaaaaagtaacatattttcatcattgcttcatacgacatggagttaggacagggaaaaatcattcaacactccttatgcattaaatgatcaaataaaccagtgtaggatattaagactatcaattggtgggattaggcttgacattttatttttataaatatatattttttctgaatgtgtctgagtccaagagtgggcaaaaaataattttctactttggactaatctatagaggtttttgaaagtctgcattactaacttgttgaattcatgatattctgcctatggcacaaattgtaaacctttgtttttctaaaataaagtaattgaaaacctgcaaaaaaaaaata

SEQ ID NO: 434011 - DNA, 3774 bp, Homo sapiens
ctctagaggatccaccgccatttacaactatctctagaaatatcaaacaaattaaaaagtgaattgacagtcccaactgtagttgtactgaatacttcaaaccagcaatatttcttgctagatagacagattaagaatgttgaagacatggtccagtttattaataacattttggatggcacagtagaagcccaaggaggtgatagcattttgcagagattgaaaagaatagtatttgatgccaaatctactattgtgtctatattcaagagctcaccactgatgggctgctttctctttggcctgccactgggtgtcatcagtatcatgtgctatggaatctacacagccgacacagatggaggttatatagaagaacgatatgaagtgtctaaaagtgaaaatgaaaaccaagaacagatagaagagagcaaagaacagcaggagcccagcagtggaggatctgtagtgcctacagtgcaggagcccaaggatgtattagaaaagaagaaagattgagacttgatgactataaaatatttgttaggacttcaaattattaaagagtctatttattgaatttagacatttaatcatgatctttacagaaaagaacatgttattcgtattttgctaatatcaactgcatggattaaagtagtccctccatacatggggaagtgtttggagcaaagagatgaacagtttgtctgaaacaaacacagagcactccatcaaaatttacctgatctttgtgattagaacagaacaattctatttgcatgtttctctatctgaatattctgtgacaaaaagttaagattcttgggcagaatatttaaattggtcagtcaggtagaagatacatgtgtgatatagaaaaataatgcctctcctgctgccatccgtttccctcatatattttggacaagatttatatggacaaaattaagtctttaaaatttaggcactttaaggagaactaataactttttccatgtatcaagattatgaggttaaaaataatgtggttttatatagcatagtggttttattttgttagttatttttaaaggagaagaaatgttactttttaactttatactcagttgcattatcataaaattttcatatatgcctagataatggggaaaaaaagtcttgtgattgactttcgcaaaataaacaggatttactgagtagaggtttcagcccattccttggaatactaacaggtatttcatcagtcattgtaggttgggaagggtctctgttaatcctactctgctttagccagaatagcctagtattttatttctattttatatattgagatttcttctaacatttcctttgataaaaatcttctgctttttgaaaagtggtatgtatcatatttttatgtttctggtgtgtgaactttatggtaacttctactctagaatacgtacgtatgcacccacagacacacacagtttattgacacatctattatgtaatgctgtagacctgtccgtgtctgcttcataaggagtaacgactgacattagcatgtccagtgacaagtcacatccggtgtaaaaaaaagagatcagccagttaccttctccattgtcttagttctgtcacccatttcgtcaagtgacctctcatcttctataaactaatacaggaattctttccaaagcaatgtctaaaaactctttttttaaaagtaacagtttggtatgtttattgtagataaattatttttgaggccttcattttagctaagtttagaatttatattaggcaactatgatttgagtggttattcattgagtaattttccactataaagaattttattgaacatttattaaaaaataatgtaatgcatggtcaaaaaatatgtaattcatggtctggacactgacgttgtttagggatttagtcatcaaggacagccctctgttgtttctaatgccgtactaatcaagactgtatggacacttgcatcttaagtactaaggaattactagtgattgttttattttatccatgtactcttttagtatttaataattaaatacctattcttagtgtttgacactccatatttcttttttttggaaatgaaacaaatatgcagtccaaaattcaggaactactagagtgaaatgatattaagtggaaaccagagataaatgctgttaatttaacaagtagattcttctccaaagaatgatgagtgattcttgggaagataaatgttaatgttcccaatagtcaagcttgttttgcagtagtgaaaagcttagatgagtacggatacctcatttgaaactcagcctagtaaggaagtgaaaacttagcagtcagtgacatggggaaatagttatagaaaatgtcactgaattttttcatatttataattagtcatttacatatttttgtcttgttgatcattacctgtaaatgaaagaccttaataggaaaaaaagagtaaagctcagtgtgaatgcaaacatccacaaaatatgatcttcgtttatattctgtgatgttgtttataaatgaatgcctcagttctctgctacccttttcacagctttgtactgtttgccttatattctatttgtgcttttaaagtgtgtctgttgggaaaacaaaatgtgtaggtggtttgtaagtgaataatttttatttcttcttgtattaaaattttgtttttttctctactttgggagatgtttatttacattgtcagactattcacaaaacagattctaaaatttgtttgctcgtatgctgttcccttcaatgtgatatcagagattactatgaatgttagtttcattccgtgaaacattacttccatataaagacagatctcttaataagtgaatctagtggaagaacataggtatcattctaattccatggtaaattttgtcatgattctatatgaataatggggtccttcaggaagttggaatttttgccttctcttttaattgcagtgaagttctctttataacttctaaaattcggaattctagatccttgcttttgcagaatttggtgctcagacaatatttaaggacatttcagcgagacaaagtgcatgtttttatcgagtaccctgtgcaccacattatatctggcaattctttttgtttcattatgtgcatcaatatttttctcagctactattacctgaaacttgtttaacatgtattagacctagaattttcattttctttctcacatagttgcttcctggtatctgatttagaaataacatttaaatgccaagtatctgggggattgaaggaagggtctatatgagcaggtgaattagcagtactgtttttgtttagtggatattgttagtgactttttgtgtgtgttttgctttgggacctttttattttggtgttgcaaaaagtaacatattttcatcattgcttcatacgacatggagttaggacagggaaaaatcattcaacactccttatgcattaaatgatcaaataaaccagtgtaggatattaagactatcaattggtgggattaggcttgacattttatttttataaatatatattttttctgaatgtgtctgagtccaagagtgggcaaaaaataattttctactttggactaatctatagaggtttttgaaagtctgcattactaacttgttgaattcatgatattctgcctatggcacaaattgtaaacctttgtttttctaaaataaagtaattgaaaacctgcaaaaaaaaaata

SEQ ID NO: 434012 - DNA, 3706 bp, Homo sapiens
agccccgcccccgtagttagcgcggtgcttctcttccgctccgggtcggctccgtttccctttccgggcgggcaggcggcggaccccagtgtctttatccctcttttgcacagtcagcttctgcagctctcccgggctagcatggcagcgtggaagagttggacggccctgcggctctgcgccacagttgttgtacttgatatggtcgtctgtaaaggatttgtagaagatttagatgaatcgtttaaagaaaatcgaaatgatgacatttggcttgtagatttttatgcgccatggtgtggccattgtaaaaagctggaaccaatttggaatgaagttggtcttgagatgaaaagcattggttctccagttaaggttggaaagatggatgctacttcctattctagcattgcttcagagtttggagttcgaggttatccaacaattaagctattaaaaggggacttggcatataattatagaggaccacgaacaaaagatgatattattgagtttgctcacagagtatctggggctctaattcggccacttccaagtcaacaaatgtttgaacatatgcagaagagacaccgtgtatttttcgtttatgtaggtggagaatcacctttgaaagagaaatacatagatgctgcttcagaattgattgtatatacatacttcttttctgcctcagaagaagtggttcctgagtatgtgacactaaaagagatgccagctgtgcttgttttcaaagatgaaacttactttgtttatgatgagtatgaagatggtgatctgtcatcatggatcaacagggaaaggtttcagaattaccttgctatggatggcttcctcttgtatgaacttggagacacaggaaagcttgtggctcttgcagttattgatgagaaaaatacatcagttgaacataccagattgaagtcaattattcaggaagttgcaagagattacagagacctcttccatagggattttcagtttggccacatggatggaaatgactacataaataccttgctgatggatgaattgacagtcccaactgtagttgtactgaatacttcaaaccagcaatatttcttgctagatagacagattaagaatgttgaagacatggtccagtttattaataacattttggatggcacagtagaagcccaaggaggtgatagcattttgcagagattgaaaagaatagtatttgatgccaaatctactattgtgtctatattcaagagctcaccactgatgggctgctttctctttggcctgccactgggtgtcatcagtatcatgtgctatggaatctacacagccgacacagatggaggttatatagaagaacgatatgaagtgtctaaaagtgaaaatgaaaaccaagaacagatagaagagagcaaagaacagcaggagcccagcagtggaggatctgtagtgcctacagtgcaggagcccaaggatgtattagaaaagaagaaagattgagacttgatgactataaaatatttgttaggacttcaaattattaaagagtctatttattgaatttagacatttaatcatgatctttacagaaaagaacatgttattcgtattttgctaatatcaactgcatggattaaagtagtccctccatacatggggaagtgtttggagcaaagagatgaacagtttgtctgaaacaaacacagagcactccatcaaaatttacctgatctttgtgattagaacagaacaattctatttgcatgtttctctatctgaatattctgtgacaaaaagttaagattcttgggcagaatatttaaattggtcagtcaggtagaagatacatgtgtgatatagaaaaataatgcctctcctgctgccatccgtttccctcatatattttggacaagatttatatggacaaaattaagtctttaaaatttaggcactttaaggagaactaataactttttccatgtatcaagattatgaggttaaaaataatgtggttttatatagcatagtggttttattttgttagttatttttaaaggagaagaaatgttactttttaactttatactcagttgcattatcataaaattttcatatatgcctagataatggggaaaaaaagtcttgtgattgactttcgcaaaataaacaggatttactgagtagaggtttcagcccattccttggaatactaacaggtatttcatcagtcattgtaggttgggaagggtctctgttaatcctactctgctttagccagaatagcctagtattttatttctattttatatattgagatttcttctaacatttcctttgataaaaatcttctgctttttgaaaagtggtatgtatcatatttttatgtttctggtgtgtgaactttatggtaacttctactctagaatacgtacgtatgcacccacagacacacacagtttattgacacatctattatgtaatgctgtagacctgtccgtgtctgcttcataaggagtaacgactgacattagcatgtccagtgacaagtcacatccggtgtaaaaaaaagagatcagccagttaccttctccattgtcttagttctgtcacccatttcgtcaagtgacctctcatcttctataaactaatacaggaattctttccaaagcaatgtctaaaaactctttttttaaaagtaacagtttggtatgtttattgtagataaattatttttgaggccttcattttagctaagtttagaatttatattaggcaactatgatttgagtggttattcattgagtaattttccactataaagaattttattgaacatttattaaaaaataatgtaatgcatggtcaaaaaatatgtaattcatggtctggacactgacgttgtttagggatttagtcatcaaggacagccctctgttgtttctaatgccgtactaatcaagactgtatggacacttgcatcttaagtactaaggaattactagtgattgttttattttatccatgtactcttttagtatttaataattaaatacctattcttagtgtttgacactccatatttcttttttttggaaatgaaacaaatatgcagtccaaaattcaggaactactagagtgaaatgatattaagtggaaaccagagataaatgctgttaatttaacaagtagattcttctccaaagaatgatgagtgattcttgggaagataaatgttaatgttcccaatagtcaagcttgttttgcagtagtgaaaagcttagatgagtacggatacctcatttgaaactcagcctagtaaggaagtgaaaacttagcagtcagtgacatggggaaatagttatagaaaatgtcactgaattttttcatatttataattagtcatttacatatttttgtcttgttgatcattacctgtaaatgaaagaccttaataggaaaaaaagagtaaagctcagtgtgaatgcaaacatccacaaaatatgatcttcgtttatattctgtgatgttgtttataaatgaatgcctcagttctctgctacccttttcacagctttgtactgtttgccttatattctatttgtgcttttaaagtgtgtctgttgggaaaacaaaatgtgtaggtggtttgtaagtgaataatttttatttcttcttgtattaaaattttgtttttttctct

SEQ ID NO: 434013 - DNA, 4440 bp, Homo sapiens
agccccgcccccgtagttagcgcggtgcttctcttccgctccgggtcggctccgtttccctttccgggcgggcaggcggcggaccccagtgtctttatccctcttttgcacagtcagcttctgcagctctcccgggctagcatggcagcgtggaagagttggacggccctgcggctctgcgccacagttgttgtacttgatatggtcgtctgtaaaggatttgtagaagatttagatgaatcgtttaaagaaaatcgaaatgatgacatttggcttgtagatttttatgcgccatggtgtggccattgtaaaaagctggaaccaatttggaatgaagttggtcttgagatgaaaagcattggttctccagttaaggttggaaagatggatgctacttcctattctagcattgcttcagagtttggagttcgaggttatccaacaattaagctattaaaaggggacttggcatataattatagaggaccacgaacaaaagatgatattattgagtttgctcacagagtatctggggctctaattcggccacttccaagtcaacaaatgtttgaacatatgcagaagagacaccgtgtatttttcgtttatgtaggtggagaatcacctttgaaagagaaatacatagatgctgcttcagaattgattgtatatacatacttcttttctgcctcagaagaagtggttcctgagtatgtgacactaaaagagatgccagctgtgcttgttttcaaagatgaaacttactttgtttatgatgagtatgaagatggtgatctgtcatcatggatcaacagggaaaggtttcagaattaccttgctatggatggcttcctcttgtatgaacttggagacacaggaaagcttgtggctcttgcagttattgatgagaaaaatacatcagttgaacataccagattgaagtcaattattcaggaagttgcaagagattacagagacctcttccatagggattttcagtttggccacatggatggaaatgactacataaataccttgctgatggatgaattgacagtcccaactgtagttgtactgaatacttcaaaccagcaatatttcttgctagatagacagattaagaatgttgaagacatggtccagtttattaataacattttggatggcacagtagaagcccaaggaggtgatagcattttgcagagattgaaaagaatagtatttgatgccaaatctactattgtgtctatattcaagagctcaccactgatgggctgctttctctttggcctgccactgggtgtcatcagtatcatgtgctatggaatctacacagccgacacagatggaggttatatagaagaacgatatgaagtgtctaaaagtgaaaatgaaaaccaagaacagatagaagagagcaaagaacagcaggagcccagcagtggaggatctgtagtgcctacagtgcaggagcccaaggatgtattagaaaagaagaaagattgagacttgatgactataaaatatttgttaggacttcaaattattaaagagtctatttattgaatttagacatttaatcatgatctttacagaaaagaacatgttattcgtattttgctaatatcaactgcatggattaaagtagtccctccatacatggggaagtgtttggagcaaagagatgaacagtttgtctgaaacaaacacagagcactccatcaaaatttacctgatctttgtgattagaacagaacaattctatttgcatgtttctctatctgaatattctgtgacaaaaagttaagattcttgggcagaatatttaaattggtcagtcaggtagaagatacatgtgtgatatagaaaaataatgcctctcctgctgccatccgtttccctcatatattttggacaagatttatatggacaaaattaagtctttaaaatttaggcactttaaggagaactaataactttttccatgtatcaagattatgaggttaaaaataatgtggttttatatagcatagtggttttattttgttagttatttttaaaggagaagaaatgttactttttaactttatactcagttgcattatcataaaattttcatatatgcctagataatggggaaaaaaagtcttgtgattgactttcgcaaaataaacaggatttactgagtagaggtttcagcccattccttggaatactaacaggtatttcatcagtcattgtaggttgggaagggtctctgttaatcctactctgctttagccagaatagcctagtattttatttctattttatatattgagatttcttctaacatttcctttgataaaaatcttctgctttttgaaaagtggtatgtatcatatttttatgtttctggtgtgtgaactttatggtaacttctactctagaatacgtacgtatgcacccacagacacacacagtttattgacacatctattatgtaatgctgtagacctgtccgtgtctgcttcataaggagtaacgactgacattagcatgtccagtgacaagtcacatccggtgtaaaaaaaagagatcagccagttaccttctccattgtcttagttctgtcacccatttcgtcaagtgacctctcatcttctataaactaatacaggaattctttccaaagcaatgtctaaaaactctttttttaaaagtaacagtttggtatgtttattgtagataaattatttttgaggccttcattttagctaagtttagaatttatattaggcaactatgatttgagtggttattcattgagtaattttccactataaagaattttattgaacatttattaaaaaataatgtaatgcatggtcaaaaaatatgtaattcatggtctggacactgacgttgtttagggatttagtcatcaaggacagccctctgttgtttctaatgccgtactaatcaagactgtatggacacttgcatcttaagtactaaggaattactagtgattgttttattttatccatgtactcttttagtatttaataattaaatacctattcttagtgtttgacactccatatttcttttttttggaaatgaaacaaatatgcagtccaaaattcaggaactactagagtgaaatgatattaagtggaaaccagagataaatgctgttaatttaacaagtagattcttctccaaagaatgatgagtgattcttgggaagataaatgttaatgttcccaatagtcaagcttgttttgcagtagtgaaaagcttagatgagtacggatacctcatttgaaactcaaaatgtgtaggtggtttgtaagtgaataatttttatttcttcttgtattaaaattttgtttttttctctactttgggagatgtttatttacattgtcagactattcacaaaacagattctaaaatttgtttgctcgtatgctgttcccttcaatgtgatatcagagattactatgaatgttagtttcattccgtgaaacattacttccatataaagacagatctcttaataagtgaatctagtggaagaacataggtatcattctaattccatggtaaattttgtcatgattctatatgaataatggggtccttcaggaagttggaatttttgccttctcttttaattgcagtgaagttctctttataacttctaaaattcggaattctagatccttgcttttgcagaatttggtgctcagacaatatttaaggacatttcagcgagacaaagtgcatgtttttatcgagtaccctgtgcaccacattatatctggcaattctttttgtttcattatgtgcatcaatatttttctcagctactattacctgaaacttgtttaacatgtattagacctagaattttcattttctttctcacatagttgcttcctggtatctgatttagaaataacatttaaatgccaagtatctgggggattgaaggaagggtctatatgagcaggtgaattagcagtactgtttttgtttagtggatattgttagtgactttttgtgtgtgttttgctttgggacctttttattttggtgttgcaaaaagtaacatattttcatcattgcttcatacgacatggagttaggacagggaaaaatcattcaacactccttatgcattaaatgatcaaataaaccagtgtaggatattaagactatcaattggtgggattaggcttgacattttatttttataaatatatattttttctgaatgtgtctgagtccaagagtgggcaaaaaataattttctactttggactaatctatagaggtttttgaaagtctgcattactaacttgttgaattcatgatattctgcctatggcacaaattgtaaacctttgtttttctaaaataaagtaattgaaaacctgcaaaaaaaaaata

SEQ ID NO: 434014 - DNA, 1325 bp, Homo sapiens
atctgcgtccatcagcggatctatacattgacctcttgttgttatcaaaacagcagtctgatgggaggaagactgcatcttcgtcccatcaggatgttgtttataaatgaatgcctcagttctctgctacccttttcacagctttgtactgtttgccttatattctatttgtgcttttaaagtgtgtctgttgggaaaacaaaatgtgtaggtggtttgtaagtgaataatttttatttcttcttgtattaaaattttgtttttttctctactttgggagatgtttatttacattgtcagactattcacaaaacagattctaaaatttgtttgctcgtatgctgttcccttcaatgtgatatcagagattactatgaatgttagtttcattccgtgaaacattacttccatataaagacagatctcttaataagtgaatctagtggaagaacataggtatcattctaattccatggtaaattttgtcatgattctatatgaataatggggtccttcaggaagttggaatttttgccttctcttttaattgcagtgaagttctctttataacttctaaaattcggaattctagatccttgcttttgcagaatttggtgctcagacaatatttaaggacatttcagcgagacaaagtgcatgtttttatcgagtaccctgtgcaccacattatatctggcaattctttttgtttcattatgtgcatcaatatttttctcagctactattacctgaaacttgtttaacatgtattagacctagaattttcattttctttctcacatagttgcttcctggtatctgatttagaaataacatttaaatgccaagtatctgggggattgaaggaagggtctatatgagcaggtgaattagcagtactgtttttgtttagtggatattgttagtgactttttgtgtgtgttttgctttgggacctttttattttggtgttgcaaaaagtaacatattttcatcattgcttcatacgacatggagttaggacagggaaaaatcattcaacactccttatgcattaaatgatcaaataaaccagtgtaggatattaagactatcaattggtgggattaggcttgacattttatttttataaatatatattttttctgaatgtgtctgagtccaagagtgggcaaaaaataattttctactttggactaatctatagaggtttttgaaagtctgcattactaacttgttgaattcatgatattctgcctatggcacaaattgtaaacctttgtttttctaaaataaagtaattgaaaacctgcaaaaaaaaaata

SEQ ID NO: 434015 - DNA, 658 bp, Homo sapiens
attcgtgtccctaccccttcgacacggtgcgtcggcgcatgatgaagcagtccgggcgcaaaggagctgacatcatgtacacgggcaccgatcgactgttcggaggaagatcttcagagatgaggggggcaaggccttcttcaagggtgcttggtccaacgtcctgcggggcataggggggcgccttcgtgctggtcctgtacgacgagctcaagaaggtgaattagcagtactgtttttgtttagtggatattgttagtgactttttgtgtgtgttttgctttgggacctttttattttggtgttgcaaaaagtaacatattttcatcattgcttcatacgacatggagttaggacagggaaaaatcattcaacactccttatgcattaaatgatcaaataaaccagtgtaggatattaagactatcaattggtgggattaggcttgacattttatttttataaatatatattttttctgaatgtgtctgagtccaagagtgggcaaaaaataattttctactttggactaatctatagaggtttttgaaagtctgcattactaacttgttgaattcatgatattctgcctatggcacaaattgtaaacctttgtttttctaaaataaagtaattgaaaacctgcaaaaaaaaaata

SEQ ID NO: 434016 - DNA, 1468 bp, Homo sapiens
agccccgcccccgtagttagcgcggtgcttctcttccgctccgggtcggctccgtttccctttccgggcgggcaggcggcggaccccagtgtctttatccctcttttgcacagtcagcttctgcagctctcccgggctagcatggcagcgtggaagagttggacggccctgcggctctgcgccacagttgttgtacttgatatggtcgtctgtaaaggatttgtagaagatttagatgaatcgtttaaagaaaatcgaaatgatgacatttggcttgtagatttttatgcgccatggtgtggccattgtaaaaagctggaaccaatttggaatgaagttggtcttgagatgaaaagcattggttctccagttaaggttggaaagatggatgctacttcctattctagcattgcttcagagtttggagttcgaggttatccaacaattaagctattaaaaggggacttggcatataattatagaggaccacgaacaaaagatgatattattgagtttgctcacagagtatctggggctctaattcggccacttccaagtcaacaaatgtttgaacatatgcagaagagacaccgtgtatttttcgtttatgtaggtggagaatcacctttgaaagagaaatacatagatgctgcttcagaattgattgtatatacatacttcttttctgcctcagaagaagtggttcctgagtatgtgacactaaaagagatgccagctgtgcttgttttcaaagatgaaacttactttgtttatgatgcttttattttagattcagagtctacatgtgcaggttgttacatgggtgtatggatgatgctgaggttggggtacaaatgatcccgtcacccaggtaataagcatagtacccaacaggtagtttttttagcccttgtcctcctccccatctccctagtgtctgttattcccatctttatgtccgtatgtacccaatgtttaccgccacttataaatgagaacttgcgatatttgggatagtttattttcgaatgaaattcaaattgatcactgtatgcaatctcgtagaaaatttgcttttagcatgcagtggacattgtggcccagtaatcaatttctagttttatgtttattttcctaatttataaatttaaatcaataaattctttgagatttgcattgcatcacttattttatgggtttgataacttgaaaatgttttgtttagcaatgcaagaaaaagcatacctttgaagaggtcattaaaatccattcttcaaccagatgtattgagtatgaagatggtgatctgtcatcatggatcaacagggaaaggtttcagaattaccttgctatggatggcttcctcttgtatgaacttggagacacaggaaagcttgtggtctctgcagtactgctgagaacaatacctcagttgaaccataccagattgccagtcactcattcagga

SEQ ID NO: 434017 - DNA, 785 bp, Homo sapiens
agccccgcccccgtagttagcgcggtgcttctcttccgctccgggtcggctccgtttccctttccgggcgggcaggcggcggaccccagtgtctttatccctcttttgcacagtcagcttctgcagctctcccgggctagcatggcagcgtggaagagttggacggccctgcggctctgcgccacagttgttgtacttgatatggtcgtctgtaaaggatttgtagaagatttagatgaatcgtttaaagaaaatcgaaatgatgacatttggcttgtagatttttatgcgccatggtgtggccattgtaaaaagctggaaccaatttggaatgaagttggtcttgagatgaaaagcattggttctccagttaaggttggaaagatggatgctacttcctattctagcattgcttcagagtttggagttcgaggttatccaacaattaagctattaaaaggggacttggcatataattatagaggaccacgaacaaaagatgatattattgagtttgctcacagagtatctggggctctaattcggccacttccaagtcaacaaatgtttgaacatatgcagaagagacaccgtgtatttttcgtttatgtaggtggagaatcacctttgaaagagaaatacatagatgctgcttcagaattgattgtatatacatacttcttttctgcctcagaagaagtggttcctgaggtaatatttaaaatttgattttaacgacacaattttatttattaaattattacttgatttaataaactaaattg

SEQ ID NO: 434018 - DNA, 1094 bp, Homo sapiens
agccccgcccccgtagttagcgcggtgcttctcttccgctccgggtcggctccgtttccctttccgggcgggcaggcggcggaccccagtgtctttatccctcttttgcacagtcagcttctgcagctctcccgggctagcatggcagcgtggaagagttggacggccctgcggctctgcgccacagttgttgtacttgatatggtcgtctgtaaaggatttgtagaagatttagatgaatcgtttaaagaaaatcgaaatgatgacatttggcttgtagatttttatgcgccatggtgtggccattgtaaaaagctggaaccaatttggaatgaagttggtcttgagatgaaaagcattggttctccagttaaggttggaaagatggatgctacttcctattctagcattgcttcagagtttggagttcgaggttatccaacaattaagctattaaaaggggacttggcatataattatagaggaccacgaacaaaagatgatattattgagtttgctcacagagtatctggggctctaattcggccacttccaagtcaacaaatgtttgaacatatgcagaagagacaccgtgtatttttcgtttatgtaggtggagaatcacctttgaaagagaaatacatagatgctgcttcagaattgattgtatatacatacttcttttctgcctcagaagaagtggttcctgagtatgtgacactaaaagagatgccagctgtgcttgttttcaaagatgaaacttactttgtttatgatggtaagttccaaatctttaactcatgtaaaacattttaaaattaaaatgtctgttatacaacttaggtgtaaagattatgtaaatgcttctactgttcaatgagaataacagttctcatgacttgaatgcctgatgttttgggttttttttcacccttcaacttataattgttagttatttttattctgagctttacctacacaacattctttttgttgttgtttgttaaattatatgcgtttttgaggaataaattctatgtgatttttatacattactttaaaatgttcagaattcatttttttgaagtaacatt

SEQ ID NO: 434019 - DNA, 1189 bp, Homo sapiens
agccccgcccccgtagttagcgcggtgcttctcttccgctccgggtcggctccgtttccctttccgggcgggcaggcggcggaccccagtgtctttatccctcttttgcacagtcagcttctgcagctctcccgggctagcatggcagcgtggaagagttggacggccctgcggctctgcgccacagttgttgtacttgatatggtcgtctgtaaaggatttgtagaagatttagatgaatcgtttaaagaaaatcgaaatgatgacatttggcttgtagatttttatgcgccatggtgtggccattgtaaaaagctggaaccaatttggaatgaagttggtcttgagatgaaaagcattggttctccagttaaggttggaaagatggatgctacttcctattctagcattgcttcagagtttggagttcgaggttatccaacaattaagctattaaaaggggacttggcatataattatagaggaccacgaacaaaagatgatattattgagtttgctcacagagtatctggggctctaattcggccacttccaagtcaacaaatgtttgaacatatgcagaagagacaccgtgtatttttcgtttatgtaggtggagaatcacctttgaaagtaagacttttttttaatccacaaaaacagatgtattgtaatttaatttactctataatcaagacttcactagaaacgcagaacttattactctgcacttactggaaatattttcattcattctaagcatttcttataataaaaacacttccttctataccttctgtcatgttttcctatatgaaacagaagtgtgtaaaaagtgagtaaatgttgcctgccttagcatttttttctgttattaacctggttatttaagtcttgtgttgctttttcaaattctgagtctttgagactgcagactttgtatgtgtgtatacacacatatcttcctataatcatcaccatcattttgtctaatttataattaaatgaatacatacaaattgaacttgtgttatatttaatgaactttatttgcagaaagataaaagctcttaattacgttggcctttgccttggaaacaattttatttgcttacatttcttctcttcacctaagaggatgtaaggtagcacattaaggtgatgactcttactacataaggtaactctc

SEQ ID NO: 434020 - DNA, 200 bp, Homo sapiens
gtaagtaaagtgctgaatgattttgctgtcaaatctattaatttttaaatttgtttctgagatacaggtagaaggattaaatagctgaaaaatagcaaacagttgacatattcagatgcagatattctcccattaaatattttactttagttttccaattctgtatttggaacttaactgactttaatattggtctatag

SEQ ID NO: 434021 - DNA, 208 bp, Homo sapiens
gattgaagattggggtttggccattcttcataggtgaagtatgtaattaaaggagagggactgcttctttatgcttttcttcgtatttaagcaatcatgttgtttatggctaattcacgtgttttgcttgctgtgtgacacgcactgtgcaggacaagtatacagtcataaattatgaaaggtcttttacccttgaggagttcaagtg

SEQ ID NO: 434022 - DNA, 676 bp, Homo sapiens
gtggtacgtcccgagctcggctgggcccaagatggcggcctccgtgtgcagcgggttgctggggccacgggtgctgtcctggagccgagagctgccttgcgcttggcgcgccctgcacacctccccggtctgcgccaagaaccgggcggcccgagtacgcgtaagcaagggggacaagccggtgacctacgaggaggcacacgcgccgcactacatcgcccaccgtaaaggctggctgtcgctgcacacaggtaacctggatggagaggaccatgccgcagagcgaacggtggaggatgttttccttcgcaagttcatgtggggtaccttcccaggctgcctggctgaccagctggttttaaagcgccggggtaaccagttggagatctgtgccgtggtcctgaggcagttgtctccacacaagtactacttcctcgtgggctacagtgaaactttgctgtcctacttttacaaatgtcctgtgcgactccacctccaaactgtgccctcaaaggttgtgtataagtacctctagaacaatccccttttttccatcaagctgtagcctgcagagaatggaaacgtgggaaaggaatggtatgtgggggaaatgcatcccctcagaggactgaggcatagtctctcatctgctattgaataaagaccttctatcttg

SEQ ID NO: 434023 - DNA, 755 bp, Homo sapiens
gtggtacgtcccgagctcggctgggcccaagatggcggcctccgtgtgcagcgggttgctggggccacggtgagtggggcgactcggcaggtccctgcgagtcggaggtggggtccctagtttccgcctcacgcgccctccctccacaggtgctgtcctggagccgagagctgccttgcgcttggcgcgccctgcacacctccccggtctgcgccaagaaccgggcggcccgagtacgcgtaagcaagggggacaagccggtgacctacgaggaggcacacgcgccgcactacatcgcccaccgtaaaggctggctgtcgctgcacacaggtaacctggatggagaggaccatgccgcagagcgaacggtggaggatgttttccttcgcaagttcatgtggggtaccttcccaggctgcctggctgaccagctggttttaaagcgccggggtaaccagttggagatctgtgccgtggtcctgaggcagttgtctccacacaagtactacttcctcgtgggctacagtgaaactttgctgtcctacttttacaaatgtcctgtgcgactccacctccaaactgtgccctcaaaggttgtgtataagtacctctagaacaatccccttttttccatcaagctgtagcctgcagagaatggaaacgtgggaaaggaatggtatgtgggggaaatgcatcccctcagaggactgaggcatagtctctcatctgctattgaataaagaccttctatcttg

SEQ ID NO: 434024 - DNA, 508 bp, Homo sapiens
cgcttttggatgttgactctggagttatggcagggccctggggcaatgaggctgattcttctattatgcccttccctcttcaggtaacctggatggagaggaccatgccgcagagcgaacggtggaggatgttttccttcgcaagttcatgtggggtaccttcccaggctgcctggctgaccagctggttttaaagcgccggggtaaccagttggagatctgtgccgtggtcctgaggcagttgtctccacacaagtactacttcctcgtgggctacagtgaaactttgctgtcctacttttacaaatgtcctgtgcgactccacctccaaactgtgccctcaaaggttgtgtataagtacctctagaacaatccccttttttccatcaagctgtagcctgcagagaatggaaacgtgggaaaggaatggtatgtgggggaaatgcatcccctcagaggactgaggcatagtctctcatctgctattgaataaagaccttctatcttg

SEQ ID NO: 434025 - DNA, 375 bp, Homo sapiens
gcggccgcgcggaggaagcgaaggaggcgggagcggagacctcgctgcgctcatggcgtcgcccgggcattcagatttgggagaagtagccccagaaataaaagcatcagagagacgaacagctgtggccattgcagatttggaatggagagaaatggaaggagatgattgcgagttccgttatggagatggtacaaatgaggctcaggacaatgattttccaacagatcaggatactgggcccagagcttccaaacaacctgccaagggccacacactgggcagaagtgttttctttgtctttttcccattgccttttactaccatgctacttaaaaaataaaaagttattccatgtctggacaagaaaaacaa

SEQ ID NO: 434026 - DNA, 4437 bp, Homo sapiens
cggccgcgcgggcgtggggggcgggcgggggcgccggcggaggacagcggtcccccgggatgcgggggtccgggtacgcgggcctaggggatccggggagggcgcgaggcccggaggtgcccggggcgcggcgggagcgagggcccggcgagcggctggggaaccggggtgcgggtcctcgccgcggcccggggcaacccgcggaggcctggaaatgcttcgctccggcgcctggtatcgatgttcctgggttttaaacttgctcgcgttgggagtggacgcttgtttgccgcgtcgttgagacgtacccagaatgtcaggatccgggcagatgcagaccctttgctgacagccggagagccgctccgggatctccttggtcggggccattgcctaccggcctgccttggggtggctgcgcttattttgatattacctcttttcaacttttttgatttaaatgttattccttttaggaaatgatggcgacacatatagtttgtaatttttgagaaaaaattctcacttggcaaactaaaacctcagtaattcattatttttttgttttttgttttgataattttactagtactgaaatttgggaatgacagtccaacactttcattttacaaagaaagaaattaggctcaaggtcatcgctttagttgttaaaattcttctttgactgttacccatcattcagagggtcttggatctagtggctgtgatagccattcagaacagttcccaaagagctttacaggatagaagtggaattactgggcaaagggcattcagatttgggagaagtagccccagaaataaaagcatcagagagacgaacagctgtggccattgcagatttggaatggagagaaatggaaggagatgattgcgagttccgttatggagatggtacaaatgaggctcaggacaatgattttccaacagagagaaaaaaaacacaaaaaaacattaactagaaagccagagagtgattcagtgattatgactcctgtgggaacttcccggtgactctgagtagcccacggaagcaacacagtggggagtggagagaagcaggcttcaagaaatgctgtcacttttgggcctagagacgtaccaggtccagaaactcagcctccaggactctctgcagatcagttttgacagtatgaagaactgggcccctcaggttcccaaagacttgccctggaatttcctcaggaagttgcaggccctcaatgctgatgccaggaataccactatggtgctggacgtgctcccagacgccaggcctgtggagaaggagagccagatggaagaggagatcatctactgggacccagctgatgaccttgctgccgacatttattccttttctgagctgcccacccctgatacgccagtgaaccccttagaccttctctgtgccctgctgctctcctcagacagtttcctgcaacaagaaatagcgttgaaaatggccctctgccagtttgcactcccactcgtgttgcctgactcggagaaccactaccatacatttctgctgtgggccatgcggggcattgtgaggacatggtggtcccagcccccaaggggcatggggagcttccgggaagacagcgtggtcttgtccagggcgcccgccttcgccttcgtgcgcatggacgtcagtagcaactccaagtcccagcttctcaacgccgtcctcagcccgggccacaggcagtgggactgcttctggcatcgggacctcaacttgggcaccaatgcccgggagatttcggatgggttggtagaaatttcctggttttttcccagcggaagggaggacttggacattttcccagaacctgtggcctttctgaacctgagaggtgacatcgggtctcactggctgcagtttaagctcttgacagaaatctcctccgctgtgtttatattgactgacaatatcagtaagaaggaatacaaattgctgtactccatgaaggagtcaaccacaaaatactacttcatcctgagtccctaccgtgggaagcgcaacacaaacctgagatttctgaataagttaattcctgtgctgaaaatagaccactcacatgtcctggtaaaggtcagcagcactgacagcgacagcttcgtgaagaggatccgggccatcgttgggaatgtgctgcgggcaccctgcaggcgggtatctgtggaggacatggcgcacgcagcccgcaaactgggcctaaaggtcgacgaggactgtgaggagtgtcagaaagcgaaagaccggatggagaggattaccaggaaaatcaaagactcggatgcctacagaagggacgagctgaggctgcagggggacccctggagaaaggcagcccaagtggagaaggagttctgccagctccagtgggccgtggacccccctgagaagcacagggctgagctgaggcggcggctgctagaacttcgaatgcagcagaacggccatgatccctcctcgggggtgcaggagttcatctcggggatcagcagcccctccttgagtgagaagcagtacttcctgaggtggatggagtggggcctggcacgggtggcccagccgcgactgagacagcctccggagacgcttctcaccctgagaccaaagcacgggggcaccacagacgtgggggagccgctctggcctgagcccctaggggtggaacacttcttgcgggagatgggacagttttatgaggctgagagctgtcttgtggaggcagggaggctgccggcaggccagaggcgttttgcccacttcccaggcttggcctcggagctgctgctgacagggctgcctctggagctaatcgatgggagcacgctgagcatgcccgtccgctgggtcacagggctcctgaaggagctgcacgtccgactggagagacggtcaaggctggtggttctgtcaaccgtcggggtgccaggcacgggcaagtccacactcctcaacaccatgtttgggctgcggtttgccacagggaagagctgcggtcctcgaggggccttcatgcagctcatcacagtggctgagggcttcagccaggacctgggctgtgaccacatcctggtgatagactccgggggcttgataggtggggccttgacgtcagctggggacagatttgagctggaggcttccttggccactctgctcctgggactgagcaatgtcaccgtgatcagtctagctgaaaccaaggacattccagcagctattctgcatgcatttctgaggttagaaaaaacggggcacatgcccaactaccagtttgtataccagaaccttcatgatgtatctgttcccggccctaggcccagagacaagagacagctcctggatccacctggtgacctgagcagggctgcagcccagatggagaaacagggcgacggcttccgggcactggcaggcctggccttctgcgaccctgagaagcagcacatctggcacatcccaggcctgtggcacggagcacctcccatggccgcagtgagcttggcctacagtgaagccatatttgaattgaagagatgcctactcgaaaacatcaggaacggcttgtcgaaccaaaacaaaaacatccagcagctcattgagctggtgagacggctgtgagtgtgcagagaaacccagttcaggtgtaggaggctgctgtgggcagccctgtctgatggggcacccgtgtggggctgtgctctggtgcctgagaatggctggtgcccaatcgacatgagaagacgaggaaaagacagggtttggagtctcctcaacagtgttaaaagaggaagtgacctcacagaccagctcagagatgttaccaagaatatcacagcccccagggtagggagacaagcagcagtttgttctgtctcagctcctgtcaaggatcctgcggggtgggccctctgtatagctgctctctgtcactggcccctggagtgggagcagcgtccttagtcactgcaggcccaggcgggcaggtggtcccaggacagaggtggggaagttgtcctgaggaagcagaagtaggccttgctcccgcccaacccaagggcctccagtggaccagcattcaagatgtgagtgcccgtggtgtgcaaggcactcccatggcaccgtatttattgactgatctgtgaaggcttccctgacccctgcccaggaagagttcactggtcgctctgttgtgccccacagcactttgttatacctctgccacacacttcacgcagcgcgttgtaactcatgtgtttacatgtctgtccccccagactgtgagctccttgagggcagggactgtacattctccagctctgtgtccccagggcctggcacattgtagacgcttaataaatgtctgttaaatgaatgagtgcacaagtgatggt

SEQ ID NO: 434027 - DNA, 612 bp, Homo sapiens
tgactggggggacatggcgcgaagtaggggtctggatcggggatctcgtggagtcacggccccttttgctcctagaaccgggcggcccgagtacgcgtaagcaagggggacaagccggtgacctacgaggaggcacacgcgccgcactacatcgcccaccgtaaaggctggctgtcgctgcacacaggtaacctggatggagaggaccatgccgcagagcgaacggtggaggatgttttccttcgcaagttcatgtggggtaccttcccaggctgcctggctgaccagctggttttaaagcgccggggtaaccagttggagatctgtgccgtggtcctgaggcagttgtctccacacaagtactacttcctcgtgggctacagtgaaactttgctgtcctacttttacaaatgtcctgtgcgactccacctccaaactgtgccctcaaaggttgtgtataagtacctctagaacaatccccttttttccatcaagctgtagcctgcagagaatggaaacgtgggaaaggaatggtatgtgggggaaatgcatcccctcagaggactgaggcatagtctctcatctgctattgaataaagaccttctatcttg

SEQ ID NO: 434028 - DNA, 830 bp, Homo sapiens
  misc_feature (735)..(735): n is a, c, g, or t
  misc_feature (739)..(739): n is a, c, g, or t
  misc_feature (745)..(745): n is a, c, g, or t
  misc_feature (753)..(753): n is a, c, g, or t
  misc_feature (755)..(755): n is a, c, g, or t
  misc_feature (757)..(757): n is a, c, g, or t
  misc_feature (766)..(766): n is a, c, g, or t
  misc_feature (774)..(774): n is a, c, g, or t
  misc_feature (785)..(785): n is a, c, g, or t
gtggtacgtcccgagctcggctgggcccaagatggcggcctccgtgtgcagcgggttgctggggccacgggtgctgtcctggagccgagagctgccttgcgcttggcgcgccctgcacacctccccggtctgcgccaagaaccgggcggcccgagtacgcgtaagcaagggggacaagccggtgacctacgaggaggcacacgcgccgcactacatcgcccaccgtaaaggctggctgtcgctgcacacaggtaacctggatggagaggaccatgccgcagagcgaacggtggaggatgttttccttcgcaagttcatgtggggtaccttcccaggctgcctggctgaccagctggttttaaagcgccggggtaaccagttggagatctgtgccgtggtcctgaggcagttgtctccacacaagtactacttcctcgtgggctacagtgaaactttgctgtcctacttttacaaatgtcctgtgcgactccacctccaaactgtgccctcaaaggttgtgtataagtacctctagaacaatccccttttttccatcaagctgtagcctgcagagaatggaaacgtgggaaaggaatggtatgtgggggaaatgcatcccctcagaggactgaggcatagtctctcatctgctattgaataaagaccttctatcttgaaaaaacacaaaaaaaaaaaaaacccgggggttttttgcgggggggggaaaaggggttngaangggccntgggtctngngnttctggccngtttttgncaagggggaantcgcgggtccccaaaagggggggataaattgaaaagccggtacta

SEQ ID NO: 434029 - DNA, 653 bp, Homo sapiens
cgcagaagtcgcgtgtctaggtgagtcgcggtgggtcctcgcttgcagttcagcgaccacgtttgtttcgacgccggaccgcgtaagagacgatgatgttgggcacggaaggtggagagggattcgtggtgaaggtccggggcttgcctggtcttgctcggccgatgaagtgcagaggtttttttctgactgcaaaattcaaaatggggctcaaggtattcgtttcatctacaccagagaaggcagaccaagtggcgaggcttttgttgaacttgaatcagaagatgaagttcatgtggggtaccttcccaggctgcctggctgaccagctggttttaaagcgccggggtaaccagttggagatctgtgccgtggtcctgaggcagttgtctccacacaagtactacttcctcgtgggctacagtgaaactttgctgtcctacttttacaaatgtcctgtgcgactccacctccaaactgtgccctcaaaggttgtgtataagtacctctagaacaatccccttttttccatcaagctgtagcctgcagagaatggaaacgtgggaaaggaatggtatgtgggggaaatgcatcccctcagaggactgaggcatagtctctcatctgctattgaataaagaccttctatcttg

SEQ ID NO: 434030 - DNA, 1175 bp, Homo sapiens
cggccgcgcgggcgtggggggcgggcgggggcgccggcggaggacagcggtcccccgggatgcgggggtccgggtacgcgggcctaggggatccggggagggcgcgaggcccggaggtgcccggggcgcggcgggagcgagggcccggcgagcggctggggaaccggggtgcgggtcctcgccgcggcccggggcaacccgcggaggcctggaaatgcttcgctccggcgcctggtatcgatgttcctgggttttaaacttgctcgcgttgggagtggacgcttgtttgccgcgtcgttgagacgtacccagaatgtcaggatccgggcagatgcagaccctttgctgacagccggagagccgctccgggatctccttggtcggggccattgcctaccggcctgccttggggtggctgcgcttattttgatattacctcttttcaacttttttgatttaaatgttattccttttaggaaatgatggcgacacatatagtttgtaatttttgagaaaaaattctcacttggcaaactaaaacctcagtaattcattatttttttgttttttgttttgataattttactagtactgaaatttgggaatgacagtccaacactttcattttacaaagaaagaaattaggctcaaggtcatcgctttagttgttaaaattcttctttgactgttacccatcattcagagggtcttggatctagtggctgtgatagccattcagaacagttcccaaagagctttacaggtgtgtgttcagtggtaggggtggggaggggacggtgctaaggggccgggatcatggatttcgtgcctcctccagatgaggcctgagccatgccctggggtgatttggctcagtacagtgggcctgaatgaagcaagctgaatttgaaccccgcctgctgtctttctaggctttggggcagtggtcatttccgggaccaggccttttcattgccagctgactacccagcactttgagctcatgaatagagtaagcagggaaccatccctgggaaggccaggctgattgacctaggggttcaaggtcctgcagcattcctttcccccttgtcaggaaagggtggggcagagcctcctggaggcaatgttgagggtggctgaacctgtgtggggctgccctgaacgaagcttta

SEQ ID NO: 434031 - DNA, 845 bp, Homo sapiens
gtcgccgcgtgccgagcgtcctggcgcggccgaggggaagcagcggggctgcccgggttacgctggccacccgcacctggtcctgtggcttcgaccactagtcagcaaggccccggagaggccagcgaagaggaggggctcgttggctttacggagacgcgcggagcaccctcaaggtgccacacgctcgcctgctccctgttcctacatcctgggcgtcttcccaggctgtcatataactcctgagaatagtggttcttaactctgtaagtatatataccctcgtacgccttatggctggatgcgttacagccatttccatgtagatgtctgtgcatacgttcacacgcaaaactctccgcagttttggagatctccgtgttcagtcgtacctcacgtgatcttgcactgccaacattgagaaccctggccttagactatgcatctcccaaacttaattatctgtctccttcctattttcccaagacttggcaggcgtctaggtcagagttgttcaaactgagggttatgaactagtgtgtcacgaaatcaatttaataggttgcaaccaacatttttttgaaaaaaaaaaaaaaaaagccagacgaggtggctcacgcctataatcccagcactttgggaggccgaggcaggcggatcacttgaggtcaggagttcgagaccagcctggccaacatgctgaaactccgtctctactaaaaatacagaaattagctgggcgtagtgacgtatgcctgtaatcccagctacttgagaggctgaggcacgagaatcacttgaacccaggaggcagaggttgcagtgagctgagatcacactgttgc

SEQ ID NO: 434032 - DNA, 3621 bp, Homo sapiens
gcggccgcgcggaggaagcgaaggaggcgggagcggagacctcgctgcgctcatggcgtcgcccgggatagaagtggaattactgggcaaagggcattcagatttgggagaagtagccccagaaataaaagcatcagagagacgaacagctgtggccattgcagatttggaatggagagaaatggaaggagatgattgcgagttccgttatggagatggtacaaatgaggctcaggacaatgattttccaacagtggagagaagcaggcttcaagaaatgctgtcacttttgggcctagagacgtaccaggtccagaaactcagcctccaggactctctgcagatcagttttgacagtatgaagaactgggcccctcaggttcccaaagacttgccctggaatttcctcaggaagttgcaggccctcaatgctgatgccaggaataccactatggtgctggacgtgctcccagacgccaggcctgtggagaaggagagccagatggaagaggagatcatctactgggacccagctgatgaccttgctgccgacatttattccttttctgagctgcccacccctgatacgccagtgaaccccttagaccttctctgtgccctgctgctctcctcagacagtttcctgcaacaagaaatagcgttgaaaatggccctctgccagtttgcactcccactcgtgttgcctgactcggagaaccactaccatacatttctgctgtgggccatgcggggcattgtgaggacatggtggtcccagcccccaaggggcatggggagcttccgggaagacagcgtggtcttgtccagggcgcccgccttcgccttcgtgcgcatggacgtcagtagcaactccaagtcccagcttctcaacgccgtcctcagcccgggccacaggcagtgggactgcttctggcatcgggacctcaacttgggcaccaatgcccgggagatttcggatgggttggtagaaatttcctggttttttcccagcggaagggaggacttggacattttcccagaacctgtggcctttctgaacctgagaggtgacatcgggtctcactggctgcagtttaagctcttgacagaaatctcctccgctgtgtttatattgactgacaatatcagtaagaaggaatacaaattgctgtactccatgaaggagtcaaccacaaaatactacttcatcctgagtccctaccgtgggaagcgcaacacaaacctgagatttctgaataagttaattcctgtgctgaaaatagaccactcacatgtcctggtaaaggtcagcagcactgacagcgacagcttcgtgaagaggatccgggccatcgttgggaatgtgctgcgggcaccctgcaggcgggtatctgtggaggacatggcgcacgcagcccgcaaactgggcctaaaggtcgacgaggactgtgaggagtgtcagaaagcgaaagaccggatggagaggattaccaggaaaatcaaagactcggatgcctacagaagggacgagctgaggctgcagggggacccctggagaaaggcagcccaagtggagaaggagttctgccagctccagtgggccgtggacccccctgagaagcacagggctgagctgaggcggcggctgctagaacttcgaatgcagcagaacggccatgatccctcctcgggggtgcaggagttcatctcggggatcagcagcccctccttgagtgagaagcagtacttcctgaggtggatggagtggggcctggcacgggtggcccagccgcgactgagacagcctccggagacgcttctcaccctgagaccaaagcacgggggcaccacagacgtgggggagccgctctggcctgagcccctaggggtggaacacttcttgcgggagatgggacagttttatgaggctgagagctgtcttgtggaggcagggaggctgccggcaggccagaggcgttttgcccacttcccaggcttggcctcggagctgctgctgacagggctgcctctggagctaatcgatgggagcacgctgagcatgcccgtccgctgggtcacagggctcctgaaggagctgcacgtccgactggagagacggtcaaggctggtggttctgtcaaccgtcggggtgccaggcacgggcaagtccacactcctcaacaccatgtttgggctgcggtttgccacagggaagagctgcggtcctcgaggggccttcatgcagctcatcacagtggctgagggcttcagccaggacctgggctgtgaccacatcctggtgatagactccgggggcttgataggtggggccttgacgtcagctggggacagatttgagctggaggcttccttggccactctgctcctgggactgagcaatgtcaccgtgatcagtctagctgaaaccaaggacattccagcagctattctgcatgcatttctgaggttagaaaaaacggggcacatgcccaactaccagtttgtataccagaaccttcatgatgtatctgttcccggccctaggcccagagacaagagacagctcctggatccacctggtgacctgagcagggctgcagcccagatggagaaacagggcgacggcttccgggcactggcaggcctggccttctgcgaccctgagaagcagcacatctggcacatcccaggcctgtggcacggagcacctcccatggccgcagtgagcttggcctacagtgaagccatatttgaattgaagagatgcctactcgaaaacatcaggaacggcttgtcgaaccaaaacaaaaacatccagcagctcattgagctggtgagacggctgtgagtgtgcagagaaacccagttcaggtgtaggaggctgctgtgggcagccctgtctgatggggcacccgtgtggggctgtgctctggtgcctgagaatggctggtgcccaatcgacatgagaagacgaggaaaagacagggtttggagtctcctcaacagtgttaaaagaggaagtgacctcacagaccagctcagagatgttaccaagaatatcacagcccccagggtagggagacaagcagcagtttgttctgtctcagctcctgtcaaggatcctgcggggtgggccctctgtatagctgctctctgtcactggcccctggagtgggagcagcgtccttagtcactgcaggcccaggcgggcaggtggtcccaggacagaggtggggaagttgtcctgaggaagcagaagtaggccttgctcccgcccaacccaagggcctccagtggaccagcattcaagatgtgagtgcccgtggtgtgcaaggcactcccatggcaccgtatttattgactgatctgtgaaggcttccctgacccctgcccaggaagagttcactggtcgctctgttgtgccccacagcactttgttatacctctgccacacacttcacgcagcgcgttgtaactcatgtgtttacatgtctgtccccccagactgtgagctccttgagggcagggactgtacattctccagctctgtgtccccagggcctggcacattgtagacgcttaataaatgtctgttaaatgaatgagtgcacaagtgatggt

SEQ ID NO: 434033 - DNA, 3821 bp, Homo sapiens
gtcgccgcgtgccgagcgtcctggcgcggccgaggggaagcagcggggctgcccgggttacgctggccacccgcacctggtcctgtggcttcgaccactagtcagcaaggccccggagaggccagcgaagaggaggggctcgttggctttacggagacgcgcggagcaccctcaaggtgccacacgctcgcctgctccctgttcctacatcctgggcgtcttcccaggctgtcatataactcctgagaatagtggttcttaactctgatagaagtggaattactgggcaaagggcattcagatttgggagaagtagccccagaaataaaagcatcagagagacgaacagctgtggccattgcagatttggaatggagagaaatggaaggagatgattgcgagttccgttatggagatggtacaaatgaggctcaggacaatgattttccaacagtggagagaagcaggcttcaagaaatgctgtcacttttgggcctagagacgtaccaggtccagaaactcagcctccaggactctctgcagatcagttttgacagtatgaagaactgggcccctcaggttcccaaagacttgccctggaatttcctcaggaagttgcaggccctcaatgctgatgccaggaataccactatggtgctggacgtgctcccagacgccaggcctgtggagaaggagagccagatggaagaggagatcatctactgggacccagctgatgaccttgctgccgacatttattccttttctgagctgcccacccctgatacgccagtgaaccccttagaccttctctgtgccctgctgctctcctcagacagtttcctgcaacaagaaatagcgttgaaaatggccctctgccagtttgcactcccactcgtgttgcctgactcggagaaccactaccatacatttctgctgtgggccatgcggggcattgtgaggacatggtggtcccagcccccaaggggcatggggagcttccgggaagacagcgtggtcttgtccagggcgcccgccttcgccttcgtgcgcatggacgtcagtagcaactccaagtcccagcttctcaacgccgtcctcagcccgggccacaggcagtgggactgcttctggcatcgggacctcaacttgggcaccaatgcccgggagatttcggatgggttggtagaaatttcctggttttttcccagcggaagggaggacttggacattttcccagaacctgtggcctttctgaacctgagaggtgacatcgggtctcactggctgcagtttaagctcttgacagaaatctcctccgctgtgtttatattgactgacaatatcagtaagaaggaatacaaattgctgtactccatgaaggagtcaaccacaaaatactacttcatcctgagtccctaccgtgggaagcgcaacacaaacctgagatttctgaataagttaattcctgtgctgaaaatagaccactcacatgtcctggtaaaggtcagcagcactgacagcgacagcttcgtgaagaggatccgggccatcgttgggaatgtgctgcgggcaccctgcaggcgggtatctgtggaggacatggcgcacgcagcccgcaaactgggcctaaaggtcgacgaggactgtgaggagtgtcagaaagcgaaagaccggatggagaggattaccaggaaaatcaaagactcggatgcctacagaagggacgagctgaggctgcagggggacccctggagaaaggcagcccaagtggagaaggagttctgccagctccagtgggccgtggacccccctgagaagcacagggctgagctgaggcggcggctgctagaacttcgaatgcagcagaacggccatgatccctcctcgggggtgcaggagttcatctcggggatcagcagcccctccttgagtgagaagcagtacttcctgaggtggatggagtggggcctggcacgggtggcccagccgcgactgagacagcctccggagacgcttctcaccctgagaccaaagcacgggggcaccacagacgtgggggagccgctctggcctgagcccctaggggtggaacacttcttgcgggagatgggacagttttatgaggctgagagctgtcttgtggaggcagggaggctgccggcaggccagaggcgttttgcccacttcccaggcttggcctcggagctgctgctgacagggctgcctctggagctaatcgatgggagcacgctgagcatgcccgtccgctgggtcacagggctcctgaaggagctgcacgtccgactggagagacggtcaaggctggtggttctgtcaaccgtcggggtgccaggcacgggcaagtccacactcctcaacaccatgtttgggctgcggtttgccacagggaagagctgcggtcctcgaggggccttcatgcagctcatcacagtggctgagggcttcagccaggacctgggctgtgaccacatcctggtgatagactccgggggcttgataggtggggccttgacgtcagctggggacagatttgagctggaggcttccttggccactctgctcctgggactgagcaatgtcaccgtgatcagtctagctgaaaccaaggacattccagcagctattctgcatgcatttctgaggttagaaaaaacggggcacatgcccaactaccagtttgtataccagaaccttcatgatgtatctgttcccggccctaggcccagagacaagagacagctcctggatccacctggtgacctgagcagggctgcagcccagatggagaaacagggcgacggcttccgggcactggcaggcctggccttctgcgaccctgagaagcagcacatctggcacatcccaggcctgtggcacggagcacctcccatggccgcagtgagcttggcctacagtgaagccatatttgaattgaagagatgcctactcgaaaacatcaggaacggcttgtcgaaccaaaacaaaaacatccagcagctcattgagctggtgagacggctgtgagtgtgcagagaaacccagttcaggtgtaggaggctgctgtgggcagccctgtctgatggggcacccgtgtggggctgtgctctggtgcctgagaatggctggtgcccaatcgacatgagaagacgaggaaaagacagggtttggagtctcctcaacagtgttaaaagaggaagtgacctcacagaccagctcagagatgttaccaagaatatcacagcccccagggtagggagacaagcagcagtttgttctgtctcagctcctgtcaaggatcctgcggggtgggccctctgtatagctgctctctgtcactggcccctggagtgggagcagcgtccttagtcactgcaggcccaggcgggcaggtggtcccaggacagaggtggggaagttgtcctgaggaagcagaagtaggccttgctcccgcccaacccaagggcctccagtggaccagcattcaagatgtgagtgcccgtggtgtgcaaggcactcccatggcaccgtatttattgactgatctgtgaaggcttccctgacccctgcccaggaagagttcactggtcgctctgttgtgccccacagcactttgttatacctctgccacacacttcacgcagcgcgttgtaactcatgtgtttacatgtctgtccccccagactgtgagctccttgagggcagggactgtacattctccagctctgtgtccccagggcctggcacattgtagacgcttaataaatgtctgttaaatgaatgagtgcacaagtgatggt

SEQ ID NO: 434034 - DNA, 3620 bp, Homo sapiens
tggcttcagcctcccaggctcaggagatcctaccatctcagcctcctgagtagctgggactacaggatagaagtggaattactgggcaaagggcattcagatttgggagaagtagccccagaaataaaagcatcagagagacgaacagctgtggccattgcagatttggaatggagagaaatggaaggagatgattgcgagttccgttatggagatggtacaaatgaggctcaggacaatgattttccaacagtggagagaagcaggcttcaagaaatgctgtcacttttgggcctagagacgtaccaggtccagaaactcagcctccaggactctctgcagatcagttttgacagtatgaagaactgggcccctcaggttcccaaagacttgccctggaatttcctcaggaagttgcaggccctcaatgctgatgccaggaataccactatggtgctggacgtgctcccagacgccaggcctgtggagaaggagagccagatggaagaggagatcatctactgggacccagctgatgaccttgctgccgacatttattccttttctgagctgcccacccctgatacgccagtgaaccccttagaccttctctgtgccctgctgctctcctcagacagtttcctgcaacaagaaatagcgttgaaaatggccctctgccagtttgcactcccactcgtgttgcctgactcggagaaccactaccatacatttctgctgtgggccatgcggggcattgtgaggacatggtggtcccagcccccaaggggcatggggagcttccgggaagacagcgtggtcttgtccagggcgcccgccttcgccttcgtgcgcatggacgtcagtagcaactccaagtcccagcttctcaacgccgtcctcagcccgggccacaggcagtgggactgcttctggcatcgggacctcaacttgggcaccaatgcccgggagatttcggatgggttggtagaaatttcctggttttttcccagcggaagggaggacttggacattttcccagaacctgtggcctttctgaacctgagaggtgacatcgggtctcactggctgcagtttaagctcttgacagaaatctcctccgctgtgtttatattgactgacaatatcagtaagaaggaatacaaattgctgtactccatgaaggagtcaaccacaaaatactacttcatcctgagtccctaccgtgggaagcgcaacacaaacctgagatttctgaataagttaattcctgtgctgaaaatagaccactcacatgtcctggtaaaggtcagcagcactgacagcgacagcttcgtgaagaggatccgggccatcgttgggaatgtgctgcgggcaccctgcaggcgggtatctgtggaggacatggcgcacgcagcccgcaaactgggcctaaaggtcgacgaggactgtgaggagtgtcagaaagcgaaagaccggatggagaggattaccaggaaaatcaaagactcggatgcctacagaagggacgagctgaggctgcagggggacccctggagaaaggcagcccaagtggagaaggagttctgccagctccagtgggccgtggacccccctgagaagcacagggctgagctgaggcggcggctgctagaacttcgaatgcagcagaacggccatgatccctcctcgggggtgcaggagttcatctcggggatcagcagcccctccttgagtgagaagcagtacttcctgaggtggatggagtggggcctggcacgggtggcccagccgcgactgagacagcctccggagacgcttctcaccctgagaccaaagcacgggggcaccacagacgtgggggagccgctctggcctgagcccctaggggtggaacacttcttgcgggagatgggacagttttatgaggctgagagctgtcttgtggaggcagggaggctgccggcaggccagaggcgttttgcccacttcccaggcttggcctcggagctgctgctgacagggctgcctctggagctaatcgatgggagcacgctgagcatgcccgtccgctgggtcacagggctcctgaaggagctgcacgtccgactggagagacggtcaaggctggtggttctgtcaaccgtcggggtgccaggcacgggcaagtccacactcctcaacaccatgtttgggctgcggtttgccacagggaagagctgcggtcctcgaggggccttcatgcagctcatcacagtggctgagggcttcagccaggacctgggctgtgaccacatcctggtgatagactccgggggcttgataggtggggccttgacgtcagctggggacagatttgagctggaggcttccttggccactctgctcctgggactgagcaatgtcaccgtgatcagtctagctgaaaccaaggacattccagcagctattctgcatgcatttctgaggttagaaaaaacggggcacatgcccaactaccagtttgtataccagaaccttcatgatgtatctgttcccggccctaggcccagagacaagagacagctcctggatccacctggtgacctgagcagggctgcagcccagatggagaaacagggcgacggcttccgggcactggcaggcctggccttctgcgaccctgagaagcagcacatctggcacatcccaggcctgtggcacggagcacctcccatggccgcagtgagcttggcctacagtgaagccatatttgaattgaagagatgcctactcgaaaacatcaggaacggcttgtcgaaccaaaacaaaaacatccagcagctcattgagctggtgagacggctgtgagtgtgcagagaaacccagttcaggtgtaggaggctgctgtgggcagccctgtctgatggggcacccgtgtggggctgtgctctggtgcctgagaatggctggtgcccaatcgacatgagaagacgaggaaaagacagggtttggagtctcctcaacagtgttaaaagaggaagtgacctcacagaccagctcagagatgttaccaagaatatcacagcccccagggtagggagacaagcagcagtttgttctgtctcagctcctgtcaaggatcctgcggggtgggccctctgtatagctgctctctgtcactggcccctggagtgggagcagcgtccttagtcactgcaggcccaggcgggcaggtggtcccaggacagaggtggggaagttgtcctgaggaagcagaagtaggccttgctcccgcccaacccaagggcctccagtggaccagcattcaagatgtgagtgcccgtggtgtgcaaggcactcccatggcaccgtatttattgactgatctgtgaaggcttccctgacccctgcccaggaagagttcactggtcgctctgttgtgccccacagcactttgttatacctctgccacacacttcacgcagcgcgttgtaactcatgtgtttacatgtctgtccccccagactgtgagctccttgagggcagggactgtacattctccagctctgtgtccccagggcctggcacattgtagacgcttaataaatgtctgttaaatgaatgagtgcacaagtgatggt

SEQ ID NO: 434035 - DNA, 3583 bp, Homo sapiens
ggacgcgtgggtcgacccacgcgtccggactcgctgcgctcatggcgtcgcccgggcattcagatttgggagaagtagccccagaaataaaagcatcagagagacgaacagctgtggccattgcagatttggaatggagagaaatggaaggagatgattgcgagttccgttatggagatggtacaaatgaggctcaggacaatgattttccaacagtggagagaagcaggcttcaagaaatgctgtcacttttgggcctagagacgtaccaggtccagaaactcagcctccaggactctctgcagatcagttttgacagtatgaagaactgggcccctcaggttcccaaagacttgccctggaatttcctcaggaagttgcaggccctcaatgctgatgccaggaataccactatggtgctggacgtgctcccagacgccaggcctgtggagaaggagagccagatggaagaggagatcatctactgggacccagctgatgaccttgctgccgacatttattccttttctgagctgcccacccctgatacgccagtgaaccccttagaccttctctgtgccctgctgctctcctcagacagtttcctgcaacaagaaatagcgttgaaaatggccctctgccagtttgcactcccactcgtgttgcctgactcggagaaccactaccatacatttctgctgtgggccatgcggggcattgtgaggacatggtggtcccagcccccaaggggcatggggagcttccgggaagacagcgtggtcttgtccagggcgcccgccttcgccttcgtgcgcatggacgtcagtagcaactccaagtcccagcttctcaacgccgtcctcagcccgggccacaggcagtgggactgcttctggcatcgggacctcaacttgggcaccaatgcccgggagatttcggatgggttggtagaaatttcctggttttttcccagcggaagggaggacttggacattttcccagaacctgtggcctttctgaacctgagaggtgacatcgggtctcactggctgcagtttaagctcttgacagaaatctcctccgctgtgtttatattgactgacaatatcagtaagaaggaatacaaattgctgtactccatgaaggagtcaaccacaaaatactacttcatcctgagtccctaccgtgggaagcgcaacacaaacctgagatttctgaataagttaattcctgtgctgaaaatagaccactcacatgtcctggtaaaggtcagcagcactgacagcgacagcttcgtgaagaggatccgggccatcgttgggaatgtgctgcgggcaccctgcaggcgggtatctgtggaggacatggcgcacgcagcccgcaaactgggcctaaaggtcgacgaggactgtgaggagtgtcagaaagcgaaagaccggatggagaggattaccaggaaaatcaaagactcggatgcctacagaagggacgagctgaggctgcagggggacccctggagaaaggcagcccaagtggagaaggagttctgccagctccagtgggccgtggacccccctgagaagcacagggctgagctgaggcggcggctgctagaacttcgaatgcagcagaacggccatgatccctcctcgggggtgcaggagttcatctcggggatcagcagcccctccttgagtgagaagcagtacttcctgaggtggatggagtggggcctggcacgggtggcccagccgcgactgagacagcctccggagacgcttctcaccctgagaccaaagcacgggggcaccacagacgtgggggagccgctctggcctgagcccctaggggtggaacacttcttgcgggagatgggacagttttatgaggctgagagctgtcttgtggaggcagggaggctgccggcaggccagaggcgttttgcccacttcccaggcttggcctcggagctgctgctgacagggctgcctctggagctaatcgatgggagcacgctgagcatgcccgtccgctgggtcacagggctcctgaaggagctgcacgtccgactggagagacggtcaaggctggtggttctgtcaaccgtcggggtgccaggcacgggcaagtccacactcctcaacaccatgtttgggctgcggtttgccacagggaagagctgcggtcctcgaggggccttcatgcagctcatcacagtggctgagggcttcagccaggacctgggctgtgaccacatcctggtgatagactccgggggcttgataggtggggccttgacgtcagctggggacagatttgagctggaggcttccttggccactctgctcctgggactgagcaatgtcaccgtgatcagtctagctgaaaccaaggacattccagcagctattctgcatgcatttctgaggttagaaaaaacggggcacatgcccaactaccagtttgtataccagaaccttcatgatgtatctgttcccggccctaggcccagagacaagagacagctcctggatccacctggtgacctgagcagggctgcagcccagatggagaaacagggcgacggcttccgggcactggcaggcctggccttctgcgaccctgagaagcagcacatctggcacatcccaggcctgtggcacggagcacctcccatggccgcagtgagcttggcctacagtgaagccatatttgaattgaagagatgcctactcgaaaacatcaggaacggcttgtcgaaccaaaacaaaaacatccagcagctcattgagctggtgagacggctgtgagtgtgcagagaaacccagttcaggtgtaggaggctgctgtgggcagccctgtctgatggggcacccgtgtggggctgtgctctggtgcctgagaatggctggtgcccaatcgacatgagaagacgaggaaaagacagggtttggagtctcctcaacagtgttaaaagaggaagtgacctcacagaccagctcagagatgttaccaagaatatcacagcccccagggtagggagacaagcagcagtttgttctgtctcagctcctgtcaaggatcctgcggggtgggccctctgtatagctgctctctgtcactggcccctggagtgggagcagcgtccttagtcactgcaggcccaggcgggcaggtggtcccaggacagaggtggggaagttgtcctgaggaagcagaagtaggccttgctcccgcccaacccaagggcctccagtggaccagcattcaagatgtgagtgcccgtggtgtgcaaggcactcccatggcaccgtatttattgactgatctgtgaaggcttccctgacccctgcccaggaagagttcactggtcgctctgttgtgccccacagcactttgttatacctctgccacacacttcacgcagcgcgttgtaactcatgtgtttacatgtctgtccccccagactgtgagctccttgagggcagggactgtacattctccagctctgtgtccccagggcctggcacattgtagacgcttaataaatgtctgttaaatgaatgagtgcacaagtgatggt

SEQ ID NO: 434036 - DNA, 3259 bp, Homo sapiens
tgtattggtggtgctctcagccgctctggcctgagcccctaggggtggaacacttcttgcgggagatgggacagttgtatgaggctgagagctgacctgaggaggcagggaggctgccggcaggccagaaggagagccagatggaagaggagatcatctactgggacccagctgatgaccttgctgccgacatttattccttttctgagctgcccacccctgatacgccagtgaaccccttagaccttctctgtgccctgctgctctcctcagacagtttcctgcaacaagaaatagcgttgaaaatggccctctgccagtttgcactcccactcgtgttgcctgactcggagaaccactaccatacatttctgctgtgggccatgcggggcattgtgaggacatggtggtcccagcccccaaggggcatggggagcttccgggaagacagcgtggtcttgtccagggcgcccgccttcgccttcgtgcgcatggacgtcagtagcaactccaagtcccagcttctcaacgccgtcctcagcccgggccacaggcagtgggactgcttctggcatcgggacctcaacttgggcaccaatgcccgggagatttcggatgggttggtagaaatttcctggttttttcccagcggaagggaggacttggacattttcccagaacctgtggcctttctgaacctgagaggtgacatcgggtctcactggctgcagtttaagctcttgacagaaatctcctccgctgtgtttatattgactgacaatatcagtaagaaggaatacaaattgctgtactccatgaaggagtcaaccacaaaatactacttcatcctgagtccctaccgtgggaagcgcaacacaaacctgagatttctgaataagttaattcctgtgctgaaaatagaccactcacatgtcctggtaaaggtcagcagcactgacagcgacagcttcgtgaagaggatccgggccatcgttgggaatgtgctgcgggcaccctgcaggcgggtatctgtggaggacatggcgcacgcagcccgcaaactgggcctaaaggtcgacgaggactgtgaggagtgtcagaaagcgaaagaccggatggagaggattaccaggaaaatcaaagactcggatgcctacagaagggacgagctgaggctgcagggggacccctggagaaaggcagcccaagtggagaaggagttctgccagctccagtgggccgtggacccccctgagaagcacagggctgagctgaggcggcggctgctagaacttcgaatgcagcagaacggccatgatccctcctcgggggtgcaggagttcatctcggggatcagcagcccctccttgagtgagaagcagtacttcctgaggtggatggagtggggcctggcacgggtggcccagccgcgactgagacagcctccggagacgcttctcaccctgagaccaaagcacgggggcaccacagacgtgggggagccgctctggcctgagcccctaggggtggaacacttcttgcgggagatgggacagttttatgaggctgagagctgtcttgtggaggcagggaggctgccggcaggccagaggcgttttgcccacttcccaggcttggcctcggagctgctgctgacagggctgcctctggagctaatcgatgggagcacgctgagcatgcccgtccgctgggtcacagggctcctgaaggagctgcacgtccgactggagagacggtcaaggctggtggttctgtcaaccgtcggggtgccaggcacgggcaagtccacactcctcaacaccatgtttgggctgcggtttgccacagggaagagctgcggtcctcgaggggccttcatgcagctcatcacagtggctgagggcttcagccaggacctgggctgtgaccacatcctggtgatagactccgggggcttgataggtggggccttgacgtcagctggggacagatttgagctggaggcttccttggccactctgctcctgggactgagcaatgtcaccgtgatcagtctagctgaaaccaaggacattccagcagctattctgcatgcatttctgaggttagaaaaaacggggcacatgcccaactaccagtttgtataccagaaccttcatgatgtatctgttcccggccctaggcccagagacaagagacagctcctggatccacctggtgacctgagcagggctgcagcccagatggagaaacagggcgacggcttccgggcactggcaggcctggccttctgcgaccctgagaagcagcacatctggcacatcccaggcctgtggcacggagcacctcccatggccgcagtgagcttggcctacagtgaagccatatttgaattgaagagatgcctactcgaaaacatcaggaacggcttgtcgaaccaaaacaaaaacatccagcagctcattgagctggtgagacggctgtgagtgtgcagagaaacccagttcaggtgtaggaggctgctgtgggcagccctgtctgatggggcacccgtgtggggctgtgctctggtgcctgagaatggctggtgcccaatcgacatgagaagacgaggaaaagacagggtttggagtctcctcaacagtgttaaaagaggaagtgacctcacagaccagctcagagatgttaccaagaatatcacagcccccagggtagggagacaagcagcagtttgttctgtctcagctcctgtcaaggatcctgcggggtgggccctctgtatagctgctctctgtcactggcccctggagtgggagcagcgtccttagtcactgcaggcccaggcgggcaggtggtcccaggacagaggtggggaagttgtcctgaggaagcagaagtaggccttgctcccgcccaacccaagggcctccagtggaccagcattcaagatgtgagtgcccgtggtgtgcaaggcactcccatggcaccgtatttattgactgatctgtgaaggcttccctgacccctgcccaggaagagttcactggtcgctctgttgtgccccacagcactttgttatacctctgccacacacttcacgcagcgcgttgtaactcatgtgtttacatgtctgtccccccagactgtgagctccttgagggcagggactgtacattctccagctctgtgtccccagggcctggcacattgtagacgcttaataaatgtctgttaaatgaatgagtgcacaagtgatggt

SEQ ID NO: 434037 - DNA, 2089 bp, Homo sapiens
taaggatagtaactacaatcccaaatagactctgtagcagcaatgactctccaaaaccacagaggtctagacctcctcactgctgagaaaggaggactttgcaccttcttaggggaagactgctgcttttacactaaccagtcagggatactaagagatgccacccggtgtttacaggaaaaggcttctgaaatcaggcaacacctttcaaactcttataccaacctctggagtggggcctggcacgggtggcccagccgcgactgagacagcctccggagacgcttctcaccctgagaccaaagcacgggggcaccacagacgtgggggagccgctctggcctgagcccctaggggtggaacacttcttgcgggagatgggacagttttatgaggctgagagctgtcttgtggaggcagggaggctgccggcaggccagaggcgttttgcccacttcccaggcttggcctcggagctgctgctgacagggctgcctctggagctaatcgatgggagcacgctgagcatgcccgtccgctgggtcacagggctcctgaaggagctgcacgtccgactggagagacggtcaaggctggtggttctgtcaaccgtcggggtgccaggcacgggcaagtccacactcctcaacaccatgtttgggctgcggtttgccacagggaagagctgcggtcctcgaggggccttcatgcagctcatcacagtggctgagggcttcagccaggacctgggctgtgaccacatcctggtgatagactccgggggcttgataggtggggccttgacgtcagctggggacagatttgagctggaggcttccttggccactctgctcctgggactgagcaatgtcaccgtgatcagtctagctgaaaccaaggacattccagcagctattctgcatgcatttctgaggttagaaaaaacggggcacatgcccaactaccagtttgtataccagaaccttcatgatgtatctgttcccggccctaggcccagagacaagagacagctcctggatccacctggtgacctgagcagggctgcagcccagatggagaaacagggcgacggcttccgggcactggcaggcctggccttctgcgaccctgagaagcagcacatctggcacatcccaggcctgtggcacggagcacctcccatggccgcagtgagcttggcctacagtgaagccatatttgaattgaagagatgcctactcgaaaacatcaggaacggcttgtcgaaccaaaacaaaaacatccagcagctcattgagctggtgagacggctgtgagtgtgcagagaaacccagttcaggtgtaggaggctgctgtgggcagccctgtctgatggggcacccgtgtggggctgtgctctggtgcctgagaatggctggtgcccaatcgacatgagaagacgaggaaaagacagggtttggagtctcctcaacagtgttaaaagaggaagtgacctcacagaccagctcagagatgttaccaagaatatcacagcccccagggtagggagacaagcagcagtttgttctgtctcagctcctgtcaaggatcctgcggggtgggccctctgtatagctgctctctgtcactggcccctggagtgggagcagcgtccttagtcactgcaggcccaggcgggcaggtggtcccaggacagaggtggggaagttgtcctgaggaagcagaagtaggccttgctcccgcccaacccaagggcctccagtggaccagcattcaagatgtgagtgcccgtggtgtgcaaggcactcccatggcaccgtatttattgactgatctgtgaaggcttccctgacccctgcccaggaagagttcactggtcgctctgttgtgccccacagcactttgttatacctctgccacacacttcacgcagcgcgttgtaactcatgtgtttacatgtctgtccccccagactgtgagctccttgagggcagggactgtacattctccagctctgtgtccccagggcctggcacattgtagacgcttaataaatgtctgttaaatgaatgagtgcacaagtgatggt

SEQ ID NO: 434038 - DNA, 1766 bp, Homo sapiens
cggccgcgcgggcgtggggggcgggcgggggcgccggcggaggacagcggtcccccgggatgcgggggtccgggtacgcgggcctaggggatccggggagggcgcgaggcccggaggtgcccggggcgcggcgggagcgagggcccggcgagcggctggggaaccggggtgcgggtcctcgccgcggcccggggcaacccgcggaggcctggaaatgcttcgctccggcgcctggtatcgatgttcctgggttttaaacttgctcgcgttgggagtggacgcttgtttgccgcgtcgttgagacgtacccagaatgtcaggatccgggcagatgcagaccctttgctgacagccggagagccgctccgggatctccttggtcggggccattgcctaccggcctgccttggggtggctgcgcttattttgatattacctcttttcaacttttttgatttaaatgttattccttttaggaaatgatggcgacacatatagtttgtaatttttgagaaaaaattctcacttggcaaactaaaacctcagtaattcattatttttttgttttttgttttgataattttactagtactgaaatttgggaatgacagtccaacactttcattttacaaagaaagaaattaggctcaaggtcatcgctttagttgttaaaattcttctttgactgttacccatcattcagagggtcttggatctagtggctgtgatagccattcagaacagttcccaaagagctttacaggatagaagtggaattactgggcaaagggcattcagatttgggagaagtagccccagaaataaaagcatcagagagacgaacagctgtggccattgcagatttggaatggagagaaatggaaggagatgattgcgagttccgttatggaggtagaaactacaggatttggcaacagattggactggggagagggggagtgggtaaagtgacagataaccgggattttatatttagaacaattgggagaagttgccatcttggtgagaaagaagggttctaggtttagcttcaattaatttgtgtcagccaagggtgcattatttgattgacacttcattttccattgctttttccatagatggtacaaatgaggctcaggacaatgattttccaacaggtgctgtcctggagccgagagctgccttgcgcttggcgcgccctgcacacctccccggtctgcgccaagaaccgggcggcccgagtacgcgtaagcaagggggacaagccggtgacctacgaggaggcacacgcgccgcactacatcgcccaccgtaaaggctggctgtcgctgcacacaggtaacctggatggagaggaccatgccgcagagcgaacggtggaggatgttttccttcgcaagttcatgtggggtaccttcccaggctgcctggctgaccagctggttttaaagcgccggggtaaccagttggagatctgtgccgtggtcctgaggcagttgtctccacacaagtactacttcctcgtgggctacagtgaaactttgctgtcctacttttacaaatgtcctgtgcgactccacctccaaactgtgccctcaaaggttgtgtataagtacctctagaacaatccccttttttccatcaagctgtagcctgcagagaatggaaacgtgggaaaggaatggtatgtgggggaaatgcatcccctcagaggactgaggcatagtctctcatctgctattgaataaagaccttctatcttg

SEQ ID NO: 434039 - DNA, 833 bp, Homo sapiens
gcggccgcgcggaggaagcgaaggaggcgggagcggagacctcgctgcgctcatggcgtcgcccgggcattcagatttgggagaagtagccccagaaataaaagcatcagagagacgaacagctgtggccattgcagatttggaatggagagaaatggaaggagatgattgcgagttccgttatggagatggtacaaatgaggctcaggacaatgattttccaacaggtgctgtcctggagccgagagctgccttgcgcttggcgcgccctgcacacctccccggtctgcgccaagaaccgggcggcccgagtacgcgtaagcaagggggacaagccggtgacctacgaggaggcacacgcgccgcactacatcgcccaccgtaaaggctggctgtcgctgcacacaggtaacctggatggagaggaccatgccgcagagcgaacggtggaggatgttttccttcgcaagttcatgtggggtaccttcccaggctgcctggctgaccagctggttttaaagcgccggggtaaccagttggagatctgtgccgtggtcctgaggcagttgtctccacacaagtactacttcctcgtgggctacagtgaaactttgctgtcctacttttacaaatgtcctgtgcgactccacctccaaactgtgccctcaaaggttgtgtataagtacctctagaacaatccccttttttccatcaagctgtagcctgcagagaatggaaacgtgggaaaggaatggtatgtgggggaaatgcatcccctcagaggactgaggcatagtctctcatctgctattgaataaagaccttctatcttg

SEQ ID NO: 434040 - DNA, 3567 bp, Homo sapiens
gcggccgcgcggaggaagcgaaggaggcgggagcggagacctcgctgcgctcatggcgtcgcccgggatagaagtggaattactgggcaaagggcattcagatttgggagaagtagccccagaaataaaagcatcagagagacgaacagctgtggccattgcagatttggaatggagagaaatggaaggagatgattgcgagttccgttatggagatggtacaaatgaggctcaggacaatgattttccaacagtggagagaagcaggcttcaagaaatgctgtcacttttgggcctagagacgtaccaggtccagaaactcagcctccaggactctctgcagatcagttttgacagtatgaagaactgggcccctcaggttcccaaagacttgccctggaatttcctcaggaagttgcaggccctcaatgctgatgccaggaataccactatggtgctggacgtgctcccagacgccaggcctgtggagaaggagagccagatggaagaggagatcatctactgggacccagctgatgaccttgctgccgacatttattccttttctgagctgcccacccctgatacgccagtgaaccccttagaccttctctgtgccctgctgctctcctcagacagtttcctgcaacaagaaatagcgttgaaaatggccctctgccagtttgcactcccactcgtgttgcctgactcggagaaccactaccatacatttctgctgtgggccatgcggggcattgtgaggacatggtggtcccagcccccaaggggcatggggagcttccgggaagacagcgtggtcttgtccagggcgcccgccttcgccttcgtgcgcatggacgtcagtagcaactccaagtcccagcttctcaacgccgtcctcagcccgggccacaggcagtgggactgcttctggcatcgggacctcaacttgggcaccaatgcccgggagatttcggatgggttggtagaaatttcctggttttttcccagcggaagggaggacttggacattttcccagaacctgtggcctttctgaacctgagaggtgacatcgggtctcactggctgcagtttaagctcttgacagaaatctcctccgctgtgtttatattgactgacaatatcagtaagaaggaatacaaattgctgtactccatgaaggagtcaaccacaaaatactacttcatcctgagtccctaccgtgggaagcgcaacacaaacctgagatttctgaataagttaattcctgtgctgaaaatagaccactcacatgtcctggtaaaggtcagcagcactgacagcgacagcttcgtgaagaggatccgggccatcgttgggaatgtgctgcgggcaccctgcaggcgggtatctgtggaggacatggcgcacgcagcccgcaaactgggcctaaaggtcgacgaggactgtgaggagtgtcagaaagcgaaagaccggatggagaggattaccaggaaaatcaaagactcggatgcctacagaagggacgagctgaggctgcagggggacccctggagaaaggcagcccaagtggagaaggagttctgccagctccagtgggccgtggacccccctgagaagcacagggctgagctgaggcggcggctgctagaacttcgaatgcagcagaacggccatgatccctcctcgggggtgcaggagttcatctcggggatcagcagcccctccttgagtgagaagcagtacttcctgaggtggatggagtggggcctggcacgggtggcccagccgcgactgagacagcctccggagacgcttctcaccctgagaccaaagcacgggggcaccacagacgtgggggagccgctctggcctgagcccctaggggtggaacacttcttgcgggagatgggacagttttatgaggctgagagctgtcttgtggaggcagggaggctgccggcaggccagaggcgttttgcccacttcccaggcttggcctcggagctgctgctgacagggctgcctctggagctaatcgatgggagcacgctgagcatgcccgtccgctgggtcacagggctcctgaaggagctgcacgtccgactggagagacggtcaaggctggtggttctgtcaaccgtcggggtgccaggcacgggcaagtccacactcctcaacaccatgtttgggctgcggtttgccacagggaagagctgcggtcctcgaggggccttcatgcagctcatcacagtggctgagggcttcagccaggacctgggctgtgaccacatcctggtgatagactccgggggcttgataggtggggccttgacgtcagctggggacagatttgagctggaggcttccttggccactctgctcctgggactgagcaatgtcaccgtgatcagtctagctgaaaccaaggacattccagcagctattctgcatgcatttctgaggttagaaaaaacggggcacatgcccaactaccagtttgtataccagaaccttcatgatgtatctgttcccggccctaggcccagagacaagagacagctcctggatccacctggtgacctgagcagggctgcagcccagatggagaaacagggcgacggcttccgggcactggcaggcctggccttctgcgaccctgagaagcagcacatctggcacatcccaggcctgtggcacggagcacctcccatggccgcagtgagcttggcctacagtgaagccatatttgaattgaagagatgcctactcgaaaacatcaggaacggcttgtcgaaccaaaacaaaaacatccagcagctcattgagctggtgagacggctgtgagtgtgcagagaaacccagttcaggtgtaggaggctgctgtgggcagccctgtctgatggggcacccgtgtggggctgtgctctggtgcctgagaatggctggtgcccaatcgacatgagaagacgaggaaaagacagggtttggagtctcctcaacagtgttacccccagggtagggagacaagcagcagtttgttctgtctcagctcctgtcaaggatcctgcggggtgggccctctgtatagctgctctctgtcactggcccctggagtgggagcagcgtccttagtcactgcaggcccaggcgggcaggtggtcccaggacagaggtggggaagttgtcctgaggaagcagaagtaggccttgctcccgcccaacccaagggcctccagtggaccagcattcaagatgtgagtgcccgtggtgtgcaaggcactcccatggcaccgtatttattgactgatctgtgaaggcttccctgacccctgcccaggaagagttcactggtcgctctgttgtgccccacagcactttgttatacctctgccacacacttcacgcagcgcgttgtaactcatgtgtttacatgtctgtccccccagactgtgagctccttgagggcagggactgtacattctccagctctgtgtccccagggcctggcacattgtagacgcttaataaatgtctgttaaatgaatgagtgcacaagtgatggt

SEQ ID NO: 434041 - DNA, 2899 bp, Homo sapiens
gcggccgcgcggaggaagcgaaggaggcgggagcggagacctcgctgcgctcatggcgtcgcccgggatagaagtggaattactgggcaaagggcattcagatttgggagaagtagccccagaaataaaagcatcagagagacgaacagctgtggccattgcagatttggaatggagagaaatggaaggagatgattgcgagttccgttatggagatggtacaaatgaggctcaggacaatgattttccaacagtggagagaagcaggcttcaagaaatgctgtcacttttgggcctagagacgtaccaggtccagaaactcagcctccaggactctctgcagatcagttttgacagtatgaagaactgggcccctcaggttcccaaagacttgccctggaatttcctcaggaagttgcaggccctcaatgctgatgccaggaataccactatggtgctggacgtgctcccagacgccaggcctgtggagaaggagagccagatggaagaggagatcatctactgggacccagctgatgaccttgctgccgacatttattccttttctgagctgcccacccctgatacgccagtgaaccccttagaccttctctgtgccctgctgctctcctcagacagtttcctgcaacaagaaatagcgttgaaaatggccctctgccagtttgcactcccactcgtgttgcctgactcggagaaccactaccatacatttctgctgtgggccatgcggggcattgtgaggacatggtggtcccagcccccaaggggcatggggagcttccgggaagacagcgtggtcttgtccagggcgcccgccttcgccttcgtgcgcatggacgtcagtagcaactccaagtcccagcttctcaacgccgtcctcagcccgggccacaggcagtgggactgcttctggcatcgggacctcaacttgggcaccaatgcccgggagatttcggatgggttggtagaaatttcctggttttttcccagcggaagggaggacttggacattttcccagaacctgtggcctttctgaacctgagaggtgacatcgggtctcactggctgcagtttaagctcttgacagaaatctcctccgctgtgtttatattgactgacaatatcagtaagaaggaatacaaattgctgtactccatgaaggagtcaaccacaaaatactacttcatcctgagtccctaccgtgggaagcgcaacacaaacctgagatttctgaataagttaattcctgtgctgaaaatagaccactcacatgtcctggtaaaggtcagcagcactgacagcgacagcttcgtgaagaggatccgggccatcgttgggaatgtgctgcgggcaccctgcaggcgggtatctgtggaggacatggcgcacgcagcccgcaaactgggcctaaaggtcgacgaggactgtgaggagtgtcagaaagcgaaagaccggatggagaggattaccaggaaaatcaaagactcggatgcctacagaagggacgagctgaggctgcagggggacccctggagaaaggcagcccaagtggagaaggagttctgccagctccagtgggccgtggacccccctgagaagcacagggctgagctgaggcggcggctgctagaacttcgaatgcagcagaacggccatgatccctcctcgggggtgcaggagttcatctcggggatcagcagcccctccttgagtgagaagcagtacttcctgaggtggatggagtggggcctggcacgggtggcccagccgcgactgagacagcctccggagacgcttctcaccctgagaccaaagcacgggggcaccacagacgtgggggagccgctctggcctgagcccctaggggtggaacacttcttgcgggagatgggacagttttatgaggctgagagctgtcttgtggaggcagggaggctgccggcaggccagaggcgttttgcccacttcccaggcttggcctcggagctgctgctgacagggctgcctctggagctaatcgatgggagcacgctgagcatgcccgtccgctgggtcacagggctcctgaaggagctgcacgtccgactggagagacggtcaaggctggtggttctgtcaaccgtcggggtgccaggcacgggcaagtccacactcctcaacaccatgtttgggctgcggtttgccacagggaagagctgcggtcctcgaggggccttcatgcagctcatcacagtggctgagggcttcagccaggacctgggctgtgaccacatcctggtgatagactccgggggcttgataggtggggccttgacgtcagctggggacagatttgagctggaggcttccttggccactctgctcctgggactgagcaatgtcaccgtgatcagtctagctgaaaccaaggacattccagcagctattctgcatgcatttctgaggttagaaaaaacggggcacatgcccaactaccagtttgtataccagaaccttcatgatgtatctgttcccggccctaggcccagagacaagagacagctcctggatccacctggtgacctgagcagggctgcagcccagatggagaaacagggcgacggcttccgggcactggcaggcctggccttctgcgaccctgagaagcagcacatctggcacatcccaggcctgttgtgccccacagcactttgttatacctctgccacacacttcacgcagcgcgttgtaactcatgtgtttacatgtctgtccccccagactgtgagctccttgagggcagggactgtacattctccagctctgtgtccccagggcctggcacattgtagacgcttaataaatgtctgttaaatgaatgagtgcacaagtgatggt

SEQ ID NO: 434042 - DNA, 909 bp, Homo sapiens
  misc_feature (814)..(814): n is a, c, g, or t
  misc_feature (818)..(818): n is a, c, g, or t
  misc_feature (824)..(824): n is a, c, g, or t
  misc_feature (832)..(832): n is a, c, g, or t
  misc_feature (834)..(834): n is a, c, g, or t
  misc_feature (836)..(836): n is a, c, g, or t
  misc_feature (845)..(845): n is a, c, g, or t
  misc_feature (853)..(853): n is a, c, g, or t
  misc_feature (864)..(864): n is a, c, g, or t
gtggtacgtcccgagctcggctgggcccaagatggcggcctccgtgtgcagcgggttgctggggccacggtgagtggggcgactcggcaggtccctgcgagtcggaggtggggtccctagtttccgcctcacgcgccctccctccacaggtgctgtcctggagccgagagctgccttgcgcttggcgcgccctgcacacctccccggtctgcgccaagaaccgggcggcccgagtacgcgtaagcaagggggacaagccggtgacctacgaggaggcacacgcgccgcactacatcgcccaccgtaaaggctggctgtcgctgcacacaggtaacctggatggagaggaccatgccgcagagcgaacggtggaggatgttttccttcgcaagttcatgtggggtaccttcccaggctgcctggctgaccagctggttttaaagcgccggggtaaccagttggagatctgtgccgtggtcctgaggcagttgtctccacacaagtactacttcctcgtgggctacagtgaaactttgctgtcctacttttacaaatgtcctgtgcgactccacctccaaactgtgccctcaaaggttgtgtataagtacctctagaacaatccccttttttccatcaagctgtagcctgcagagaatggaaacgtgggaaaggaatggtatgtgggggaaatgcatcccctcagaggactgaggcatagtctctcatctgctattgaataaagaccttctatcttgaaaaaacacaaaaaaaaaaaaaacccgggggttttttgcgggggggggaaaaggggttngaangggccntgggtctngngnttctggccngtttttgncaagggggaantcgcgggtccccaaaagggggggataaattgaaaagccggtacta

SEQ ID NO: 434043 - DNA, 1567 bp, Homo sapiens
cggccgcgcgggcgtggggggcgggcgggggcgccggcggaggacagcggtcccccgggatgcgggggtccgggtacgcgggcctaggggatccggggagggcgcgaggcccggaggtgcccggggcgcggcgggagcgagggcccggcgagcggctggggaaccggggtgcgggtcctcgccgcggcccggggcaacccgcggaggcctggaaatgcttcgctccggcgcctggtatcgatgttcctgggttttaaacttgctcgcgttgggagtggacgcttgtttgccgcgtcgttgagacgtacccagaatgtcaggatccgggcagatgcagaccctttgctgacagccggagagccgctccgggatctccttggtcggggccattgcctaccggcctgccttggggtggctgcgcttattttgatattacctcttttcaacttttttgatttaaatgttattccttttaggaaatgatggcgacacatatagtttgtaatttttgagaaaaaattctcacttggcaaactaaaacctcagtaattcattatttttttgttttttgttttgataattttactagtactgaaatttgggaatgacagtccaacactttcattttacaaagaaagaaattaggctcaaggtcatcgctttagttgttaaaattcttctttgactgttacccatcattcagagggtcttggatctagtggctgtgatagccattcagaacagttcccaaagagctttacaggatagaagtggaattactgggcaaagggcattcagatttgggagaagtagccccagaaataaaagcatcagagagacgaacagctgtggccattgcagatttggaatggagagaaatggaaggagatgattgcgagttccgttatggaggtagaaactacaggatttggcaacagattggactggggagagggggagtgggtaaagtgacagataaccgggattttatatttagaacaattgggagaagttgccatcttggtgagaaagaagggttctaggtttagcttcaattaatttgtgtcagccaagggtgcattatttgattgacacttcattttccattgctttttccatagatggtacaaatgaggctcaggacaatgattttccaacaggtgctgtcctggagccgagagctgccttgcgcttggcgcgccctgcacacctccccggtctgcgccaagaaccgggcggcccgagtacgcgtaagcaagggggtaaccagttggagatctgtgccgtggtcctgaggcagttgtctccacacaagtactacttcctcgtgggctacagtgaaactttgctgtcctacttttacaaatgtcctgtgcgactccacctccaaactgtgccctcaaaggttgtgtataagtacctctagaacaatccccttttttccatcaagctgtagcctgcagagaatggaaacgtgggaaaggaatggtatgtgggggaaatgcatcccctcagaggactgaggcatagtctctcatctgctattgaataaagaccttctatcttg

SEQ ID NO: 434044 - DNA, 573 bp, Homo sapiens
gtggtacgtcccgagctcggctgggcccaagatggcggcctccgtgtgcagcgggttgctggggccacgggtgctgtcctggagccgagagctgccttgcgcttggcgcgccctgcacacctccccggtctgcgccaagaaccgggcggcccgagtacgcgtaagcaagggggacaagccggtgacctacgaggaggcacacgcgccgcactacatcgcccaccgtaaaggctggctgtcgctgcacacaggtaacctggatggagaggaccatgccgcagagcgaacggtggaggatgttttccttcgcaagttcatgtggggtaccttcccaggctgcctggctgaccagctggttttaaagcgccggggtaaccagttggagatctgtgccgtggtcctgaggcagttgtctccacacaatacctctagaacaatccccttttttccatcaagctgtagcctgcagagaatggaaacgtgggaaaggaatggtatgtgggggaaatgcatcccctcagaggactgaggcatagtctctcatctgctattgaataaagaccttctatcttg

SEQ ID NO: 434045 - DNA, 1297 bp, Homo sapiens
cggccgcgcgggcgtggggggcgggcgggggcgccggcggaggacagcggtcccccgggatgcgggggtccgggtacgcgggcctaggggatccggggagggcgcgaggcccggaggtgcccggggcgcggcgggagcgagggcccggcgagcggctggggaaccggggtgcgggtcctcgccgcggcccggggcaacccgcggaggcctggaaatgcttcgctccggcgcctggtatcgatgttcctgggttttaaacttgctcgcgttgggagtggacgcttgtttgccgcgtcgttgagacgtacccagaatgtcaggatccgggcagatgcagaccctttgctgacagccggagagccgctccgggatctccttggtcggggccattgcctaccggcctgccttggggtggctgcgcttattttgatattacctcttttcaacttttttgatttaaatgttattccttttaggaaatgatggcgacacatatagtttgtaatttttgagaaaaaattctcacttggcaaactaaaacctcagtaattcattatttttttgttttttgttttgataattttactagtactgaaatttgggaatgacagtccaacactttcattttacaaagaaagaaattaggctcaaggtcatcgctttagttgttaaaattcttctttgactgttacccatcattcagagggtcttggatctagtggctgtgatagccattcagaacagttcccaaagagctttacaggatagaagtggaattactgggcaaagggcattcagatttgggagaagtagccccagaaataaaagcatcagagagacgaacagctgtggccattgcagatttggaatggagagaaatggaaggagatgattgcgagttccgttatggaggtagaaactacaggatttggcaacagattggactggggagagggggagtgggtaaagtgacagataaccgggattttatatttagaacaattgggagaagttgccatcttggtgagaaagaagggttctaggtttagcttcaattaatttgtgtcagccaagggtgcattatttgattgacacttcattttccattgctttttccatagatggtacaaatgaggctcaggacaatgattttccaacaggtaagcattttctctgccttttctctctgttctatgaaagggggttatcatctaggccagcagttcccacacctgactgtatcaaatcacctggggaggcagagcactcaggtttaggatgccctacttcattaacc

SEQ ID NO: 434046 - DNA, 348 bp, Homo sapiens
aaaaaaaaaaaaaatgagccggccatggtgacgctgagacaggagaatcacttgaacccaggaggcagaggttccagtgagctgagatcacgccactgcactccagcctgggggacagagcaagactccatctcagaaacaaacaaacacacaaagcgactccacctccaaactgtgccctcaaaggttgtgtataagtacctctagaacaatccccttttttccatcaagctgtagcctgcagagaatggaaacgtgggaaaggaatggtatgtgggggaaatgcatcccctcagaggactgaggcatagtctctcatctgctattgaataaagaccttctatcttg

SEQ ID NO: 434047 - DNA, 3065 bp, Homo sapiens
agcggagggcattcccggcggctccgggtttggcaacgaggacgggggagtgcgactgcgtctcgggcagcatggccgagaagcggcacacacgggactccgaagcccagcggctccccgactccttcaaggacagccccagtaagggccttggaccttgcggatggattttggtggcgttctcattcttattcaccgttataactttcccaatctcaatatggatgtgcataaagattataaaagagtatgaaagagccatcatctttagattgggtcgcattttacaaggaggagccaaaggacctggtttgttttttattctgccatgcactgacagcttcatcaaagtggacatgagaactatttcatttgatattcctcctcaggagatcctcacaaaggattcagtgacaattagcgtggatggtgtggtctattaccgcgttcagaatgcaaccctggctgtggcaaatatcaccaacgctgactcagcaacccgtcttttggcacaaactactctgaggaatgttctgggcaccaagaatctttctcagatcctctctgacagagaagaaattgcacacaacatgcagtctactctggatgatgccactgatgcctggggaataaaggtggagcgtgtggaaattaaggatgtgaaactacctgtgcagctccagagagctatggctgcagaagcagaagcgtcccgcgaggcccgcgccaaggttattgcagccgaaggagaaatgaatgcatccagggctctgaaagaagcctccatggtcatcactgaatctcctgcagcccttcagctccgatacctgcagacactgaccaccattgctgctgagaaaaactcaacaattgtcttccctctgcccatagatatgctgcaaggaatcataggggcaaaacacagccatctaggctagtgtagagatgagcgctagccttccaagcatgaagtcggggaccaaattagcctttaactcataaagagagggtagggcttttctttttccatatgtcaattgtggtgttcccagaatgtatagcagttataaaaataggtgaaagaattgttagcttgtaaatactgagagattggtgatttatataaggtaatctgttagtcttaaaatagttaaaagtttgtatttttagattattatgtagtaggttagatccctcttgttttgacttccactgactcattctgaaccccctaagcacccaggccagaggcaagaacctgggctgtaactgccacctgacaccgctgactggctaaatgctttgcagaaagtgatgaccttacaccacaaccagcttctccaggtcatatgtgccttacctccagagagtctttttttttttttttctgagatggagtttcactcttgttgcccaggctggagtgcaatagcatgatctcggctcactgcaacctccgcctcctgggttcaagagattctcctgcctcagcctccccagtagctgggattacaggctcatgccaccatgcccagctaatttttgtattattattattgttttttagtagagacggggtttcaccatgttggccaggctagtcacgaactcctaacctcaggtgatccacccacctctgcctcccaaagtgctgggattacaggcatgagctaccacacctggtttggagagtcttaattaaggaaatttccctaatgttcatttattttctaaatccagaccgtgtttcagaataatccttacttgagagtagccattttcttgcctgtacttgtcagaactagaggaaatagccaagactaatgaaaaagattactctaacccttaaaagacttttaaattcactactagagtggtcattttaaaaatacatccatgttttaacttatttgagccttctttatgagtaaatgattcctccttgttctgtctttcaaaccagctaaatatttgtcacaaaagtgcttttttctcactgttgcctattttcatatatcaggttttaaatagttttaattttttaataaaattttctctacgttctatatgcaattgttatatatctatttgaatagctgaaggactaaaatacttttttaagagataacttcaggaaaccattatattttactatctgcatgctgttaactgtggtacactgtgaaatatgttgattacaaacccattcattacatagtataaggaattcacagtatattgactatatagtgtctaatgatcttgggcagatactgtcaaacttacaatatctatatagatgtaggtctttttaaatttacctagtcattcttctatcatgtatattgatgctgaaagaggaactggtcagctcctctggacaacaaattcttagtctataatattaggagacatcttctgttttgcaaatgtctgtgaatctgagcaacctggcattctgcttactggccagaaagctggcgggtgacatttgtaacatttcctctttgagactctgagttcacctagagaagtctaagcataacagctttctttcccagcacgagcctttatagctctctttagctcaaccactctgtccatccagccaatggatgtcccttcccctgtaccccaatttcaagcttattttaggaagccttgaactaccatgtatcctggctcctagctgagtttattagaggtatggagcagtgcaacttaaactcaagttgcacttacattttgaattttaaaatgatggttttatctgttgtgtgaagtggttcacccttgaggaccaggagcctccatatcctgactgaaaaccttttctgagacttagagtaacagtacttttggttccttgagttctcctgtctccagataccaaatgaccttgacttttctgccttgtgaattcgtagtccaatcagctgaaattaaatcacttgggagggacgcatagaaggagctctaggaacacagtgccagtgcagaagtttctccaggtggcctccctttccaacaatgtacataataaagtgtatgcactttcactaata

SEQ ID NO: 434048 - DNA, 2067 bp, Homo sapiens
agcggagggcattcccggcggctccgggtttggcaacgaggacgggggagtgcgactgcgtctcgggcagcatggccgagaagcggcacacacgggactccgaagcccagcggctccccgactccttcaaggacagccccagtaagggccttggaccttgcggatggattttggtggcgttctcattcttattcaccgttataactttcccaatctcaatatggatgtgcataaagattataaaagagtatgaaagagccatcatctttagattgggtcgcattttacaaggaggagccaaaggacctggtttgttttttattctgccatgcactgacagcttcatcaaagtggacatgagaactatttcatttgatattcctcctcaggagatcctcacaaaggattcagtgacaattagcgtggatggtgtggtctattaccgcgttcagaatgcaaccctggctgtggcaaatatcaccaacgctgactcagcaacccgtcttttggcacaaactactctgaggaatgttctgggcaccaagaatctttctcagatcctctctgacagagaagaaattgcacacaacatgcagtctactctggatgatgccactgatgcctggggaataaaggtggagcgtgtggaaattaaggatgtgaaactacctgtgcagctccagagagctatggctgcagaagcagaagcgtcccgcgaggcccgcgccaaggttattgcagccgaaggagaaatgaatgcatccagggctctgaaagaagcctccatggtcatcactgaatctcctgcagcccttcagctccgatacctgcagacactgaccaccattgctgctgagaaaaactcaacaattgtcttccctctgcccatagatatgctgcaaggaatcataggggcaaaacacagccatctaggctagtgtagagatgagcgctagccttccaagcatgaagtcggggaccaaattagcctttaactcataaagagagggtagggcttttctttttccatatgtcaattgtggtgttcccagaatgtatagcagttataaaaataggtgaaagaattgttagcttgtaaatactgagagattggtgatttatataaggtaatctgttagtcttaaaatagttaaaagtttgtatttttagattattatgtagtaggttagatccctcttgttttgacttccactgactcattctgaaccccctaagcacccaggccagaggcaagaacctgggctgtaactgccacctgacaccgctgactggctaaatgctttgcagaaagtgatgaccttacaccacaaccagcttctccaggtcatatgtgccttacctccagagagtctttttttttttttttctgagatggagtttcactcttgttgcccaggctggagtgcaatagcatgatctcggctcactgcaacctccgcctcctgggttcaagagattctcctgcctcagcctccccagtagctgggattacaggctcatgccaccatgcccagctaatttttgtattattattattgttttttagtagagacggggtttcaccatgttggccaggctagtcacgaactcctaacctcaggtgatccacccacctctgcctcccaaagtgctgggattacaggcatgagctaccacacctggtttggagagtcttaattaaggaaatttccctaatgttcatttattttctaaatccagaccgtgtttcagaataatccttacttgagagtagccattttcttgcctgtacttgtcagaactagaggaaatagccaagactaatgaaaaagattactctaacccttaaaagacttttaaattcactactagagtggtcattttaaaaatacatccatgttttaacttatttgagccttctttatgagtaaatgattcctccttgttctgtctttcaaaccagctaaatatttgtcacaaaagtgcttttttctcactgttgcctattttcatatatcaggttttaaatagttttaattttttaataaaattttctctacgttctat

SEQ ID NO: 434049 - DNA, 1677 bp, Homo sapiens
caactacaagcaaacagcacaattaatgcaacattcagcaactccagaccagcttttcttacccccatgaagaacgatcaatttaaaaaacacagatctcaggtttcctcccaagctgtcagcgagcgctgctaccggtctagattgccatgtcccaacaacagcaaagccaccctccctcctgcttcttccaggattgctctttaaagggaccagagtgacatactgatgcctggggaataaaggtggagcgtgtggaaattaaggatgtgaaactacctgtgcagctccagagagctatggctgcagaagcagaagcgtcccgcgaggcccgcgccaaggttattgcagccgaaggagaaatgaatgcatccagggctctgaaagaagcctccatggtcatcactgaatctcctgcagcccttcagctccgatacctgcagacactgaccaccattgctgctgagaaaaactcaacaattgtcttccctctgcccatagatatgctgcaaggaatcataggggcaaaacacagccatctaggctagtgtagagatgagcgctagccttccaagcatgaagtcggggaccaaattagcctttaactcataaagagagggtagggcttttctttttccatatgtcaattgtggtgttcccagaatgtatagcagttataaaaataggtgaaagaattgttagcttgtaaatactgagagattggtgatttatataaggtaatctgttagtcttaaaatagttaaaagtttgtatttttagattattatgtagtaggttagatccctcttgttttgacttccactgactcattctgaaccccctaagcacccaggccagaggcaagaacctgggctgtaactgccacctgacaccgctgactggctaaatgctttgcagaaagtgatgaccttacaccacaaccagcttctccaggtcatatgtgccttacctccagagagtctttttttttttttttctgagatggagtttcactcttgttgcccaggctggagtgcaatagcatgatctcggctcactgcaacctccgcctcctgggttcaagagattctcctgcctcagcctccccagtagctgggattacaggctcatgccaccatgcccagctaatttttgtattattattattgttttttagtagagacggggtttcaccatgttggccaggctagtcacgaactcctaacctcaggtgatccacccacctctgcctcccaaagtgctgggattacaggcatgagctaccacacctggtttggagagtcttaattaaggaaatttccctaatgttcatttattttctaaatccagaccgtgtttcagaataatccttacttgagagtagccattttcttgcctgtacttgtcagaactagaggaaatagccaagactaatgaaaaagattactctaacccttaaaagacttttaaattcactactagagtggtcattttaaaaatacatccatgttttaacttatttgagccttctttatgagtaaatgattcctccttgttctgtctttcaaaccagctaaatatttgtcacaaaagtgcttttttctcactgttgcctattttcatatatcaggttttaaatagttttaattttttaataaaattttctctacgttctat

SEQ ID NO: 434050 - DNA, 1218 bp, Homo sapiens
agcggagggcattcccggcggctccgggtttggcaacgaggacgggggagtgcgactgcgtctcgggcagcatggccgagaagcggcacacacgggactccgaagcccagcggctccccgactccttcaaggacagccccagtaagggccttggaccttgcggatggattttggtggcgttctcattcttattcaccgttataactttcccaatctcaatatggatgtgcataaagcatcacaagcattcatcaacaagcagtcattgcacaagcagcccatcccatcttatagcattagcggtcagccatttacacaatgtgcaggcagcccaaaggcacctcgcggtttgttcttaatcattcattgcccatgcgacctgcaccagctttccatccaacaggtgcgcaccatgcagcacactcatttccaatattgcatcatctccatctctccaggcaagcatccgtcgaccacaagcgcattcccatgtggcaccacatatcagcagtcgcgcatcggttggtggatcatattcacctgctgttcacgaattgcacacccttgtgcttgtcgagcaccactcatccaccaaagcgctagacctcaggcaacccctgatcttcttctgcgcacaaaactaactactcgagcgacattggtccttggtgccaccaacagcaatcgtttctacagaatcctacttctcgaccacgacgaagcacacacttgcacacaaaccatgccagtctcactcttgcgcattgatcgccacttgcatgccctgggggcacatcacacggtggacgcagtgctgcacactcacagggattgtgacaataaccttgtgccaggctccagacgagctatgggctggccgcgcaagcagacagctcgtcccagcgaggggcagtcgccaatgggataccgcagcacgaacggcagcacatcgactgcattccaacgggctcttgaaagaagcttcccaaagggtcaattcagttggaatctcaccttggatgcacatgtacagacaccaataacatggcaacactggccagcccattgatggatgcgacacaactccaccacgtttggttaccctagtgcccatgaaatctgcgcaggaggacaacataggggagcgacagcgacacaggccaacggactcagcagacgccacgagccaacatcgaatggcgacaatgcacggacaca

SEQ ID NO: 434051 - DNA, 416 bp, Homo sapiens
acatttcattcacttctgggaaggggtcaactcctacctccataaacctacttcgtgtgtgcctgtgtgtatgtgagaaagaaacagactgtctctctctcttataattcttatttcttcatctttctttggaaaatttattcttctacccacctattaaaatggaaccttaaaacttcttttcagccattgcccttccccgtgggctaaagtaagtttcaccatcaaaaatttcctggggccagggatgtgagatggttctgagagaacaagttcttcagagttaggatgatagggtttgactgctggctttactgtttattgtgtgacctttgctgtttcctcacctgtaaaatgggagaaagtaacagtacctacttcataggagtgttgcgaggattaaatgaattatgtgt

SEQ ID NO: 434052 - DNA, 447 bp, Homo sapiens
  misc_feature (195)..(195): n is a, c, g, or t
  misc_feature (351)..(351): n is a, c, g, or t
ttggaggggccctgaggggctcctctttgtctctgcagggctgaggcaccggcgcgaggtggtgggcaaggagccccatcttcggcggggagcacttcatgctggaggagactgactggtacctgctgaacctcttccgcctctggtggcactatggcatcagcttcctgaggctgcagatgtgggtggaggagntcatggagaagttcatgaggtagggctggcagagctgtggggatggcgttccaggggaaccgagaagaggtgggggaggaaccagcttgcctgtactttgtgaaaaaggaaaaggtccttgctgaattgagccagcacaattcagtgcaggctcanagcaagcccctggcatgaggaatggccgtatttggtccagtagtggcctccctttccaacaatgtacataataaagtgtatgcactttcactaata

SEQ ID NO: 434053 - DNA, 3010 bp, Homo sapiens
agcggagggcattcccggcggctccgggtttggcaacgaggacgggggagtgcgactgcgtctcgggcagcatggccgagaagcggcacacacgggactccgaagcccagcggctccccgactccttcaaggacagccccagtaagggccttggaccttgcggatggattttggtggcgttctcattcttattcaccgttataactttcccaatctcaatatggatgtgcataaagattataaaagagtatgaaagagccatcatctttagattgggtcgcattttacaaggaggagccaaaggacctggtttgttttttattctgccatgcactgacagcttcatcaaagtggacatgagaactatttcatttgatattcctcctcaggagatcctcacaaaggattcagtgacaattagcgtggatggtgtggtctattaccgcgttcagaatgcaaccctggctgtggcaaatatcaccaacgctgactcagcaacccgtcttttggcacaaactactctgaggaatgttctgggcaccaagaatctttctcagatcctctctgacagagaagaaattgcacacaacatgcagtctactctggatgatgccactgatgcctggggaataaaggtggagcgtgtggaaattaaggatgtgaaactacctgtgcagctccagagagctatggctgcagaagcagaagcgtcccgcgaggcccgcgccaaggttattgcagccgaaggagaaatgaatgcatccagggctctgaaagaagcctccatggtcatcactgaatctcctgcagcccttcagctccgatacctgcagacactgaccaccattgctgctgagaaaaactcaacaattgtcttccctctgcccatagatatgctgcaaggaatcataggggcaaaacacagccatctaggctagtgtagagatgagcgctagccttccaagcatgaagtcggggaccaaattagcctttaactcataaagagagggtagggcttttctttttccatatgtcaattgtggtgttcccagaatgtatagcagttataaaaataggtgaaagaattgttagcttgtaaatactgagagattggtgatttatataaggtaatctgttagtcttaaaatagttaaaagtttgtatttttagattattatgtagtaggttagatccctcttgttttgacttccactgactcattctgaaccccctaagcacccaggccagaggcaagaacctgggctgtaactgccacctgacaccgctgactggctaaatgctttgcagaaagtgatgaccttacaccacaaccagcttctccaggtcatatgtgccttacctccagagagtctttttttttttttttctgagatggagtttcactcttgttgcccaggctggagtgcaatagcatgatctcggctcactgcaacctccgcctcctgggttcaagagattctcctgcctcagcctccccagtagctgggattacaggctcatgccaccatgcccagctaatttttgtattattattattgttttttagtagagacggggtttcaccatgttggccaggctagtcacgaactcctaacctcaggtgatccacccacctctgcctcccaaagtgctgggattacaggcatgagctaccacacctggtttggagagtcttaattaaggaaatttccctaatgttcatttattttctaaatccagaccgtgtttcagaataatccttacttgagagtagccattttcttgcctgtacttgtcagaactagaggaaatagccaagactaatgaaaaagattactctaacccttaaaagacttttaaattcactactagagtggtcattttaaaaatacatccatgttttaacttatttgagccttctttatgagtaaatgattcctccttgttctgtctttcaaaccagctaaatatttgtcacaaaagtgcttttttctcactgttgcctattttcatatatcaggttttaaatagttttaattttttaataaaattttctctacgttctatatgcaattgttatatatctatttgaatagctgaaggaatgctgttaactgtggtacactgtgaaatatgttgattacaaacccattcattacatagtataaggaattcacagtatattgactatatagtgtctaatgatcttgggcagatactgtcaaacttacaatatctatatagatgtaggtctttttaaatttacctagtcattcttctatcatgtatattgatgctgaaagaggaactggtcagctcctctggacaacaaattcttagtctataatattaggagacatcttctgttttgcaaatgtctgtgaatctgagcaacctggcattctgcttactggccagaaagctggcgggtgacatttgtaacatttcctctttgagactctgagttcacctagagaagtctaagcataacagctttctttcccagcacgagcctttatagctctctttagctcaaccactctgtccatccagccaatggatgtcccttcccctgtaccccaatttcaagcttattttaggaagccttgaactaccatgtatcctggctcctagctgagtttattagaggtatggagcagtgcaacttaaactcaagttgcacttacattttgaattttaaaatgatggttttatctgttgtgtgaagtggttcacccttgaggaccaggagcctccatatcctgactgaaaaccttttctgagacttagagtaacagtacttttggttccttgagttctcctgtctccagataccaaatgaccttgacttttctgccttgtgaattcgtagtccaatcagctgaaattaaatcacttgggagggacgcatagaaggagctctaggaacacagtgccagtgcagaagtttctccaggtggcctccctttccaacaatgtacataataaagtgtatgcactttcactaata

SEQ ID NO: 434054 - DNA, 2992 bp, Homo sapiens
agcggagggcattcccggcggctccgggtttggcaacgaggacgggggagtgcgactgcgtctcgggcagcatggccgagaagcggcacacacgggactccgaagcccagcggctccccgactccttcaaggacagccccagtaagggccttggaccttgcggatggattttggtggcgttctcattcttattcaccgttataactttcccaatctcaatatggatgtgcataaaggtttgttttttattctgccatgcactgacagcttcatcaaagtggacatgagaactatttcatttgatattcctcctcaggagatcctcacaaaggattcagtgacaattagcgtggatggtgtggtctattaccgcgttcagaatgcaaccctggctgtggcaaatatcaccaacgctgactcagcaacccgtcttttggcacaaactactctgaggaatgttctgggcaccaagaatctttctcagatcctctctgacagagaagaaattgcacacaacatgcagtctactctggatgatgccactgatgcctggggaataaaggtggagcgtgtggaaattaaggatgtgaaactacctgtgcagctccagagagctatggctgcagaagcagaagcgtcccgcgaggcccgcgccaaggttattgcagccgaaggagaaatgaatgcatccagggctctgaaagaagcctccatggtcatcactgaatctcctgcagcccttcagctccgatacctgcagacactgaccaccattgctgctgagaaaaactcaacaattgtcttccctctgcccatagatatgctgcaaggaatcataggggcaaaacacagccatctaggctagtgtagagatgagcgctagccttccaagcatgaagtcggggaccaaattagcctttaactcataaagagagggtagggcttttctttttccatatgtcaattgtggtgttcccagaatgtatagcagttataaaaataggtgaaagaattgttagcttgtaaatactgagagattggtgatttatataaggtaatctgttagtcttaaaatagttaaaagtttgtatttttagattattatgtagtaggttagatccctcttgttttgacttccactgactcattctgaaccccctaagcacccaggccagaggcaagaacctgggctgtaactgccacctgacaccgctgactggctaaatgctttgcagaaagtgatgaccttacaccacaaccagcttctccaggtcatatgtgccttacctccagagagtctttttttttttttttctgagatggagtttcactcttgttgcccaggctggagtgcaatagcatgatctcggctcactgcaacctccgcctcctgggttcaagagattctcctgcctcagcctccccagtagctgggattacaggctcatgccaccatgcccagctaatttttgtattattattattgttttttagtagagacggggtttcaccatgttggccaggctagtcacgaactcctaacctcaggtgatccacccacctctgcctcccaaagtgctgggattacaggcatgagctaccacacctggtttggagagtcttaattaaggaaatttccctaatgttcatttattttctaaatccagaccgtgtttcagaataatccttacttgagagtagccattttcttgcctgtacttgtcagaactagaggaaatagccaagactaatgaaaaagattactctaacccttaaaagacttttaaattcactactagagtggtcattttaaaaatacatccatgttttaacttatttgagccttctttatgagtaaatgattcctccttgttctgtctttcaaaccagctaaatatttgtcacaaaagtgcttttttctcactgttgcctattttcatatatcaggttttaaatagttttaattttttaataaaattttctctacgttctatatgcaattgttatatatctatttgaatagctgaaggactaaaatacttttttaagagataacttcaggaaaccattatattttactatctgcatgctgttaactgtggtacactgtgaaatatgttgattacaaacccattcattacatagtataaggaattcacagtatattgactatatagtgtctaatgatcttgggcagatactgtcaaacttacaatatctatatagatgtaggtctttttaaatttacctagtcattcttctatcatgtatattgatgctgaaagaggaactggtcagctcctctggacaacaaattcttagtctataatattaggagacatcttctgttttgcaaatgtctgtgaatctgagcaacctggcattctgcttactggccagaaagctggcgggtgacatttgtaacatttcctctttgagactctgagttcacctagagaagtctaagcataacagctttctttcccagcacgagcctttatagctctctttagctcaaccactctgtccatccagccaatggatgtcccttcccctgtaccccaatttcaagcttattttaggaagccttgaactaccatgtatcctggctcctagctgagtttattagaggtatggagcagtgcaacttaaactcaagttgcacttacattttgaattttaaaatgatggttttatctgttgtgtgaagtggttcacccttgaggaccaggagcctccatatcctgactgaaaaccttttctgagacttagagtaacagtacttttggttccttgagttctcctgtctccagataccaaatgaccttgacttttctgccttgtgaattcgtagtccaatcagctgaaattaaatcacttgggagggacgcatagaaggagctctaggaacacagtgccagtgcagaagtttctccaggtggcctccctttccaacaatgtacataataaagtgtatgcactttcactaata

SEQ ID NO: 434055 - DNA, 2570 bp, Homo sapiens
agcggagggcattcccggcggctccgggtttggcaacgaggacgggggagtgcgactgcgtctcgggcagcatggccgagaagcggcacacacgggactccgaagcccagcggctccccgactccttcaaggacagccccagtaagggccttggaccttgcggatggattttggtggcgttctcattcttattcaccgttataactttcccaatctcaatatggatgtgcataaaggttattgcagccgaaggagaaatgaatgcatccagggctctgaaagaagcctccatggtcatcactgaatctcctgcagcccttcagctccgatacctgcagacactgaccaccattgctgctgagaaaaactcaacaattgtcttccctctgcccatagatatgctgcaaggaatcataggggcaaaacacagccatctaggctagtgtagagatgagcgctagccttccaagcatgaagtcggggaccaaattagcctttaactcataaagagagggtagggcttttctttttccatatgtcaattgtggtgttcccagaatgtatagcagttataaaaataggtgaaagaattgttagcttgtaaatactgagagattggtgatttatataaggtaatctgttagtcttaaaatagttaaaagtttgtatttttagattattatgtagtaggttagatccctcttgttttgacttccactgactcattctgaaccccctaagcacccaggccagaggcaagaacctgggctgtaactgccacctgacaccgctgactggctaaatgctttgcagaaagtgatgaccttacaccacaaccagcttctccaggtcatatgtgccttacctccagagagtctttttttttttttttctgagatggagtttcactcttgttgcccaggctggagtgcaatagcatgatctcggctcactgcaacctccgcctcctgggttcaagagattctcctgcctcagcctccccagtagctgggattacaggctcatgccaccatgcccagctaatttttgtattattattattgttttttagtagagacggggtttcaccatgttggccaggctagtcacgaactcctaacctcaggtgatccacccacctctgcctcccaaagtgctgggattacaggcatgagctaccacacctggtttggagagtcttaattaaggaaatttccctaatgttcatttattttctaaatccagaccgtgtttcagaataatccttacttgagagtagccattttcttgcctgtacttgtcagaactagaggaaatagccaagactaatgaaaaagattactctaacccttaaaagacttttaaattcactactagagtggtcattttaaaaatacatccatgttttaacttatttgagccttctttatgagtaaatgattcctccttgttctgtctttcaaaccagctaaatatttgtcacaaaagtgcttttttctcactgttgcctattttcatatatcaggttttaaatagttttaattttttaataaaattttctctacgttctatatgcaattgttatatatctatttgaatagctgaaggactaaaatacttttttaagagataacttcaggaaaccattatattttactatctgcatgctgttaactgtggtacactgtgaaatatgttgattacaaacccattcattacatagtataaggaattcacagtatattgactatatagtgtctaatgatcttgggcagatactgtcaaacttacaatatctatatagatgtaggtctttttaaatttacctagtcattcttctatcatgtatattgatgctgaaagaggaactggtcagctcctctggacaacaaattcttagtctataatattaggagacatcttctgttttgcaaatgtctgtgaatctgagcaacctggcattctgcttactggccagaaagctggcgggtgacatttgtaacatttcctctttgagactctgagttcacctagagaagtctaagcataacagctttctttcccagcacgagcctttatagctctctttagctcaaccactctgtccatccagccaatggatgtcccttcccctgtaccccaatttcaagcttattttaggaagccttgaactaccatgtatcctggctcctagctgagtttattagaggtatggagcagtgcaacttaaactcaagttgcacttacattttgaattttaaaatgatggttttatctgttgtgtgaagtggttcacccttgaggaccaggagcctccatatcctgactgaaaaccttttctgagacttagagtaacagtacttttggttccttgagttctcctgtctccagataccaaatgaccttgacttttctgccttgtgaattcgtagtccaatcagctgaaattaaatcacttgggagggacgcatagaaggagctctaggaacacagtgccagtgcagaagtttctccaggtggcctccctttccaacaatgtacataataaagtgtatgcactttcactaata

SEQ ID NO: 434056 - DNA, 2974 bp, Homo sapiens
agcggagggcattcccggcggctccgggtttggcaacgaggacgggggagtgcgactgcgtctcgggcagcatggccgagaagcggcacacacgggactccgaagcccagcggctccccgactccttcaaggacagccccagtaagggccttggaccttgcggatggattttggtggcgttctcattcttattcaccgttataactttcccaatctcaatatggatgtgcataaagattataaaagagtatgaaagagccatcatctttagattgggtcgcattttacaaggaggagccaaaggacctggtttgttttttattctgccatgcactgacagcttcatcaaagtggacatgagaactatttcatttgatattcctcctcaggagatcctcacaaaggattcagtgacaattagcgtggatggtgtggtctattaccgcgttcagaatgcaaccctggctgtggcaaatatcaccaacgctgactcagcaacccgtcttttggcacaaactactctgaggaatgttctgggcaccaagaatctttctcagatcctctctgacagagaagaaattgcacacaacatgcagtctactctggatgatgccactgatgcctggggaataaaggtggagcgtgtggaaattaaggataaatgaatgcatccagggctctgaaagaagcctccatggtcatcactgaatctcctgcagcccttcagctccgatacctgcagacactgaccaccattgctgctgagaaaaactcaacaattgtcttccctctgcccatagatatgctgcaaggaatcataggggcaaaacacagccatctaggctagtgtagagatgagcgctagccttccaagcatgaagtcggggaccaaattagcctttaactcataaagagagggtagggcttttctttttccatatgtcaattgtggtgttcccagaatgtatagcagttataaaaataggtgaaagaattgttagcttgtaaatactgagagattggtgatttatataaggtaatctgttagtcttaaaatagttaaaagtttgtatttttagattattatgtagtaggttagatccctcttgttttgacttccactgactcattctgaaccccctaagcacccaggccagaggcaagaacctgggctgtaactgccacctgacaccgctgactggctaaatgctttgcagaaagtgatgaccttacaccacaaccagcttctccaggtcatatgtgccttacctccagagagtctttttttttttttttctgagatggagtttcactcttgttgcccaggctggagtgcaatagcatgatctcggctcactgcaacctccgcctcctgggttcaagagattctcctgcctcagcctccccagtagctgggattacaggctcatgccaccatgcccagctaatttttgtattattattattgttttttagtagagacggggtttcaccatgttggccaggctagtcacgaactcctaacctcaggtgatccacccacctctgcctcccaaagtgctgggattacaggcatgagctaccacacctggtttggagagtcttaattaaggaaatttccctaatgttcatttattttctaaatccagaccgtgtttcagaataatccttacttgagagtagccattttcttgcctgtacttgtcagaactagaggaaatagccaagactaatgaaaaagattactctaacccttaaaagacttttaaattcactactagagtggtcattttaaaaatacatccatgttttaacttatttgagccttctttatgagtaaatgattcctccttgttctgtctttcaaaccagctaaatatttgtcacaaaagtgcttttttctcactgttgcctattttcatatatcaggttttaaatagttttaattttttaataaaattttctctacgttctatatgcaattgttatatatctatttgaatagctgaaggactaaaatacttttttaagagataacttcaggaaaccattatattttactatctgcatgctgttaactgtggtacactgtgaaatatgttgattacaaacccattcattacatagtataaggaattcacagtatattgactatatagtgtctaatgatcttgggcagatactgtcaaacttacaatatctatatagatgtaggtctttttaaatttacctagtcattcttctatcatgtatattgatgctgaaagaggaactggtcagctcctctggacaacaaattcttagtctataatattaggagacatcttctgttttgcaaatgtctgtgaatctgagcaacctggcattctgcttactggccagaaagctggcgggtgacatttgtaacatttcctctttgagactctgagttcacctagagaagtctaagcataacagctttctttcccagcacgagcctttatagctctctttagctcaaccactctgtccatccagccaatggatgtcccttcccctgtaccccaatttcaagcttattttaggaagccttgaactaccatgtatcctggctcctagctgagtttattagaggtatggagcagtgcaacttaaactcaagttgcacttacattttgaattttaaaatgatggttttatctgttgtgtgaagtggttcacccttgaggaccaggagcctccatatcctgactgaaaaccttttctgagacttagagtaacagtacttttggttccttgagttctcctgtctccagataccaaatgaccttgacttttctgccttgtgaattcgtagtccaatcagctgaaattaaatcacttgggagggacgcatagaaggagctctaggaacacagtgccagtgcagaagtttctccaggtggcctccctttccaacaatgtacataataaagtgtatgcactttcactaata

SEQ ID NO: 434057 - DNA, 3493 bp, Homo sapiens
agcggagggcattcccggcggctccgggtttggcaacgaggacgggggagtgcgactgcgtctcgggcagcatggccgagaagcggcacacacgggactccgaagcccagcggctccccgactccttcaaggacagccccagtaagggccttggaccttgcggatggattttggtggcgttctcattcttattcaccgttataactttcccaatctcaatatggatgtgcataaagattataaaagagtatgaaagagccatcatctttagattgggtcgcattttacaaggaggagccaaaggacctggtttgttttttattctgccatgcactgacagcttcatcaaagtggacatgagaactatttcatttgatattcctcctcaggagatcctcacaaaggattcagtgacaattagcgtggatggtgtggtctattaccgcgttcagaatgcaaccctggctgtggcaaatatcaccaacgctgactcagcaacccgtcttttggcacaaactactctgaggaatgttctgggcaccaagaatctttctcagatcctctctgacagagaagaaattgcacacaacatgcagtctactctggatgatgccactgatgcctggggaataaaggtggagcgtgtggaaattaaggatgtgaaactacctgtgcagctccagagagctatggctgcagaagcagaagcgtcccgcgaggcccgcgccaaggttattgcagccgaaggagaaatgaatgcatccagggctctgaaagaagcctccatggtcatcactgaatctcctgcagcccttcagctccgatacctgcagacactgaccaccattgctgctgagaaaaactcaacaattgtcttccctctgcccatagatatgctgcaaggaatcataggggcaaaacacagccatctaggctagtgtagagatgagcgctagccttccaagcatgaagtcggggaccaaattagcctttaactcataaagagagggtagggcttttctttttccatatgtcaattgtggtgttcccagaatgtatagcagttataaaaataggtgaaagaattgttagcttgtaaatactgagagattggtgatttatataaggtaatctgttagtcttaaaatagttaaaagtttgtatttttagattattatgtagtaggttagatccctcttgttttgacttccactgactcattctgaaccccctaagcacccaggccagaggcaagaacctgggctgtaactgccacctgacaccgctgactggctaaatgctttgcagaaagtgatgaccttacaccacaaccagcttctccaggtcatatgtgccttacctccagagagtctttttttttttttttctgagatggagtttcactcttgttgcccaggctggagtgcaatagcatgatctcggctcactgcaacctccgcctcctgggttcaagagattctcctgcctcagcctccccagtagctgggattacaggctcatgccaccatgcccagctaatttttgtattattattattgttttttagtagagacggggtttcaccatgttggccaggctagtcacgaactcctaacctcaggtgatccacccacctctgcctcccaaagtgctgggattacaggcatgagctaccacacctggtttggagagtcttaattaaggaaatttccctaatgttcatttattttctaaatccagaccgtgtttcagaataatccttacttgagagtagccattttcttgcctgtacttgtcagaactagaggaaatagccaagactaatgaaaaagattactctaacccttaaaagacttttaaattcactactagagtggtcattttaaaaatacatccatgttttaacttatttgagccttctttatgagtaaatgattcctccttgttctgtctttcaaaccagctaaatatttgtcacaaaagtgcttttttctcactgttgcctattttcatatatcaggttttaaatagttttaattttttaataaaattttctctacgttctatatgcaattgttatatatctatttgaatagctgaaggactaaaatacttttttaagagataacttcaggaaaccattatattttactatctgcatgctgttaactgtggtacactgtgaaatatgttgattacaaacccattcattacatagtataaggaattcacagtatattgactatatagtgtctaatgatcttgggcagatactgtcaaacttacaatatctatatagatgtaggtctttttaaatttacctagtcattcttctatcatgtatattgatgctgaaagaggaactggtcagctcctctggacaacaaattcttagtctataatattaggagacatcttctgttttgcaaatgtctgtgaatctgagcaacctggcattctgcttactggccagaaagctggcgggtgacatttgtaacatttcctctttgagactctgagttcacctagagaagtctaagcataacagctttctttcccagcacgagcctttatagctctctttagctcaaccactctgtccatccagccaatggatgtcccttcccctgtaccccaatttcaagcttattttaggaagccttgaactaccatgtatcctggctcctagctgagtttattagaggtatggagcagtgcaacttaaactcaagttgcacttacattttgaattttaaaatgatggttttatctgttgtgtgaagtggttcacccttgaggaccaggagcctccatatcctgactgaaaaccttttctgagacttagagtaacagtacttttggttccttgagttctcctgtctccagataccaaatgaccttgacttttctgccttgtgaattcgtagtccaatcagctgaaattaaatcacttgggagggacgcatagaaggagctctaggaacacagtgccagtgcagaagtttctccaggtggcctccctttccaacaatgtacataataaagtgtatgcactttcactaataaaaaaaaaaaaaaaaaaaaaaaaaaaaaataaaaaaaaaagaaaaaaaaaaaaaaaaaaaagacaaaaaaaataaacccagacagaaccaaaaacaagaaaacacgaggggggggcgcgcgccatcacgagatatccttcccagcgggggggccgcccataatggccgcgacgccccaacgccatatattgcgagacgccgagcggccggcccgcctactaagcgagtgcggccagtcttaaaatcaccggcaaccgggcgggccggcgccgataaaccacacaagcgggggagcgcacacacacacgactgcgccgggcgaccctgctgccaggagagacagcccaccccgtggtcggggagcgaacacaaccagggggacaaacagcacccgacacaacgacacacccgcgagtcggaggcaaata

SEQ ID NO: 434058 - DNA, 3156 bp, Homo sapiens
agcggagggcattcccggcggctccgggtttggcaacgaggacgggggagtgcgactgcgtctcgggcagcatggccgagaagcggcacacacgggactccgaagcccagcggctccccgactccttcaaggacagccccagtaagggccttggaccttgcggatggattttggtggcgttctcattcttattcaccgttataactttcccaatctcaatatggatgtgcataaagattataaaagagtatgaaagagccatcatctttagattgggtcgcattttacaaggaggagccaaaggacctggtttgttttttattctgccatgcactgacagcttcatcaaagtggacatgagaactatttcatttgatattcctcctcaggagatcctcacaaaggattcagtgacaattagcgtggatggtgtggtctattaccgcgttcagaatgcaaccctggctgtggcaaatatcaccaacgctgactcagcaacccgtcttttggcacaaactactctgaggaatgttctgggcaccaagaatctttctcagatcctctctgacagagaagaaattgcacacaacatgcagtctactctggatgatgccactgatgcctggggaataaaggtggagcgtgtggaaattaaggatgtgaaactacctgtgcagctccagagagctatggctgcagaagcagaagcgtcccgcgaggcccgcgccaaggttattgcagccgaaggagaaatgaatgcatccagggctctgaaagaagcctccatggtcatcactgaatctcctgcagcccttcagctccgatacctgcagacactgaccaccattgctgctgagaaaaactcaacaattgtcttccctctgcccatagatatgctgcaaggaatcataggggcaaaacacagccatctaggctagtgtagagatgagcgctagccttccaagcatgaagtcggggaccaaattagcctttaactcataaagagagggtagggcttttctttttccatatgtcaattgtggtgttcccagaatgtatagcagttataaaaataggtgaaagaattgttagcttgtaaatactgagagattggtgatttatataaggtaatctgttagtcttaaaatagttaaaagtttgtatttttagattattatgtagtaggttagatccctcttgttttgacttccactgactcattctgaaccccctaagcacccaggccagaggcaagaacctgggctgtaactgccacctgacaccgctgactggctaaatgctttgcagaaagtgatgaccttacaccacaaccagcttctccaggtcatatgtgccttacctccagagagtctttttttttttttttctgagatggagtttcactcttgttgcccaggctggagtgcaatagcatgatctcggctcactgcaacctccgcctcctgggttcaagagattctcctgcctcagcctccccagtagctgggattacaggctcatgccaccatgcccagctaatttttgtattattattattgttttttagtagagacggggtttcaccatgttggccaggctagtcacgaactcctaacctcaggtgatccacccacctctgcctcccaaagtgctgggattacaggcatgagctaccacacctggtttggagagtcttaattaaggaaatttccctaatgttcatttattttctaaatccagaccgtgtttcagaataatccttacttgagagtagccattttcttgcctgtacttgtcagaactagaggaaatagccaagactaatgaaaaagattactctaacccttaaaagacttttaaattcactactagagtggtcattttaaaaatacatccatgttttaacttatttgagccttctttatgagtaaatgattcctccttgttctgtctttcaaaccagctaaatatttgtcacaaaagtgcttttttctcactgttgcctattttcatatatcaggttttaaatagttttaattttttaataaaattttctctacgttctatatgcaattgttatatatctatttgaatagctgaaggactaaaatacttttttaagagataacttcaggaaaccattatattttactatctgcatgctgttaactgtggtacactgtgaaatatgttgattacaaacccattcattacatagtataaggaattcacagtatattgactatatagtgtctaatgatcttgggcagatactgtcaaacttacaatatctatatagatgtaggtctttttaaatttacctagtcattcttctatcatgtatattgatgctgaaagaggaactggtcagctcctctggacaacaaattcttagtctataatattaggagacatcttctgttttgcaaatgtctgtgaatctgagcaacctggcattctgcttactggccagaaagctggcgggtgacatttgtaacatttcctctttgagactctgagttcacctagagaagtctaagcataacagctttctttcccagcacgagcctttatagctctctttagctcaaccactctgtccatccagccaatggatgtcccttcccctgtaccccaatttcaagcttattttaggaagccttgaactaccatgtatcctggctcctagctgagtttattagaggtatggagcagtgcaacttaaactcaagttgcacttacattttgaattttaaaatgatggttttatctgttgtgtgaagtggttcacccttgaggaccaggagcctccatatcctgactgaaaaccttttctgagacttagagtaacagtacttttggttccttgagttctcctgtctccagataccaaatgaccttgacttttctgccttgtgaattcgtagtccaatcagctgaaattaaatcacttgggagggacgcatagaaggagctctaggaacacagtgccagtgcagaagtttctccaggtggcctccctttccaacaatgtacataataaagtgtatgcactttcactaataaatatttttggggtgagagtctgtttcggcctgtattgaatgtctgtggatttccgttttcagaagtagtacattagatcctccggttctg

SEQ ID NO: 434059 - DNA, 3145 bp, Homo sapiens
  misc_feature (3071)..(3071): n is a, c, g, or t
  misc_feature (3075)..(3075): n is a, c, g, or t
agcggagggcattcccggcggctccgggtttggcaacgaggacgggggagtgcgactgcgtctcgggcagcatggccgagaagcggcacacacgggactccgaagcccagcggctccccgactccttcaaggacagccccagtaagggccttggaccttgcggatggattttggtggcgttctcattcttattcaccgttataactttcccaatctcaatatggatgtgcataaagattataaaagagtatgaaagagccatcatctttagattgggtcgcattttacaaggaggagccaaaggacctggtttgttttttattctgccatgcactgacagcttcatcaaagtggacatgagaactatttcatttgatattcctcctcaggagatcctcacaaaggattcagtgacaattagcgtggatggtgtggtctattaccgcgttcagaatgcaaccctggctgtggcaaatatcaccaacgctgactcagcaacccgtcttttggcacaaactactctgaggaatgttctgggcaccaagaatctttctcagatcctctctgacagagaagaaattgcacacaacatgcagtctactctggatgatgccactgatgcctggggaataaaggtggagcgtgtggaaattaaggatgtgaaactacctgtgcagctccagagagctatggctgcagaagcagaagcgtcccgcgaggcccgcgccaaggttattgcagccgaaggagaaatgaatgcatccagggctctgaaagaagcctccatggtcatcactgaatctcctgcagcccttcagctccgatacctgcagacactgaccaccattgctgctgagaaaaactcaacaattgtcttccctctgcccatagatatgctgcaaggaatcataggggcaaaacacagccatctaggctagtgtagagatgagcgctagccttccaagcatgaagtcggggaccaaattagcctttaactcataaagagagggtagggcttttctttttccatatgtcaattgtggtgttcccagaatgtatagcagttataaaaataggtgaaagaattgttagcttgtaaatactgagagattggtgatttatataaggtaatctgttagtcttaaaatagttaaaagtttgtatttttagattattatgtagtaggttagatccctcttgttttgacttccactgactcattctgaaccccctaagcacccaggccagaggcaagaacctgggctgtaactgccacctgacaccgctgactggctaaatgctttgcagaaagtgatgaccttacaccacaaccagcttctccaggtcatatgtgccttacctccagagagtctttttttttttttttctgagatggagtttcactcttgttgcccaggctggagtgcaatagcatgatctcggctcactgcaacctccgcctcctgggttcaagagattctcctgcctcagcctccccagtagctgggattacaggctcatgccaccatgcccagctaatttttgtattattattattgttttttagtagagacggggtttcaccatgttggccaggctagtcacgaactcctaacctcaggtgatccacccacctctgcctcccaaagtgctgggattacaggcatgagctaccacacctggtttggagagtcttaattaaggaaatttccctaatgttcatttattttctaaatccagaccgtgtttcagaataatccttacttgagagtagccattttcttgcctgtacttgtcagaactagaggaaatagccaagactaatgaaaaagattactctaacccttaaaagacttttaaattcactactagagtggtcattttaaaaatacatccatgttttaacttatttgagccttctttatgagtaaatgattcctccttgttctgtctttcaaaccagctaaatatttgtcacaaaagtgcttttttctcactgttgcctattttcatatatcaggttttaaatagttttaattttttaataaaattttctctacgttctatatgcaattgttatatatctatttgaatagctgaaggactaaaatacttttttaagagataacttcaggaaaccattatattttactatctgcatgctgttaactgtggtacactgtgaaatatgttgattacaaacccattcattacatagtataaggaattcacagtatattgactatatagtgtctaatgatcttgggcagatactgtcaaacttacaatatctatatagatgtaggtctttttaaatttacctagtcattcttctatcatgtatattgatgctgaaagaggaactggtcagctcctctggacaacaaattcttagtctataatattaggagacatcttctgttttgcaaatgtctgtgaatctgagcaacctggcattctgcttactggccagaaagctggcgggtgacatttgtaacatttcctctttgagactctgagttcacctagagaagtctaagcataacagctttctttcccagcacgagcctttatagctctctttagctcaaccactctgtccatccagccaatggatgtcccttcccctgtaccccaatttcaagcttattttaggaagccttgaactaccatgtatcctggctcctagctgagtttattagaggtatggagcagtgcaacttaaactcaagttgcacttacattttgaattttaaaatgatggttttatctgttgtgtgaagtggttcacccttgaggaccaggagcctccatatcctgactgaaaaccttttctgagacttagagtaacagtacttttggttccttgagttctcctgtctccagataccaaatgaccttgacttttctgccttgtgaattcgtagtccaatcagctgaaattaaatcacttgggagggacgcatagaaggagctctaggaacacagtgccagtgcagaagtttctccaggtggcctccctttccaacaatgtacataataaagtgtatgcactttcactaataccttcnaaanaaagggaaaaccaacttatttttttaacccctcgggggggggggccgcgggacccaaatttggcccttat

SEQ ID NO: 434060 - DNA, 1601 bp, Homo sapiens
gcggccgtcgcgatctagaactagttccctccccagtagctgggattacaggctcatgccaccatgcccagctaatttttgtattattattattgttttttagtagagacggggtttcaccatgttggccaggctagtcacgaactcctaacctcaggtgatccacccacctctgcctcccaaagtgctgggattacaggcatgagctaccacacctggtttggagagtcttaattaaggaaatttccctaatgttcatttattttctaaatccagaccgtgtttcagaataatccttacttgagagtagccattttcttgcctgtacttgtcagaactagaggaaatagccaagactaatgaaaaagattactctaacccttaaaagacttttaaattcactactagagtggtcattttaaaaatacatccatgttttaacttatttgagccttctttatgagtaaatgattcctccttgttctgtctttcaaaccagctaaatatttgtcacaaaagtgcttttttctcactgttgcctattttcatatatcaggttttaaatagttttaattttttaataaaattttctctacgttctatatgcaattgttatatatctatttgaatagctgaaggactaaaatacttttttaagagataacttcaggaaaccattatattttactatctgcatgctgttaactgtggtacactgtgaaatatgttgattacaaacccattcattacatagtataaggaattcacagtatattgactatatagtgtctaatgatcttgggcagatactgtcaaacttacaatatctatatagatgtaggtctttttaaatttacctagtcattcttctatcatgtatattgatgctgaaagaggaactggtcagctcctctggacaacaaattcttagtctataatattaggagacatcttctgttttgcaaatgtctgtgaatctgagcaacctggcattctgcttactggccagaaagctggcgggtgacatttgtaacatttcctctttgagactctgagttcacctagagaagtctaagcataacagctttctttcccagcacgagcctttatagctctctttagctcaaccactctgtccatccagccaatggatgtcccttcccctgtaccccaatttcaagcttattttaggaagccttgaactaccatgtatcctggctcctagctgagtttattagaggtatggagcagtgcaacttaaactcaagttgcacttacattttgaattttaaaatgatggttttatctgttgtgtgaagtggttcacccttgaggaccaggagcctccatatcctgactgaaaaccttttctgagacttagagtaacagtacttttggttccttgagttctcctgtctccagataccaaatgaccttgacttttctgccttgtgaattcgtagtccaatcagctgaaattaaatcacttgggagggacgcatagaaggagctctaggaacacagtgccagtgcagaagtttctccaggtggcctccctttccaacaatgtacataataaagtgtatgcactttcactaata

SEQ ID NO: 434061 - DNA, 2949 bp, Homo sapiens
  misc_feature (2931)..(2931): n is a, c, g, or t
agcggagggcattcccggcggctccgggtttggcaacgaggacgggggagtgcgactgcgtctcgggcagcatggccgagaagcggcacacacgggactccgaagcccagcggctccccgactccttcaaggacagccccagtaagggccttggaccttgcggatggattttggtggcgttctcattcttattcaccgttataactttcccaatctcaatatggatgtgcataaagattataaaagagtatgaaagagccatcatctttagattgggtcgcattttacaaggaggagccaaaggacctggtttgttttttattctgccatgcactgacagcttcatcaaagtggacatgagaactatttcatttgatattcctcctcaggagatcctcacaaaggattcagtgacaattagcgtggatggtgtggtctattaccgcgttcagaatgcaaccctggctgtggcaaatatcaccaacgctgactcagcaacccgtcttttggcacaaactactctgaggaatgttctgggcaccaagaatctttctcagatcctctctgacagagaagaaattgcacacaacatgcagtctactctggatgatgccactgatgcctggggaataaaggtggagcgtgtggaaattaaggatgtgaaactacctgtgcagctccagagagctatggctgcagaagcagaagcgtcccgcgaggcccgcgccaaggttattgcagccgaaggagaaatgaatgcatccagggctctgaaagaagcctccatggtcatcactgaatctcctgcagcccttcagctccgatacctgcagacactgaccaccattgctgctgagaaaaactcaacaattgtcttccctctgcccatagatatgctgcaaggaatcataggggcaaaacacagccatctaggctagtgtagagatgagcgctagccttccaagcatgaagtcggggaccaaattagcctttaactcataaagagagggtagggcttttctttttccatatgtcaattgtggtgttcccagaatgtatagcagttataaaaataggtgaaagaattgttagcttgtaaatactgagagattggtgatttatataaggtaatctgttagtcttaaaatagttaaaagtttgtatttttagattattatgtagtaggttagatccctcttgttttgacttccactgactcattctgaaccccctaagcacccaggccagaggcaagaacctgggctgtaactgccacctgacaccgctgactggctaaatgctttgcagaaagtgatgaccttacaccacaaccagcttctccaggtcatatgtgccttacctccagagagtctttttttttttttttctgagatggagtttcactcttgttgcccaggctggagtgcaatagcatgatctcggctcactgcaacctccgcctcctgggttcaagagattctcctgcctcagcctccccagtagctgggattacaggctcatgccaccatgcccagctaatttttgtattattattattgttttttagtagagacggggtttcaccatgttggccaggctagtcacgaactcctaacctcaggtgatccacccacctctgcctcccaaagtgctgggattacaggcatgagctaccacacctggtttggagagtcttaattaaggaaatttccctaatgttcatttattttctaaatccagaccgtgtttcagaataatccttacttgagagtagccattttcttgcctgtacttgtcagaactagaggaaatagccaagactaatgaaaaagattactctaacccttaaaagacttttaaattcactactagagtggtcattttaaaaatacatccatgttttaacttatttgagccttctttatgagtaaatgattcctccttgttctgtctttcaaaccagctaaatatttgtcacaaaagtgcttttttctcactgttgcctattttcatatatcaggttttaaatagttttaattttttaataaaattttctctacgttctatatgcaattgttatatatctatttgaatagctgaaggactaaaatacttttttaagagataacttcaggaaaccattatattttactatctgcatgctgttaactgtggtacactgtgaaatatgttgattacaaacccattcattacatagtataaggaattcacagtatattgactatatagtgtctaatgatcttgggcagatactgtcaaacttacaatatctatatagatgtaggtctttttaaatttacctagtcattcttctatcatgtatattgatgctgaaagaggaactggtcagctcctctggacaacaaattcttagtctataatattaggagacatcttctgttttgcaaatgtctgtgaatctgagcaacctggcattctgcttactggccagaaagctggcgggtgacatttgtaacatttcctctttgagactctgagttcacctagagaagtctaagcataacagctttctttcccagcacgagcctttatagctctctttagctcaaccactctgtccatccagccaatggatgtcccttcccctgtaccccaatttcaagcttattttaggaagccttgaactaccatgtatcctggctcctagctgagtttattagaggtatggagcagtgcaacttaaactcaagttgcacttacattttgaattttaaaatgatggttttatctgttgtgtgaagtggttcacccttgaggaccaggagcctccatatcctgactgaaaaccttttctgagacttagagtaacagtacttttggttccttgagttctcctgtctccagataccaaatgaccttgacttttctgccttgtgaattcctcatgancgggtcctcgagatcgac

SEQ ID NO: 434062 - DNA, 2998 bp, Homo sapiens
agcggagggcattcccggcggctccgggtttggcaacgaggacgggggagtgcgactgcgtctcgggcagcatggccgagaagcggcacacacgggactccgaagcccagcggctccccgactccttcaaggacagccccagtaagggccttggaccttgcggatggattttggtggcgttctcattcttattcaccgttataactttcccaatctcaatatggatgtgcataaagattataaaagagtatgaaagagccatcatctttagattgggtcgcattttacaaggaggagccaaaggacctggtttgttttttattctgccatgcactgacagcttcatcaaagtggacatgagaactatttcatttgatattcctcctcaggagatcctcacaaaggattcagtgacaattagcgtggatggtgtggtctattaccgcgttcagaatgcaaccctggctgtggcaaatatcaccaacgctgactcagcaacccgtcttttggcacaaactactctgaggaatgttctgggcaccaagaatctttctcagatcctctctgacagagaagaaattgcacacaacatgcagtctactctggatgatgccactgatgcctggggaataaaggtggagcgtgtggaaattaaggatgtgaaactacctgtgcagctccagagagctatggctgcagaagcagaagcgtcccgcgaggcccgcgccaaggttattgcagccgaaggagaaatgaatgcatccagggctctgaaagaagcctccatggtcatcactgaatctcctgcagcccttcagctccgatacctgcagacactgaccaccattgctgctgagaaaaactcaacaattgtcttccctctgcccatagatatgctgcaaggaatcataggggcaaaacacagccatctaggctagtgtagagatgagcgctagccttccaagcatgaagtcggggaccaaattagcctttaactcataaagagagggtagggcttttctttttccatatgtcaattgtggtgttcccagaatgtatagcagttataaaaataggtgaaagaattgttagcttgtaaatactgagagattggtgatttatataaggtaatctgttagtcttaaaatagttaaaagtttgtatttttagattattatgtagtaggttagatccctcttgttttgacttccactgactcattctgaaccccctaagcacccaggccagaggcaagaacctgggctgtaactgccacctgacaccgctgactggctaaatgctttgcagaaagtgatgaccttacaccacaaccagcttctccaggtcatatgtgccttacctccagagagtctttttttttttttttctgagatggagtttcactcttgttgcccaggctggagtgcaatagcatgatctcggctcactgcaacctccgcctcctgggttcaagagattctcctgcctcagcctccccagtagctgggattacaggctcatgccaccatgcccagctaatttttgtattattattattgttttttagtagagacggggtttcaccatgttggccaggctagtcacgaactcctaacctcaggtgatccacccacctctgcctcccaaagtgctgggattacaggcatgagctaccacacctggtttggagagtcttaattaaggaaatttccctaatgttcatttattttctaaatccagaccgtgtttcagaataatccttacttgagagtagccattttcttgcctgtacttgtcagaactagaggaaatagccaagactaatgaaaaagattactctaacccttaaaagacttttaaattcactactagagtggtcattttaaaaatacatccatgttttaacttatttgagccttctttatgagtaaatgattcctccttgttctgtctttcaaaccagctaaatatttgtcacaaaagtgcttttttctcactgttgcctattttcatatatcaggttttaaatagttttaattttttaataaaattttctctacgttctatatgcaattgttatatatctatttgaatagctgaaggactaaaatacttttttaagagataacttcaggaaaccattatattttactatctgcatgctgttaactgtggtacactgtgaaatatgttgattacaaacccattcattacatagtataaggaattcacagtatattgactatatagtgtctaatgatcttgggcagatactgtcaaacttacaatatctatatagatgtaggtctttttaaatttacctagtcattcttctatcatgtatattgatgctgaaagaggaactggtcagctcctctggacaacaaattcttagtctataatattaggagacatcttctgttttgcaaatgtctgtgaatctgagcaacctggcattctgcttactggccagaaagctggcgggtgacatttgtaacatttcctctttgagactctgagttcacctagagaagtctaagcataacagctttctttcccagcacgagcctttatagctctctttagctcaaccactctgtccatccagccaatggatgtcccttcccctgtaccccaatttcaagcttattttaggaagccttgaactaccatgtatcctggctcctagctgagtttattagaggtatggagcagtgcaacttaaactcaagttgcacttacattttgaattttaaaatgatggttttatctgttgtgtgaagtggttcacccttgaggaccaggagcctccatatcctgactgaaaaccttttctgagacttagagtaacagtacttttggttccttgagttctcctgtctccagataccaaatgaccttgacttttctgccttgtgaattcgattactccagaggaacatacagaaacaatccatgtttagctctccgctggttcttccagtggtttgagacactg

SEQ ID NO: 434063 - DNA, 3011 bp, Homo sapiens
agcggagggcattcccggcggctccgggtttggcaacgaggacgggggagtgcgactgcgtctcgggcagcatggccgagaagcggcacacacgggactccgaagcccagcggctccccgactccttcaaggacagccccagtaagggccttggaccttgcggatggattttggtggcgttctcattcttattcaccgttataactttcccaatctcaatatggatgtgcataaagattataaaagagtatgaaagagccatcatctttagattgggtcgcattttacaaggaggagccaaaggacctggtttgttttttattctgccatgcactgacagcttcatcaaagtggacatgagaactatttcatttgatattcctcctcaggagatcctcacaaaggattcagtgacaattagcgtggatggtgtggtctattaccgcgttcagaatgcaaccctggctgtggcaaatatcaccaacgctgactcagcaacccgtcttttggcacaaactactctgaggaatgttctgggcaccaagaatctttctcagatcctctctgacagagaagaaattgcacacaacatgcagtctactctggatgatgccactgatgcctggggaataaaggtggagcgtgtggaaattaaggatgtgaaactacctgtgcagctccagagagctatggctgcagaagcagaagcgtcccgcgaggcccgcgccaaggttattgcagccgaaggagaaatgaatgcatccagggctctgaaagaagcctccatggtcatcactgaatctcctgcagcccttcagctccgatacctgcagacactgaccaccattgctgctgagaaaaactcaacaattgtcttccctctgcccatagatatgctgcaaggaatcataggggcaaaacacagccatctaggctagtgtagagatgagcgctagccttccaagcatgaagtcggggaccaaattagcctttaactcataaagagagggtagggcttttctttttccatatgtcaattgtggtgttcccagaatgtatagcagttataaaaataggtgaaagaattgttagcttgtaaatactgagagattggtgatttatataaggtaatctgttagtcttaaaatagttaaaagtttgtatttttagattattatgtagtaggttagatccctcttgttttgacttccactgactcattctgaaccccctaagcacccaggccagaggcaagaacctgggctgtaactgccacctgacaccgctgactggctaaatgctttgcagaaagtgatgaccttacaccacaaccagcttctccaggtcatatgtgccttacctccagagagtctttttttttttttttctgagatggagtttcactcttgttgcccaggctggagtgcaatagcatgatctcggctcactgcaacctccgcctcctgggttcaagagattctcctgcctcagcctccccagtagctgggattacaggctcatgccaccatgcccagctaatttttgtattattattattgttttttagtagagacggggtttcaccatgttggccaggctagtcacgaactcctaacctcaggtgatccacccacctctgcctcccaaagtgctgggattacaggcatgagctaccacacctggtttggagagtcttaattaaggaaatttccctaatgttcatttattttctaaatccagaccgtgtttcagaataatccttacttgagagtagccattttcttgcctgtacttgtcagaactagaggaaatagccaagactaatgaaaaagattactctaacccttaaaagacttttaaattcactactagagtggtcattttaaaaatacatccatgttttaacttatttgagccttctttatgagtaaatgattcctccttgttctgtctttcaaaccagctaaatatttgtcacaaaagtgcttttttctcactgttgcctattttcatatatcaggttttaaatagttttaattttttaataaaattttctctacgttctatatgcaattgttatatatctatttgaatagctgaaggactaaaatacttttttaagagataacttcaggaaaccattatattttactatctgcatgctgttaactgtggtacactgtgaaatatgttgattacaaacccattcattacatagtataaggaattcacagtatattgactatatagtgtctaatgatcttgggcagatactgtcaaacttacaatatctatatagatgtaggtctttttaaatttacctagtcattcttctatcatgtatattgatgctgaaagaggaactggtcagctcctctggacaacaaattcttagtctataatattaggagacatcttctgttttgcaaatgtctgtgaatctgagcaacctggcattctgcttactggccagaaagctggcgggtgacatttgtaacatttcctctttgagactctgagttcacctagagaagtctaagcataacagctttctttcccagcacgagcctttatagctctctttagctcaaccactctgtccatccagccaatggatgtcccttcccctgtaccccaatttcaagcttattttaggaagccttgaactaccatgtatcctggctcctagctgagtttattagaggtatggagcagtgcaacttaaactcaagttgcacttacattttgaattttaaaatgatggttttatctgttgtgtgaagtggttcacccttgaggaccaggagcctccatatcctgactggtctccagataccaaatgaccttgacttttctgccttgtgaattcgtagtccaatcagctgaaattaaatcacttgggagggacgcatagaaggagctctaggaacacagtgccagtgcagaagtttctccaggtggcctccctttccaacaatgtacataataaagtgtatgcactttcactaata

SEQ ID NO: 434064 - DNA, 2854 bp, Homo sapiens
  misc_feature (2829)..(2829): n is a, c, g, or t
agcggagggcattcccggcggctccgggtttggcaacgaggacgggggagtgcgactgcgtctcgggcagcatggccgagaagcggcacacacgggactccgaagcccagcggctccccgactccttcaaggacagccccagtaagggccttggaccttgcggatggattttggtggcgttctcattcttattcaccgttataactttcccaatctcaatatggatgtgcataaagattataaaagagtatgaaagagccatcatctttagattgggtcgcattttacaaggaggagccaaaggacctggtttgttttttattctgccatgcactgacagcttcatcaaagtggacatgagaactatttcatttgatattcctcctcaggagatcctcacaaaggattcagtgacaattagcgtggatggtgtggtctattaccgcgttcagaatgcaaccctggctgtggcaaatatcaccaacgctgactcagcaacccgtcttttggcacaaactactctgaggaatgttctgggcaccaagaatctttctcagatcctctctgacagagaagaaattgcacacaacatgcagtctactctggatgatgccactgatgcctggggaataaaggtggagcgtgtggaaattaaggatgtgaaactacctgtgcagctccagagagctatggctgcagaagcagaagcgtcccgcgaggcccgcgccaaggttattgcagccgaaggagaaatgaatgcatccagggctctgaaagaagcctccatggtcatcactgaatctcctgcagcccttcagctccgatacctgcagacactgaccaccattgctgctgagaaaaactcaacaattgtcttccctctgcccatagatatgctgcaaggaatcataggggcaaaacacagccatctaggctagtgtagagatgagcgctagccttccaagcatgaagtcggggaccaaattagcctttaactcataaagagagggtagggcttttctttttccatatgtcaattgtggtgttcccagaatgtatagcagttataaaaataggtgaaagaattgttagcttgtaaatactgagagattggtgatttatataaggtaatctgttagtcttaaaatagttaaaagtttgtatttttagattattatgtagtaggttagatccctcttgttttgacttccactgactcattctgaaccccctaagcacccaggccagaggcaagaacctgggctgtaactgccacctgacaccgctgactggctaaatgctttgcagaaagtgatgaccttacaccacaaccagcttctccaggtcatatgtgccttacctccagagagtctttttttttttttttctgagatggagtttcactcttgttgcccaggctggagtgcaatagcatgatctcggctcactgcaacctccgcctcctgggttcaagagattctcctgcctcagcctccccagtagctgggattacaggctcatgccaccatgcccagctaatttttgtattattattattgttttttagtagagacggggtttcaccatgttggccaggctagtcacgaactcctaacctcaggtgatccacccacctctgcctcccaaagtgctgggattacaggcatgagctaccacacctggtttggagagtcttaattaaggaaatttccctaatgttcatttattttctaaatccagaccgtgtttcagaataatccttacttgagagtagccattttcttgcctgtacttgtcagaactagaggaaatagccaagactaatgaaaaagattactctaacccttaaaagacttttaaattcactactagagtggtcattttaaaaatacatccatgttttaacttatttgagccttctttatgagtaaatgattcctccttgttctgtctttcaaaccagctaaatatttgtcacaaaagtgcttttttctcactgttgcctattttcatatatcaggttttaaatagttttaattttttaataaaattttctctacgttctatatgcaattgttatatatctatttgaatagctgaaggactaaaatacttttttaagagataacttcaggaaaccattatattttactatctgcatgctgttaactgtggtacactgtgaaatatgttgattacaaacccattcattacatagtataaggaattcacagtatattgactatatagtgtctaatgatcttgggcagatactgtcaaacttacaatatctatatagatgtaggtctttttaaatttacctagtcattcttctatcatgtatattgatgctgaaagaggaactggtcagctcctctggacaacaaattcttagtctataatattaggagacatcttctgttttgcaaatgtctgtgaatctgagcaacctggcattctgcttactggccagaaagctggcgggtgacatttgtaacatttcctctttgagactctgagttcacctagagaagtctaagcataacagctttctttcccagcacgagcctttatagctctctttagctcaaccactctgtccatccagccaatggatgtcccttcccctgtaccccaatttcaagcttattttaggaagccttgaactaccatgtatcctggctcctagctgagtttattagaggtatggagcagtgcaacttaaactcaagttgcacttacattttgaattttaaaatgatggttttatctgttgtgtgaagtggttcacccttgaggaccaggagcctccatatcctgactgtggcngcgacacggatcctctagatcacct

SEQ ID NO: 434065 - DNA, 1267 bp, Homo sapiens
gatcccattgctaatacattccgaaggcaatattctgcatctattaacccccaattcccagtctctcccactccctcctcaggtgacccagtgacaccatgttttaacttatttgagccttctttatgagtaaatgattcctccttgttctgtctttcaaaccagctaaatatttgtcacaaaagtgcttttttctcactgttgcctattttcatatatcaggttttaaatagttttaattttttaataaaattttctctacgttctatatgcaattgttatatatctatttgaatagctgaaggactaaaatacttttttaagagataacttcaggaaaccattatattttactatctgcatgctgttaactgtggtacactgtgaaatatgttgattacaaacccattcattacatagtataaggaattcacagtatattgactatatagtgtctaatgatcttgggcagatactgtcaaacttacaatatctatatagatgtaggtctttttaaatttacctagtcattcttctatcatgtatattgatgctgaaagaggaactggtcagctcctctggacaacaaattcttagtctataatattaggagacatcttctgttttgcaaatgtctgtgaatctgagcaacctggcattctgcttactggccagaaagctggcgggtgacatttgtaacatttcctctttgagactctgagttcacctagagaagtctaagcataacagctttctttcccagcacgagcctttatagctctctttagctcaaccactctgtccatccagccaatggatgtcccttcccctgtaccccaatttcaagcttattttaggaagccttgaactaccatgtatcctggctcctagctgagtttattagaggtatggagcagtgcaacttaaactcaagttgcacttacattttgaattttaaaatgatggttttatctgttgtgtgaagtggttcacccttgaggaccaggagcctccatatcctgactgaaaaccttttctgagacttagagtaacagtacttttggttccttgagttctcctgtctccagataccaaatgaccttgacttttctgccttgtgaattcgtagtccaatcagctgaaattaaatcacttgggagggacgcatagaaggagctctaggaacacagtgccagtgcagaagtttctccaggtggcctccctttccaacaatgtacataataaagtgtatgcactttcactaata

SEQ ID NO: 434066 - DNA, 1404 bp, Homo sapiens
agcggagggcattcccggcggctccgggtttggcaacgaggacgggggagtgcgactgcgtctcgggcagcatggccgagaagcggcacacacgggactccgaagcccagcggctccccgactccttcaaggacagccccagtaagggccttggaccttgcggatggattttggtggcgttctcattcttattcaccgttataactttcccaatctcaatatggatgtgcataaagattataaaagagtatgaaagagccatcatctttagattgggtcgcattttacaaggaggagccaaaggacctggtttgttttttattctgccatgcactgacagcttcatcaaagtggacatgagaactatttcatttgatattcctcctcaggagatcctcacaaaggattcagtgacaattagcgtggatggtgtggtctattaccgcgttcagaatgcaaccctggctgtggcaaatatcaccaacgctgactcagcaacccgtcttttggcacaaactactctgaggaatgttctgggcaccaagaatctttctcagatcctctctgacagagaagaaattgcacacaacatgcagtctactctggatgatgccactgatgcctggggaataaaggtggagcgtgtggaaattaaggatgtgaaactacctgtgcagctccagagagctatggctgcagaagcagaagcgtcccgcgaggcccgcgccaaggttattgcagccgaaggagaaatgaatgcatccagggctctgaaagaagcctccatggtcatcactgaatctcctgcagcccttcagctccgatacctgcagacactgaccaccattgctgctgagaaaaactcaacaattgtcttccctctgcccatagatatgctgcaaggaatcataggggcaaaacacagccatctaggctagtgtagagatgagcgctagccttccaagcatgaagtcggggaccaaattagcctttaactcataaagagagggtagggcttttctttttccatatgtcaattgtggtgttcccagaatgtatagcagttataaaaataggtgaaagaattgttagcttgtaaatactgagagattggtgatttatataaggtaatctgttagtcttaaaatagttaaaagtttgtatttttagattattatgtagtaggttagatccctcttgttttgacttccactgactcattctgaaccccctaagcacccaggccagaggcaagaacctgggctgtaactgccacctgacaccgctgactggctaaatgctttgcagaaagtgatgaccttacaccacaaccagcttctccaggtcatatgtgccttacctccagactgggcaacgagagtgaaaatccgtctcaaaaaaaaa

SEQ ID NO: 434067 - DNA, 909 bp, Homo sapiens
agcggagggcattcccggcggctccgggtttggcaacgaggacgggggagtgcgactgcgtctcgggcagcatggccgagaagcggcacacacgggactccgaagcccagcggctccccgactccttcaaggacagccccagtaagggccttggaccttgcggatggattttggtggcgttctcattcttattcaccgttataactttcccaatctcaatatggatgtgcataaaggttattgcagccgaaggagaaatgaatgcatccagggctctgaaagaagcctccatggtcatcactgaatctcctgcagcccttcagctccgatacctgcagacactgaccaccattgctgctgagaaaaactcaacaattgtcttccctctgcccatagatatgctgcaaggaatcataggggcaaaacacagccatctaggctagtgtagagatgagcgctagccttccaagcatgaagtcggggaccaaattagcctttaactcataaagagagggtagggcttttctttttccatatgtcaattgtggtgttcccagaatgtatagcagttataaaaataggtgaaagaattgttagcttgtaaatactgagagattggtgatttatataaggtaatctgttagtcttaaaatagttaaaagtttgtatttttagattattatgtagtaggttagatccctcttgttttgacttccactgactcattctgaaccccctaagcacccaggccagaggcaagaacctgggctgtaactgccacctgacaccgctgactggctaaatgctttgcagaaagtgatgaccttacaccacaaccagcttctccaggtcatatgtgccttacctccagactgggcaacgagagtgaaaatccgtctcaaaaaaaaa

SEQ ID NO: 434068 - DNA, 1271 bp, Homo sapiens
agcggagggcattcccggcggctccgggtttggcaacgaggacgggggagtgcgactgcgtctcgggcagcatggccgagaagcggcacacacgggactccgaagcccagcggctccccgactccttcaaggacagccccagtaagggccttggaccttgcggatggattttggtggcgttctcattcttattcaccgttataactttcccaatctcaatatggatgtgcataaagattataaaagagtatgaaagagccatcatctttagattgggtcgcattttacaaggaggagccaaaggacctggtttgttttttattctgccatgcactgacagcttcatcaaagtggacatgagaactatttcatttgatattcctcctcaggagatcctcacaaaggattcagtgacaattagcgtggatggtgtggtctattaccgcgttcagaatgcaaccctggctgtggcaaatatcaccaacgctgactcagcaacccgtcttttggcacaaactactctgaggaatgttctgggcaccaagaatctttctcagatcctctctgacagagaagaaattgcacacaacatgcagtctactctggatgatgccactgatgcctggggaataaaggtggagcgtgtggaaattaaggatgtgaaactacctgtgcagctccagagagctatggctgcagaagcagaagcgtcccgcgaggcccgcgccaaggtaactttttttttaaacttgtttttcttactgagttttctcttttattaataattataaaaaaacgtaaaacatgcttgctgtaaaaacttgaaataatcttgaagtggtaaagttagaagtgaaaaccctccccgtaacttcaaatcatattcccccagaggtcaccactcctaacagttgagtgtatttggattttatttgaccaggtttttggattactggcttgtttgttttacaaaagtagggttatactgcacatgttgttctgcgctctgcttttttcatttaatattaatatctatggacgtatcagtacatgtagagttacctcattcttttatgactgtgtgtaccatacttattctcccgattccatattaaggtcaaattaacagttccaacttcggagcaagtgggtcatcattccatccataccacccatctcttacttatttttggcttcttttttgttctgtttcttttctcaggctctttttcccttttactgtttcctattcctcattctctcttttcctc

SEQ ID NO: 434069 - DNA, 695 bp, Homo sapiens
agcggagggcattcccggcggctccgggtttggcaacgaggacgggggagtgcgactgcgtctcgggcagcatggccgagaagcggcacacacgggactccgaagcccagcggctccccgactccttcaaggacagccccagtaagggccttggaccttgcggatggattttggtggcgttctcattcttattcaccgttataactttcccaatctcaatatggatgtgcataaaggtttgttttttattctgccatgcactgacagcttcatcaaagtggacatgagaactatttcatttgatattcctcctcaggagatcctcacaaaggattcagtgacaattagcgtggatggtgtggtctattaccgcgttcagaatgcaaccctggctgtggcaaatatcaccaacgctgactcagcaacccgtcttttggcacaaactactctgaggaatgttctgggcaccaagaatctttctcagatcctctctgacagagaagaaattgcacacaacatgcagcatgttttaacttatttgagccttctttatgagtaaatgattcctccttgttctgtctttcaaaccagctaaatatttgtcacaaaagtgcttttttctcactgttgcctattttcatatatcaggttttaaatagttttaattttttaataaaattttctctacgttctat

SEQ ID NO: 434070 - DNA, 273 bp, Homo sapiens
tttagagcagaaatatatatttaagaagccatgcatgtatatatttgtactcttcatgttaaattattattcatgtttttattctagattataaaagagtatgaaagagccatcatctttagattgggtcgcattttacaaggaggagccaaaggacctggtcagtactgggattctagattgtttatctgaaaactaaagttctttttattttttttatttttaggtagttgtttttttaaagacagggtttcattccgtcgcccaggctgg

SEQ ID NO: 434071 - DNA, 2108 bp, Homo sapiens
tcctgtcttcttgtcttgctagatcggggcagcagtgcttagggcgggcctcagaggctcacacacgtatcgccaggggagaaccagctctctccggcttggactcggggcggctccccgcctgcagccccggaagcgcatcctcaccttccctcgccttcctgttcctggcggagccgggctccgctcgtcttctctgtcttagggctggtgctggccctgcccacgcctagggctccggcgcgtcacgggcctcagctgggattcccgcgcccctcggacggccacgagactcggacatctttccaggaacagcgtgaggaggacagaagcacccaacaggactgctcaagccacctgcgaacactgctgctaccatgcccaagagaaaggcaaaaggagatgctaaaggtgataaagcaaaggtgaaggatgagccacagaggagatcagctcggttgtctgctaaaccagctcctccaaaaccagagcccaggcctaaaaaggcctctgcaaagaagggagagaagcttcccaaagggagaaaggggaaagcagatgctggaaaggatgggaacaaccctgcaaaaaaccgagatgcctctacactccagtcccagaaagcggaaggcactggggatgccaagtgaaatgtacatttttgagagctctgtacttatagtgactctactgtttgaaatactatttttttaaatcaagttttataaaagtgtagaattttggcttttttaagttatgttgttagcacacaggacacttccttgttgtcttttgtggaaagggcaagtaccactaatagggtgtatctcagaaactgaattgaaataagggaaaataggattttctgtcctggtttttgaagattgttcttgattcccttgattcccaggagagattctctgacattcacgtgtcagccactttggcacggaagccttacagtgtggggaaccaaaacttcgtgtctcctctttccccgatgccatcagcatagacttgacttccttaaaccgagagttttgatgtggccttggcaaccctaaaatcagctgtgttaggtaacaaaactcaggctttctgttgatgacatcgagatggtgtcacttaaaagagccaagattcctgttttcagtttgtggattcatcctgctggttttactttagtccctccatgtcaaagtgggcctgagaaaagctcatacatgcctcatgtgaagtgtccaccctctctgaaaatctttcttgttcaaaacagcaacgacatatcttgttaacttttacggtgacttttggaggaggggagtttggaaattgtaaaatgttatagattgttgcctatttcctgctgaaagtaaatgtttttaaaaagtatcatataaagctgaatacaaattggtttggggggagatcctttcctacccaaagtcataaatatattctttactgccttgtggaaattttatagttttgcctttcacatttgtctttagtctgtcctgaactgatttttgtgaaaattatgagttagaaattcaacttaacatttttcatattcgaagtggttgtctctgcactatttactgaaaagttcatcctttccccagtgatttgtaacactgcctctttcataaattaaatttttgtgtatgtgtgtgggtcttttgatggtttctattctgactgacatcaatttgtctaatcttgtagcagtacagtacagtcctgattattgcaactttaggaaaaggtctgataaaaaccaagatgcctccacattttgtcataattgtaaccaatttcacctctgtctccagtatcaccacaaaattgttcttccttggagtgtcttggctattcttagccaactgttcctccatattacttctagaattagaccaacaatttataaatcaaacaaacccaagagcattgaaattttgattggatttgtattgaatttatagattaatctggtaaaccatgtcatctttacaatgttgtcttccaatacatgaatatggtacagctcttcatttacttaggcctttgaaatatctttcaataaagtttataattttctccaaaaa

SEQ ID NO: 434072 - DNA, 2135 bp, Homo sapiens
tcctgtcttcttgtcttgctagatcggggcagcagtgcttagggcgggcctcagaggctcacacacgtatcgccaggggagaaccagctctctccggcttggactcggggcggctccccgcctgcagccccggaagcgcatcctcaccttccctcgccttcctgttcctggcggagccgggctccgctcgtcttctctgtcttagggctggtgctggccctgcccacgcctagggctccggcgcgtcacgggcctcagctgggattcccgcgcccctcggacggccacgagactcggacatctttccaggaacagcgtgaggaggacagaagcacccaacaggactgctcaagccacctgcgaacactgctgctaccatgcccaagagaaaggcaaaaggagatgctaaaggtgataaagcaaaggtgaaggatgagccacagaggagatcagctcggttgtctgctaaaccagctcctccaaaaccagagcccaggcctaaaaaggcctctgcaaagaagggagagaagcttcccaaagggagaaaggggaaagcagatgctggaaaggatgggaacaaccctgcaaaaaaccgagatgcctctacactccagtcccagaaagcggaaggcactggggatgccaagtgaaatgtacatttttgagagctctgtacttatagtgactctactgtttgaaatactatttttttaaatcaagttttataaaagtgtagaattttggcttttttaagttatgttgttagcacacaggacacttccttgttgtcttttgtggaaagggcaagtaccactaatagggtgtatctcagaaactgaattgaaataagggaaaataggattttctgtcctggtttttgaagattgttcttgattcccttgattcccaggagagattctctgacattcacgtgtcagccactttggcacggaagccttacagtgtggggaaccaaaacttcgtgtctcctctttccccgatgccatcagcatagacttgacttccttaaaccgagagttttgatgtggccttggcaaccctaaaatcagctgtgttaggtaacaaaactcaggctttctgttgatgacatcgagatggtgtcacttaaaagagccaagattcctgttttcagtttgtggattcatcctgctggttttactttagtccctccatgtcaaagtgggcctgagaaaagctcatacatgcctcatgtgaagtgtccaccctctctgaaaatctttcttgttcaaaacagcaacgacatatcttgttaacttttacggtgacttttggaggaggggagtttggaaattgtaaaatgttatagattgttgcctatttcctgctgaaagtaaatgtttttaaaaagtatcatataaagctgaatacaaattggtttggggggagatcctttcctacccaaagtcataaatatattctttactgccttgtggaaattttatagttttgcctttcacatttgtctttagtctgtcctgaactgatttttgtgaaaattatgagttagaaattcaacttaacatttttcatattcgaagtggttgtctctgcactatttactgaaaagttcatcctttccccagtgatttgtaacactgcctctttcataaattaaatttttgtgtatgtgtgtgggtcttttgatggtttctattctgactgacatcaatttgtctaatcttgtagcagtacagtacagtcctgattattgcaactttaggaaaaggtctgataaaaaccaagatgcctccacattttgtcataattgtaaccaatttcacctctgtctccagtatcaccacaaaattgttcttccttggagtgtcttggctattcttagccaactgttcctccatattacttctagaattagaccaacaatttataaatcaaacaaacccaagagcattgaaattttgattggatttgtattgaatttatagattaatctggtaaaccatgtcatctttacaatgttgtcttccaatacatgaatatggtacagctcttcatttacttaggcctttgaaatatctttcaataaagtttataattttctccaaaaagaaaaaaaaaaaaaaaaaatttggggg

SEQ ID NO: 434073 - DNA, 2039 bp, Homo sapiens
tcctgtcttcttgtcttgctagatcggggcagcagtgcttagggcgggcctcagaggctcacacacgtatcgccaggggagaaccagctctctccggcttggactcggggcggctccccgcctgcagccccggaagcgcatcctcaccttccctcgccttcctgttcctggcggagccgggctccgctcgtcttctctgtcttagggctggtgctggccctgcccacgcctagggctccggcgcgtcacgggcctcagctgggattcccgcgcccctcggacggccacgagactcggacatctttccaggaacagcgtgaggaggacagaagcacccaacaggactgctcaagccacctgcgaacactgctgctaccatgcccaagagaaaggcaaaaggagatgctaaaggtgataaagcaaaggtgaaggatgagccacagaggagatcagctcggttgtctgctaaaccagctcctccaaaaccagagcccaggcctaaaaaggcctctgcaaagaagggagagaagcttcccaaagggagaaaggggaaagcagatgctggaaaggatgggaacaaccctgcaaaaaaccgagatgcctctacactccagtcccagaaagcggaaggcactggggatgccaagtgaaatgtacatttttgagagctctgtacttatagtgactctactgtttgaaatactatttttttaaatcaagttttataaaagtgtagaattttggcttttttaagttatgttgttagcacacaggacacttccttgttgtcttttgtggaaagggcaagtaccactaatagggtgtatctcagaaactgaattgaaataagggaaaataggattttctgtcctggtttttgaagattgttcttgattcccttgattcccaggagagattctctgacattcacgtgtcagccactttggcacggaagccttacagtgtggggaaccaaaacttcgtgtctcctctttccccgatgccatcagcatagacttgacttccttaaaccgagagttttgatgtggccttggcaaccctaaaatcagctgtgttaggtaacaaaactcaggctttctgttgatgacatcgagatggtgtcacttaaaagagccaagattcctgttttcagtttgtggattcatcctgctggttttactttagtccctccatgtcaaagtgggcctgagaaaagctcatacatgcctcatgtgaagtgtccaccctctctgaaaatctttcttgttcaaaacagcaacgacatatcttgttaacttttacggtgacttttggaggaggggagtttggaaattgtaaaatgttatagattgttgcctatttcctgctgaaagtaaatgtttttaaaaagtatcatataaagctgaatacaaattggtttggggggagatcctttcctacccaaagtcataaatatattctttactgccttgtggaaattttatagttttgcctttcacatttgtctttagtctgtcctgaactgatttttgtgaaaattatgagttagaaattcaacttaacatttttcatattcgaagtggttgtctctgcactatttactgaaaagttcatcctttccccagtgatttgtaacactgcctctttcataaattaaatttttgtgtatgtgtgtgggtcttttgatggtttctattctgactgacatcaatttgtctaatcttgtagcagtacagtacagtcctgattattgcaactttaggaaaaggtctgataaaaaccaagatgcctccacattttgtcataattgtaaccaatttcacctctgtctccagtatcaccacaaaattgttcttccttggagtgtcttggctattcttagccaactgttcctccatattacttctagaattagaccaacaatttataaatcaaacaaacccaagagcattgaaattttgattggatttgtattgaatttatagattaatctggtaaaccatgtcatcagacacgtatgggatcctctggaacactaa

SEQ ID NO: 434074 - DNA, 1844 bp, Homo sapiens
gaaacaattttggagtgagatggaaggagaatgacatctttccaggaacagcgtgaggaggacagaagcacccaacaggactgctcaagccacctgcgaacactgctgctaccatgcccaagagaaaggcaaaaggagatgctaaaggtgataaagcaaaggtgaaggatgagccacagaggagatcagctcggttgtctgctaaaccagctcctccaaaaccagagcccaggcctaaaaaggcctctgcaaagaagggagagaagcttcccaaagggagaaaggggaaagcagatgctggaaaggatgggaacaaccctgcaaaaaaccgagatgcctctacactccagtcccagaaagcggaaggcactggggatgccaagtgaaatgtacatttttgagagctctgtacttatagtgactctactgtttgaaatactatttttttaaatcaagttttataaaagtgtagaattttggcttttttaagttatgttgttagcacacaggacacttccttgttgtcttttgtggaaagggcaagtaccactaatagggtgtatctcagaaactgaattgaaataagggaaaataggattttctgtcctggtttttgaagattgttcttgattcccttgattcccaggagagattctctgacattcacgtgtcagccactttggcacggaagccttacagtgtggggaaccaaaacttcgtgtctcctctttccccgatgccatcagcatagacttgacttccttaaaccgagagttttgatgtggccttggcaaccctaaaatcagctgtgttaggtaacaaaactcaggctttctgttgatgacatcgagatggtgtcacttaaaagagccaagattcctgttttcagtttgtggattcatcctgctggttttactttagtccctccatgtcaaagtgggcctgagaaaagctcatacatgcctcatgtgaagtgtccaccctctctgaaaatctttcttgttcaaaacagcaacgacatatcttgttaacttttacggtgacttttggaggaggggagtttggaaattgtaaaatgttatagattgttgcctatttcctgctgaaagtaaatgtttttaaaaagtatcatataaagctgaatacaaattggtttggggggagatcctttcctacccaaagtcataaatatattctttactgccttgtggaaattttatagttttgcctttcacatttgtctttagtctgtcctgaactgatttttgtgaaaattatgagttagaaattcaacttaacatttttcatattcgaagtggttgtctctgcactatttactgaaaagttcatcctttccccagtgatttgtaacactgcctctttcataaattaaatttttgtgtatgtgtgtgggtcttttgatggtttctattctgactgacatcaatttgtctaatcttgtagcagtacagtacagtcctgattattgcaactttaggaaaaggtctgataaaaaccaagatgcctccacattttgtcataattgtaaccaatttcacctctgtctccagtatcaccacaaaattgttcttccttggagtgtcttggctattcttagccaactgttcctccatattacttctagaattagaccaacaatttataaatcaaacaaacccaagagcattgaaattttgattggatttgtattgaatttatagattaatctggtaaaccatgtcatctttacaatgttgtcttccaatacatgaatatggtacagctcttcatttacttaggcctttgaaatatctttcaataaagtttataattttctccaaaaa

SEQ ID NO: 434075 - DNA, 2234 bp, Homo sapiens
tcctgtcttcttgtcttgctagatcggggcagcagtgcttagggcgggcctcagaggctcacacacgtatcgccaggggagaaccagctctctccggcttggactcggggcggctccccgcctgcagccccggaagcgcatcctcaccttccctcgccttcctgttcctggcggagccgggctccgctcgtcttctctgtcttagggctggtgctggccctgcccacgcctagggctccggcgcgtcacgggcctcagctgggattcccgcgcccctcggacggccacgagactcggaaatataagcaagttattatggtgcccagaaagggggaaaaggttccagagtcctaggagatgacaaggatttatcctcttcatctttctccgatcccagttagcaggaatactttagcctggaagacatctttccaggaacagcgtgaggaggacagaagcacccaacaggactgctcaagccacctgcgaacactgctgctaccatgcccaagagaaaggcaaaaggagatgctaaaggtgataaagcaaaggtgaaggatgagccacagaggagatcagctcggttgtctgctaaaccagctcctccaaaaccagagcccaggcctaaaaaggcctctgcaaagaagggagagaagcttcccaaagggagaaaggggaaagcagatgctggaaaggatgggaacaaccctgcaaaaaaccgagatgcctctacactccagtcccagaaagcggaaggcactggggatgccaagtgaaatgtacatttttgagagctctgtacttatagtgactctactgtttgaaatactatttttttaaatcaagttttataaaagtgtagaattttggcttttttaagttatgttgttagcacacaggacacttccttgttgtcttttgtggaaagggcaagtaccactaatagggtgtatctcagaaactgaattgaaataagggaaaataggattttctgtcctggtttttgaagattgttcttgattcccttgattcccaggagagattctctgacattcacgtgtcagccactttggcacggaagccttacagtgtggggaaccaaaacttcgtgtctcctctttccccgatgccatcagcatagacttgacttccttaaaccgagagttttgatgtggccttggcaaccctaaaatcagctgtgttaggtaacaaaactcaggctttctgttgatgacatcgagatggtgtcacttaaaagagccaagattcctgttttcagtttgtggattcatcctgctggttttactttagtccctccatgtcaaagtgggcctgagaaaagctcatacatgcctcatgtgaagtgtccaccctctctgaaaatctttcttgttcaaaacagcaacgacatatcttgttaacttttacggtgacttttggaggaggggagtttggaaattgtaaaatgttatagattgttgcctatttcctgctgaaagtaaatgtttttaaaaagtatcatataaagctgaatacaaattggtttggggggagatcctttcctacccaaagtcataaatatattctttactgccttgtggaaattttatagttttgcctttcacatttgtctttagtctgtcctgaactgatttttgtgaaaattatgagttagaaattcaacttaacatttttcatattcgaagtggttgtctctgcactatttactgaaaagttcatcctttccccagtgatttgtaacactgcctctttcataaattaaatttttgtgtatgtgtgtgggtcttttgatggtttctattctgactgacatcaatttgtctaatcttgtagcagtacagtacagtcctgattattgcaactttaggaaaaggtctgataaaaaccaagatgcctccacattttgtcataattgtaaccaatttcacctctgtctccagtatcaccacaaaattgttcttccttggagtgtcttggctattcttagccaactgttcctccatattacttctagaattagaccaacaatttataaatcaaacaaacccaagagcattgaaattttgattggatttgtattgaatttatagattaatctggtaaaccatgtcatctttacaatgttgtcttccaatacatgaatatggtacagctcttcatttacttaggcctttgaaatatctttcaataaagtttataattttctccaaaaa

SEQ ID NO: 434076 - DNA, 1472 bp, Homo sapiens
ggaaagctatgacaggaacaggtatacaggaaacagctagtactgtaaaagtctatagtaggaaaagtatttaacgagaacaagttttataaaagtgtagaattttggcttttttaagttatgttgttagcacacaggacacttccttgttgtcttttgtggaaagggcaagtaccactaatagggtgtatctcagaaactgaattgaaataagggaaaataggattttctgtcctggtttttgaagattgttcttgattcccttgattcccaggagagattctctgacattcacgtgtcagccactttggcacggaagccttacagtgtggggaaccaaaacttcgtgtctcctctttccccgatgccatcagcatagacttgacttccttaaaccgagagttttgatgtggccttggcaaccctaaaatcagctgtgttaggtaacaaaactcaggctttctgttgatgacatcgagatggtgtcacttaaaagagccaagattcctgttttcagtttgtggattcatcctgctggttttactttagtccctccatgtcaaagtgggcctgagaaaagctcatacatgcctcatgtgaagtgtccaccctctctgaaaatctttcttgttcaaaacagcaacgacatatcttgttaacttttacggtgacttttggaggaggggagtttggaaattgtaaaatgttatagattgttgcctatttcctgctgaaagtaaatgtttttaaaaagtatcatataaagctgaatacaaattggtttggggggagatcctttcctacccaaagtcataaatatattctttactgccttgtggaaattttatagttttgcctttcacatttgtctttagtctgtcctgaactgatttttgtgaaaattatgagttagaaattcaacttaacatttttcatattcgaagtggttgtctctgcactatttactgaaaagttcatcctttccccagtgatttgtaacactgcctctttcataaattaaatttttgtgtatgtgtgtgggtcttttgatggtttctattctgactgacatcaatttgtctaatcttgtagcagtacagtacagtcctgattattgcaactttaggaaaaggtctgataaaaaccaagatgcctccacattttgtcataattgtaaccaatttcacctctgtctccagtatcaccacaaaattgttcttccttggagtgtcttggctattcttagccaactgttcctccatattacttctagaattagaccaacaatttataaatcaaacaaacccaagagcattgaaattttgattggatttgtattgaatttatagattaatctggtaaaccatgtcatctttacaatgttgtcttccaatacatgaatatggtacagctcttcatttacttaggcctttgaaatatctttcaataaagtttataattttctccaaaaa

SEQ ID NO: 434077 - DNA, 1797 bp, Homo sapiens
tcctgtcttcttgtcttgctagatcggggcagcagtgcttagggcgggcctcagaggctcacacacgtatcgccaggggagaaccagctctctccggcttggactcggggcggctccccgcctgcagccccggaagcgcatcctcaccttccctcgccttcctgttcctggcggagccgggctccgctcgtcttctctgtcttagggctggtgctggccctgcccacgcctagggctccggcgcgtcacgggcctcagctgggattcccgcgcccctcggacggccacgagactcggacatctttccaggaacagcgtgaggaggacagaagcacccaacaggactgctcaagccacctgcgaacactgctgctaccatgcccaagagaaaggcaaaaggagatgctaaaggtgataaagcaaaggtgaaggatgagccacagaggagatcagctcggttgtctgctaaaccagctcctccaaaaccagagcccaggcctaaaaaggcctctgcaaagaagggagagaagcttcccaaagggagaaaggggaaagcagatgctggaaaggatgggaacaaccctgcaaaaaaccgagatgcctctacactccagtcccagaaagcggaaggcactggggatgccaagtgaaatgtacatttttgagagctctgtacttatagtgactctactgtttgaaatactatttttttaaatcaagttttataaaagtgtagaattttggcttttttaagttatgttgttagcacacaggacacttccttgttgtcttttgtggaaagggcaagtaccactaatagggtgtatctcagaaactgaattgaaataagggaaaataggattttctgtcctggtttttgaagattgttcttgattcccttgattcccaggagagattctctgacattcacgtgtcagccactttggcacggaagccttacagtgtggggaaccaaaacttcgtgtctcctctttccccgatgccatcagcatagacttgacttccttaaaccgagagttttgatgtggccttggcaaccctaaaatcagctgtgttaggtaacaaaactcaggctttctgttgatgacatcgagatggtgtcacttaaaagagccaagattcctgttttcagtttgtggattcatcctgctggttttactttagtccctccatgtcaaagtgggcctgagaaaagctcatacatgcctcatgtgaagtgtccaccctctctgaaaatctttcttgttcaaaacagcaacgacatatcttgttaacttttacggtgacttttggaggaggggagtttggaaattgtaaaatgttatagattgttgcctatttcctgctgaaagtaaatgtttttaaaaagtatcatataaagctgaatacaaattggtttggggggagatcctttcctacccaaagtcataaatatattctttactgccttgtggaaattttatagttttgcctttcacatttgtctttagtctctgtctccagtatcaccacaaaattgttcttccttggagtgtcttggctattcttagccaactgttcctccatattacttctagaattagaccaacaatttataaatcaaacaaacccaagagcattgaaattttgattggatttgtattgaatttatagattaatctggtaaaccatgtcatctttacaatgttgtcttccaatacatgaatatggtacagctcttcatttacttaggcctttgaaatatctttcaataaagtttataattttctccaaaaa

SEQ ID NO: 434078 - DNA, 2422 bp, Homo sapiens
cacgcgtccggctagaaacattcttgtggagatctcctgtccacacctccaagaatccctctaagtaaacacctagaagtaaaattgctttacacaataccactgtttgcagagtgctttacaaataaccactgtttccaaaagcaaatacactaattggcacacacacacagcagtacataagggttttgattgctccatatcagctgagcccttgatattgtcagacaacttggttttcctcagtttgatagatatgaaatgttatatcctatgcttttaatatgtacttcttatatatttttaggtgcttattcctcactcatgcttccaagaagtacctgttaacattttttgccatagttttaaaattttcattttgtcctttcctcatggatctataggaatgctttatgtattcaggattctaacattttgtccattatatattttacatatatctttgccaagctggtacttattgttttacttttattatgctatcttttttgatatacacgaattattaacaatatagtcaatttgatttttaacgtttacattggtcagtctttccctttatggtttacgctttttgtgtcttgttaaagacatctttccaggaacagcgtgaggaggacagaagcacccaacaggactgctcaagccacctgcgaacactgctgctaccatgcccaagagaaaggcaaaaggagatgctaaaggtgataaagcaaaggtgaaggatgagccacagaggagatcagctcggttgtctgctaaaccagctcctccaaaaccagagcccaggcctaaaaaggcctctgcaaagaagggagagaagcttcccaaagggagaaaggggaaagcagatgctggaaaggatgggaacaaccctgcaaaaaaccgagatgcctctacactccagtcccagaaagcggaaggcactggggatgccaagtgaaatgtacatttttgagagctctgtacttatagtgactctactgtttgaaatactatttttttaaatcaagttttataaaagtgtagaattttggcttttttaagttatgttgttagcacacaggacacttccttgttgtcttttgtggaaagggcaagtaccactaatagggtgtatctcagaaactgaattgaaataagggaaaataggattttctgtcctggtttttgaagattgttcttgattcccttgattcccaggagagattctctgacattcacgtgtcagccactttggcacggaagccttacagtgtggggaaccaaaacttcgtgtctcctctttccccgatgccatcagcatagacttgacttccttaaaccgagagttttgatgtggccttggcaaccctaaaatcagctgtgttaggtaacaaaactcaggctttctgttgatgacatcgagatggtgtcacttaaaagagccaagattcctgttttcagtttgtggattcatcctgctggttttactttagtccctccatgtcaaagtgggcctgagaaaagctcatacatgcctcatgtgaagtgtccaccctctctgaaaatctttcttgttcaaaacagcaacgacatatcttgttaacttttacggtgacttttggaggaggggagtttggaaattgtaaaatgttatagattgttgcctatttcctgctgaaagtaaatgtttttaaaaagtatcatataaagctgaatacaaattggtttggggggagatcctttcctacccaaagtcataaatatattctttactgccttgtggaaattttatagttttgcctttcacatttgtctttagtctgtcctgaactgatttttgtgaaaattatgagttagaaattcaacttaacatttttcatattcgaagtggttgtctctgcactatttactgaaaagttcatcctttccccagtgatttgtaacactgcctctttcataaattaaatttttgtgtatgtgtgtgggtcttttgatggtttctattctgactgacatcaatttgtctaatcttgtagcagtacagtacagtcctgattattgcaactttaggaaaaggtctgataaaaaccaagatgcctccacattttgtcataattgtaaccaatttcacctctgtctccagtatcaccacaaaattgttcttccttggagtgtcttggctattcttagccaactgttcctccatattacttctagaattagaccaacaatttataaatcaaacaaacccaagagcattgaaattttgattggatttgtattgaatttatagattaatctggtaaaccatgtcatctttacaatgttgtcttccaatacatgaatatggtacagctcttcatttacttaggcctttgaaatatctttcaataaagtttataattttctccaaaaa

SEQ ID NO: 434079 - DNA, 3522 bp, Homo sapiens
  misc_feature (170)..(170): n is a, c, g, or t
cgcggggggtgggcgcagctcgtcgcgctccgcacaaagtttgttttctccctccgggcgggtgggggagggcgcagagggcgcggggggaggagaggggatctgacgtcaggccgcgaggtgctttccacgccgcgagctgtcaggccgagtgtcaggccgggcaggtncgcggcgcgcgcccccggcgccccccgctccccgccgggacgccccgcgccgagccggaggccgcgtggacccgaaagccgctgggaaaagtttacccaaggtccagcctagcccctaggcaccatgtcggacagtgatctaggtgaggacgaaggcctcctctccctggcgggcaaaaggaagcgcagggggaacctgcccaaggagtcggtgaagatcctccgggactggctgtacttgcaccgctacaacgcctacccctcagagcaggagaagctgagcctttctggacagaccaacctgtcagtgctgcaaatatgtaactggttcatcaatgcccggcggcggcttctcccagacatgcttcggaaggatggcaaagaccctaatcagtttaccatttcccgccgcgggggtaaggcctcagatgtggccctcccccgtggcagcagcccctcagtgctggctgtgtctgtcccagcccccaccaatgtgctctccctgtctgtgtgctccatgccgcttcactcaggccagggggaaaagccagcagcccctttcccacgtggggagctggagtctcccaagcccctggtgacccctggtagcacacttactctgctgaccagggctgaggctggaagccccacaggtggactcttcaacacgccaccacccacacccccagagcaggacaaagaggacttcagcagcttccagctgctggtggaggtggcgctacagagggctgctgagatggagcttcagaagcagcaggacccatcactcccattactgcacactcccatccctttagtctctgaaaatccccagtaggcatctgccaagaagggtgctgaaggctccagccagctgtcctgggtttccgttttggttccctttcatacagagggttttctatggatcactgccaaacattgggatcatctcctctgtccagaggtcttcaacaggaagatgccagctggcaccactgcactgtgatgggggccctctcctctgctgactctgccgtttctccaggcctccgctcagtgatgagaccaagagatcggagacaagcatggtgctgctgcttctgctgcttctccagaaaatccctgggacacctttgttccagcctggtttcctgggctgggctcaggaaagctgccaaattcagtcctatgttgggtccaagctgcccctgtgctgtttctgtcaagccaggtgtggacattccaagttcatatgcgtgaacaaaagaaaagaggaacccagtggatgtaacagaaccgactccagttgaatgtttagatttttgctaaactgttttctttttcccttttttgctgtggtttgcattcacggcagtagttagcccaggtgtggggaacgagagtgcactgcatgatagcgttctggtgagctgggaaggacccaccactgccactgaggattgttttggaagaaaggaatatttttatcttggggaccagctaagtctctgcagtagtgtgaaattccaaatggttgttttatcattggtttggtttaccaaaaaaaaggcagggaaaaaaaaaaaaaacaaccgtatgagcgcattggcttgtctgccgcaggcacagaagggtagaaagccacagcagggggcagtccagcagactctgactcaactttctaggcacctagcagagaaagataagatcaaaaggtgtttggtttttcttttaatttttattgtagtttttttgggtgggtgggggaagtaaactagactgaagcgatggatttttttttttcttttttttctttagtgtttttccctttgttcttgaacacttttgccctgcagcctcagttttgaattcttttagcaacttggattagaggggcccatatgtcagaagctcccagcacctcctacttgggagaaaagtgagccatctgctggtcaggaagtcctccagagaggcagcttttcccacaatggtggcaggaaactttggggaaagcaggaatggtgtccactgctgcggaggaactgccttcagagaaggtggggctggaaaagggttagaagcctcctagctgggattgtctttgtttcacctttctttaaattagaattacagaagcccctgcccagtgaacagataacaattggtcttatgctcctccctttcccccattttttcttttgctgttttgttttttgttttttgtttgtttgtttgtttttttgagacagagtcatgctctgtcacccgggctggagtgcagtggtgcgatctcagctcactgtaacctccgcctcccgggttcaagcaattatttgcctcagcctcccgagtagctgggattataggcacccgccaccatgtctggcttttagtagagacggggtttcaccatcttggccaggctggtcttggaactcctgacctcgtgagccaccacgcccagcctcttttgctgtttcattgctgacagtgttcaacaatatgccccatctttatatatcctaagaaacactaatcctaggttattgctagccaaaatatttttgtcctgagtagtgtcactgggccaaaagatagatcaggacgacagcctttagttttcctgaaatcaccaggtcaggcacaaggagaaaaggttcctggatactgactaacttgggtgggtctagccaggagaaagacagtaacatgtgttctgtactttctgggaagatccctgaagccatcacagaggctccccaacttctgagtcgcccatctgttgctgtgggagtgtgaacggatcgctgaaggagagggagctttgctctctctaggtgggcaagtttcctgggctctctgtgttgcctccctctggcttcttcctcccgtgccctctccccgtgtgccccagggggatcagggatcctcaccctcctgaggcccagtggggaagaatgaacatggcttcatccaggttaactgatgctgccatttgcccagcctcttccatcccagccctgtcagtgagcccaggtctggtgcaactgctgcaggatgcctgtagtagggaactctggaagtgtattgggctgaggtgggattttccctccccacagtgcactgagcaatggagggtggtgagggagccatgctgctgaattctggttggcatttccccattatgtaaaatggggtgttgggtagggcagactctgcttgggtttggttgtaagataaacctggaggagaagcacagttgtcccattgaattatttgagcaaaaactactgtaaataacttttttgtcttttgtcaaataaaatttttttttgtttttttaagcaga

SEQ ID NO: 434080 - DNA, 3429 bp, Homo sapiens
cgcggggggtgggcgcagctcgtcgcgctccgcacaaagtttgttttctccctccgggcgggtgggggagggcgcagagggcgcggggggaggagaggggatctgacgtcaggccgcgaggtgctttccacgccgcgagctgtcaggccgagtgtcaggccgggcaggtttacccaaggtccagcctagcccctaggcaccatgtcggacagtgatctaggtgaggacgaaggcctcctctccctggcgggcaaaaggaagcgcagggggaacctgcccaaggagtcggtgaagatcctccgggactggctgtacttgcaccgctacaacgcctacccctcagagcaggagaagctgagcctttctggacagaccaacctgtcagtgctgcaaatatgtaactggttcatcaatgcccggcggcggcttctcccagacatgcttcggaaggatggcaaagaccctaatcagtttaccatttcccgccgcgggggtaaggcctcagatgtggccctcccccgtggcagcagcccctcagtgctggctgtgtctgtcccagcccccaccaatgtgctctccctgtctgtgtgctccatgccgcttcactcaggccagggggaaaagccagcagcccctttcccacgtggggagctggagtctcccaagcccctggtgacccctggtagcacacttactctgctgaccagggctgaggctggaagccccacaggtggactcttcaacacgccaccacccacacccccagagcaggacaaagaggacttcagcagcttccagctgctggtggaggtggcgctacagagggctgctgagatggagcttcagaagcagcaggacccatcactcccattactgcacactcccatccctttagtctctgaaaatccccagtaggcatctgccaagaagggtgctgaaggctccagccagctgtcctgggtttccgttttggttccctttcatacagagggttttctatggatcactgccaaacattgggatcatctcctctgtccagaggtcttcaacaggaagatgccagctggcaccactgcactgtgatgggggccctctcctctgctgactctgccgtttctccaggcctccgctcagtgatgagaccaagagatcggagacaagcatggtgctgctgcttctgctgcttctccagaaaatccctgggacacctttgttccagcctggtttcctgggctgggctcaggaaagctgccaaattcagtcctatgttgggtccaagctgcccctgtgctgtttctgtcaagccaggtgtggacattccaagttcatatgcgtgaacaaaagaaaagaggaacccagtggatgtaacagaaccgactccagttgaatgtttagatttttgctaaactgttttctttttcccttttttgctgtggtttgcattcacggcagtagttagcccaggtgtggggaacgagagtgcactgcatgatagcgttctggtgagctgggaaggacccaccactgccactgaggattgttttggaagaaaggaatatttttatcttggggaccagctaagtctctgcagtagtgtgaaattccaaatggttgttttatcattggtttggtttaccaaaaaaaaggcagggaaaaaaaaaaaaaacaaccgtatgagcgcattggcttgtctgccgcaggcacagaagggtagaaagccacagcagggggcagtccagcagactctgactcaactttctaggcacctagcagagaaagataagatcaaaaggtgtttggtttttcttttaatttttattgtagtttttttgggtgggtgggggaagtaaactagactgaagcgatggatttttttttttcttttttttctttagtgtttttccctttgttcttgaacacttttgccctgcagcctcagttttgaattcttttagcaacttggattagaggggcccatatgtcagaagctcccagcacctcctacttgggagaaaagtgagccatctgctggtcaggaagtcctccagagaggcagcttttcccacaatggtggcaggaaactttggggaaagcaggaatggtgtccactgctgcggaggaactgccttcagagaaggtggggctggaaaagggttagaagcctcctagctgggattgtctttgtttcacctttctttaaattagaattacagaagcccctgcccagtgaacagataacaattggtcttatgctcctccctttcccccattttttcttttgctgttttgttttttgttttttgtttgtttgtttgtttttttgagacagagtcatgctctgtcacccgggctggagtgcagtggtgcgatctcagctcactgtaacctccgcctcccgggttcaagcaattatttgcctcagcctcccgagtagctgggattataggcacccgccaccatgtctggcttttagtagagacggggtttcaccatcttggccaggctggtcttggaactcctgacctcgtgagccaccacgcccagcctcttttgctgtttcattgctgacagtgttcaacaatatgccccatctttatatatcctaagaaacactaatcctaggttattgctagccaaaatatttttgtcctgagtagtgtcactgggccaaaagatagatcaggacgacagcctttagttttcctgaaatcaccaggtcaggcacaaggagaaaaggttcctggatactgactaacttgggtgggtctagccaggagaaagacagtaacatgtgttctgtactttctgggaagatccctgaagccatcacagaggctccccaacttctgagtcgcccatctgttgctgtgggagtgtgaacggatcgctgaaggagagggagctttgctctctctaggtgggcaagtttcctgggctctctgtgttgcctccctctggcttcttcctcccgtgccctctccccgtgtgccccagggggatcagggatcctcaccctcctgaggcccagtggggaagaatgaacatggcttcatccaggttaactgatgctgccatttgcccagcctcttccatcccagccctgtcagtgagcccaggtctggtgcaactgctgcaggatgcctgtagtagggaactctggaagtgtattgggctgaggtgggattttccctccccacagtgcactgagcaatggagggtggtgagggagccatgctgctgaattctggttggcatttccccattatgtaaaatggggtgttgggtagggcagactctgcttgggtttggttgtaagataaacctggaggagaagcacagttgtcccattgaattatttgagcaaaaactactgtaaataacttttttgtcttttgtcaaataaaatttttttttgtttttttaagcaga

SEQ ID NO: 434081 - DNA, 3362 bp, Homo sapiens
aacagtatcttgttctatatgcctagactggaatccagtggtgcgatcatagctcattgcaggctccacctcttgggctccagctatcttccgatctcaggctcccaagtagttgggaccacaggggtgcaccactacacctggctaacttcttttgtagaaacagggtctccctgtgttgcccaggctggtcttgaactcctgggcttaagcaatcctcccgccttggccacccaaagtgttgggattacaggtgtgagccactgtgcccagcccatagctgttttagattaagcaaattgatcggtcttgtatattcattccagatatgtaactggttcatcaatgcccggcggcggcttctcccagacatgcttcggaaggatggcaaagaccctaatcagtttaccatttcccgccgcgggggtaaggcctcagatgtggccctcccccgtggcagcagcccctcagtgctggctgtgtctgtcccagcccccaccaatgtgctctccctgtctgtgtgctccatgccgcttcactcaggccagggggaaaagccagcagcccctttcccacgtggggagctggagtctcccaagcccctggtgacccctggtagcacacttactctgctgaccagggctgaggctggaagccccacaggtggactcttcaacacgccaccacccacacccccagagcaggacaaagaggacttcagcagcttccagctgctggtggaggtggcgctacagagggctgctgagatggagcttcagaagcagcaggacccatcactcccattactgcacactcccatccctttagtctctgaaaatccccagtaggcatctgccaagaagggtgctgaaggctccagccagctgtcctgggtttccgttttggttccctttcatacagagggttttctatggatcactgccaaacattgggatcatctcctctgtccagaggtcttcaacaggaagatgccagctggcaccactgcactgtgatgggggccctctcctctgctgactctgccgtttctccaggcctccgctcagtgatgagaccaagagatcggagacaagcatggtgctgctgcttctgctgcttctccagaaaatccctgggacacctttgttccagcctggtttcctgggctgggctcaggaaagctgccaaattcagtcctatgttgggtccaagctgcccctgtgctgtttctgtcaagccaggtgtggacattccaagttcatatgcgtgaacaaaagaaaagaggaacccagtggatgtaacagaaccgactccagttgaatgtttagatttttgctaaactgttttctttttcccttttttgctgtggtttgcattcacggcagtagttagcccaggtgtggggaacgagagtgcactgcatgatagcgttctggtgagctgggaaggacccaccactgccactgaggattgttttggaagaaaggaatatttttatcttggggaccagctaagtctctgcagtagtgtgaaattccaaatggttgttttatcattggtttggtttaccaaaaaaaaggcagggaaaaaaaaaaaaaacaaccgtatgagcgcattggcttgtctgccgcaggcacagaagggtagaaagccacagcagggggcagtccagcagactctgactcaactttctaggcacctagcagagaaagataagatcaaaaggtgtttggtttttcttttaatttttattgtagtttttttgggtgggtgggggaagtaaactagactgaagcgatggatttttttttttcttttttttctttagtgtttttccctttgttcttgaacacttttgccctgcagcctcagttttgaattcttttagcaacttggattagaggggcccatatgtcagaagctcccagcacctcctacttgggagaaaagtgagccatctgctggtcaggaagtcctccagagaggcagcttttcccacaatggtggcaggaaactttggggaaagcaggaatggtgtccactgctgcggaggaactgccttcagagaaggtggggctggaaaagggttagaagcctcctagctgggattgtctttgtttcacctttctttaaattagaattacagaagcccctgcccagtgaacagataacaattggtcttatgctcctccctttcccccattttttcttttgctgttttgttttttgttttttgtttgtttgtttgtttttttgagacagagtcatgctctgtcacccgggctggagtgcagtggtgcgatctcagctcactgtaacctccgcctcccgggttcaagcaattatttgcctcagcctcccgagtagctgggattataggcacccgccaccatgtctggcttttagtagagacggggtttcaccatcttggccaggctggtcttggaactcctgacctcgtgagccaccacgcccagcctcttttgctgtttcattgctgacagtgttcaacaatatgccccatctttatatatcctaagaaacactaatcctaggttattgctagccaaaatatttttgtcctgagtagtgtcactgggccaaaagatagatcaggacgacagcctttagttttcctgaaatcaccaggtcaggcacaaggagaaaaggttcctggatactgactaacttgggtgggtctagccaggagaaagacagtaacatgtgttctgtactttctgggaagatccctgaagccatcacagaggctccccaacttctgagtcgcccatctgttgctgtgggagtgtgaacggatcgctgaaggagagggagctttgctctctctaggtgggcaagtttcctgggctctctgtgttgcctccctctggcttcttcctcccgtgccctctccccgtgtgccccagggggatcagggatcctcaccctcctgaggcccagtggggaagaatgaacatggcttcatccaggttaactgatgctgccatttgcccagcctcttccatcccagccctgtcagtgagcccaggtctggtgcaactgctgcaggatgcctgtagtagggaactctggaagtgtattgggctgaggtgggattttccctccccacagtgcactgagcaatggagggtggtgagggagccatgctgctgaattctggttggcatttccccattatgtaaaatggggtgttgggtagggcagactctgcttgggtttggttgtaagataaacctggaggagaagcacagttgtcccattgaattatttgagcaaaaactactgtaaataacttttttgtcttttgtcaaataaaatttttttttgtttttttaagcaga

SEQ ID NO: 434082 - DNA, 3735 bp, Homo sapiens
  misc_feature (170)..(170): n is a, c, g, or t
cgcggggggtgggcgcagctcgtcgcgctccgcacaaagtttgttttctccctccgggcgggtgggggagggcgcagagggcgcggggggaggagaggggatctgacgtcaggccgcgaggtgctttccacgccgcgagctgtcaggccgagtgtcaggccgggcaggtncgcggcgcgcgcccccggcgccccccgctccccgccgggacgccccgcgccgagccggaggccgcgtggacccgaaagccgctgggaaaagtttacccaaggtccagcctagcccctaggcaccatgtcggacagtgatctaggtgaggacgaaggcctcctctccctggcgggcaaaaggaagcgcagggggaacctgcccaaggagtcggtgaagatcctccgggactggctgtacttgcaccgctacaacgcctacccctcagagcaggagaagctgagcctttctggacagaccaacctgtcagtgctgcaaatatgtaactggttcatcaatgcccggcggcggcttctcccagacatgcttcggaaggatggcaaagaccctaatcagtttaccatttcccgccgcgggggtaaggcctcagatgtggccctcccccgtggcagcagcccctcagtgctggctgtgtctgtcccagcccccaccaatgtgctctccctgtctgtgtgctccatgccgcttcactcaggccagggggaaaagccagcagcccctttcccacgtggggagctggagtctcccaagcccctggtgacccctggtagcacacttactctgctgaccagggctgaggctggaagccccacaggtggactcttcaacacgccaccacccacacccccagagcaggacaaagaggacttcagcagcttccagctgctggtggaggtggcgctacagagggctgctgagatggagcttcagaagcagcaggacccatcactcccattactgcacactcccatccctttagtctctgaaaatccccagtaggcatctgccaagaagggtgctgaaggctccagccagctgtcctgggtttccgttttggttccctttcatacagagggttttctatggatcactgccaaacattgggatcatctcctctgtccagaggtcttcaacaggaagatgccagctggcaccactgcactgtgatgggggccctctcctctgctgactctgccgtttctccaggcctccgctcagtgatgagaccaagagatcggagacaagcatggtgctgctgcttctgctgcttctccagaaaatccctgggacacctttgttccagcctggtttcctgggctgggctcaggaaagctgccaaattcagtcctatgttgggtccaagctgcccctgtgctgtttctgtcaagccaggtgtggacattccaagttcatatgcgtgaacaaaagaaaagaggaacccagtggatgtaacagaaccgactccagttgaatgtttagatttttgctaaactgttttctttttcccttttttgctgtggtttgcattcacggcagtagttagcccaggtgtggggaacgagagtgcactgcatgatagcgttctggtgagctgggaaggacccaccactgccactgaggattgttttggaagaaaggaatatttttatcttggggaccagctaagtctctgcagtagtgtgaaattccaaatggttgttttatcattggtttggtttaccaaaaaaaaggcagggaaaaaaaaaaaaaacaaccgtatgagcgcattggcttgtctgccgcaggcacagaagggtagaaagccacagcagggggcagtccagcagactctgactcaactttctaggcacctagcagagaaagataagatcaaaaggtgtttggtttttcttttaatttttattgtagtttttttgggtgggtgggggaagtaaactagactgaagcgatggatttttttttttcttttttttctttagtgtttttccctttgttcttgaacacttttgccctgcagcctcagttttgaattcttttagcaacttggattagaggggcccatatgtcagaagctcccagcacctcctacttgggagaaaagtgagccatctgctggtcaggaagtcctccagagaggcagcttttcccacaatggtggcaggaaactttggggaaagcaggaatggtgtccactgctgcggaggaactgccttcagagaaggtggggctggaaaagggttagaagcctcctagctgggattgtctttgtttcacctttctttaaattagaattacagaagcccctgcccagtgaacagataacaattggtcttatgctcctccctttcccccattttttcttttgctgttttgttttttgttttttgtttgtttgtttgtttttttgagacagagtcatgctctgtcacccgggctggagtgcagtggtgcgatctcagctcactgtaacctccgcctcccgggttcaagcaattatttgcctcagcctcccgagtagctgggattataggcacccgccaccatgtctggcttttagtagagacggggtttcaccatcttggccaggctggtcttggaactcctgacctcgtgagccaccacgcccagcctcttttgctgtttcattgctgacagtgttcaacaatatgccccatctttatatatcctaagaaacactaatcctaggttattgctagccaaaatatttttgtcctgagtagtgtcactgggccaaaagatagatcaggacgacagcctttagttttcctgaaatcaccaggtcaggcacaaggagaaaaggttcctggatactgactaacttgggtgggtctagccaggagaaagacagtaacatgtgttctgtactttctgggaagatccctgaagccatcacagaggctccccaacttctgagtcgcccatctgttgctgtgggagtgtgaacggatcgctgaaggagagggagctttgctctctctaggtgggcaagtttcctgggctctctgtgttgcctccctctggcttcttcctcccgtgccctctccccgtgtgccccagggggatcagggatcctcaccctcctgaggcccagtggggaagaatgaacatggcttcatccaggttaactgatgctgccatttgcccagcctcttccatcccagccctgtcagtgagcccaggtctggtgcaactgctgcaggatgcctgtagtagggaactctggaagtgtattgggctgaggtgggattttccctccccacagtgcactgagcaatggagggtggtgagggagccatgctgctgaattctggttggcatttccccattatgtaaaatggggtgttgggtagggcagactctgcttgggtttggttgtaagataaacctggaggagaagcacagttgtcccattgaattatttgagcaaaaactactgtaaataacttttttgtcttttgtcaaataaaatttttttttgtttttttaagcagaaacagggttcttgattgatccaccagggctcagggcccaggcttgaagacaaagcagtcactggcttcttattttgctttacatcttttactctccctctagtagccagctgtgagttctgtgcacgctgtacccccattccctttcaccagctccattctgtatcccattcaactcagggtaaagggggcatttgcatctcacattgggcca

SEQ ID NO: 434083 - DNA, 2876 bp, Homo sapiens
  misc_feature (170)..(170): n is a, c, g, or t
cgcggggggtgggcgcagctcgtcgcgctccgcacaaagtttgttttctccctccgggcgggtgggggagggcgcagagggcgcggggggaggagaggggatctgacgtcaggccgcgaggtgctttccacgccgcgagctgtcaggccgagtgtcaggccgggcaggtncgcggcgcgcgcccccggcgccccccgctccccgccgggacgccccgcgccgagccggaggccgcgtggacccgaaagccgctgggaaaagtttacccaaggtccagcctagcccctaggcaccatgtcggacagtgatctaggtgaggacgaaggcctcctctccctggcgggcaaaaggaagcgcagggggaacctgcccaaggagtcggtgaagatcctccgggactggctgtacttgcaccgctacaacgcctacccctcagagcaggagaagctgagcctttctggacagaccaacctgtcagtgctgcaaaggtcttcaacaggaagatgccagctggcaccactgcactgtgatgggggccctctcctctgctgactctgccgtttctccaggcctccgctcagtgatgagaccaagagatcggagacaagcatggtgctgctgcttctgctgcttctccagaaaatccctgggacacctttgttccagcctggtttcctgggctgggctcaggaaagctgccaaattcagtcctatgttgggtccaagctgcccctgtgctgtttctgtcaagccaggtgtggacattccaagttcatatgcgtgaacaaaagaaaagaggaacccagtggatgtaacagaaccgactccagttgaatgtttagatttttgctaaactgttttctttttcccttttttgctgtggtttgcattcacggcagtagttagcccaggtgtggggaacgagagtgcactgcatgatagcgttctggtgagctgggaaggacccaccactgccactgaggattgttttggaagaaaggaatatttttatcttggggaccagctaagtctctgcagtagtgtgaaattccaaatggttgttttatcattggtttggtttaccaaaaaaaaggcagggaaaaaaaaaaaaaacaaccgtatgagcgcattggcttgtctgccgcaggcacagaagggtagaaagccacagcagggggcagtccagcagactctgactcaactttctaggcacctagcagagaaagataagatcaaaaggtgtttggtttttcttttaatttttattgtagtttttttgggtgggtgggggaagtaaactagactgaagcgatggatttttttttttcttttttttctttagtgtttttccctttgttcttgaacacttttgccctgcagcctcagttttgaattcttttagcaacttggattagaggggcccatatgtcagaagctcccagcacctcctacttgggagaaaagtgagccatctgctggtcaggaagtcctccagagaggcagcttttcccacaatggtggcaggaaactttggggaaagcaggaatggtgtccactgctgcggaggaactgccttcagagaaggtggggctggaaaagggttagaagcctcctagctgggattgtctttgtttcacctttctttaaattagaattacagaagcccctgcccagtgaacagataacaattggtcttatgctcctccctttcccccattttttcttttgctgttttgttttttgttttttgtttgtttgtttgtttttttgagacagagtcatgctctgtcacccgggctggagtgcagtggtgcgatctcagctcactgtaacctccgcctcccgggttcaagcaattatttgcctcagcctcccgagtagctgggattataggcacccgccaccatgtctggcttttagtagagacggggtttcaccatcttggccaggctggtcttggaactcctgacctcgtgagccaccacgcccagcctcttttgctgtttcattgctgacagtgttcaacaatatgccccatctttatatatcctaagaaacactaatcctaggttattgctagccaaaatatttttgtcctgagtagtgtcactgggccaaaagatagatcaggacgacagcctttagttttcctgaaatcaccaggtcaggcacaaggagaaaaggttcctggatactgactaacttgggtgggtctagccaggagaaagacagtaacatgtgttctgtactttctgggaagatccctgaagccatcacagaggctccccaacttctgagtcgcccatctgttgctgtgggagtgtgaacggatcgctgaaggagagggagctttgctctctctaggtgggcaagtttcctgggctctctgtgttgcctccctctggcttcttcctcccgtgccctctccccgtgtgccccagggggatcagggatcctcaccctcctgaggcccagtggggaagaatgaacatggcttcatccaggttaactgatgctgccatttgcccagcctcttccatcccagccctgtcagtgagcccaggtctggtgcaactgctgcaggatgcctgtagtagggaactctggaagtgtattgggctgaggtgggattttccctccccacagtgcactgagcaatggagggtggtgagggagccatgctgctgaattctggttggcatttccccattatgtaaaatggggtgttgggtagggcagactctgcttgggtttggttgtaagataaacctggaggagaagcacagttgtcccattgaattatttgagcaaaaactactgtaaataacttttttgtcttttgtcaaataaaatttttttttgtttttttaagcaga

SEQ ID NO: 434084 - DNA, 2164 bp, Homo sapiens
gctgtggtttgcattcacggcagtagttagcccaggtgtggggaacgagagtgcactgcatgatagcgttctggtgagctgggaaggaacccagtggatgtaacagaaccgactccagttgaatgtttagatttttgctaaactgttttctttttcccttttttgctgtggtttgcattcacggcagtagttagcccaggtgtggggaacgagagtgcactgcatgatagcgttctggtgagctgggaaggacccaccactgccactgaggattgttttggaagaaaggaatatttttatcttggggaccagctaagtctctgcagtagtgtgaaattccaaatggttgttttatcattggtttggtttaccaaaaaaaaggcagggaaaaaaaaaaaaaacaaccgtatgagcgcattggcttgtctgccgcaggcacagaagggtagaaagccacagcagggggcagtccagcagactctgactcaactttctaggcacctagcagagaaagataagatcaaaaggtgtttggtttttcttttaatttttattgtagtttttttgggtgggtgggggaagtaaactagactgaagcgatggatttttttttttcttttttttctttagtgtttttccctttgttcttgaacacttttgccctgcagcctcagttttgaattcttttagcaacttggattagaggggcccatatgtcagaagctcccagcacctcctacttgggagaaaagtgagccatctgctggtcaggaagtcctccagagaggcagcttttcccacaatggtggcaggaaactttggggaaagcaggaatggtgtccactgctgcggaggaactgccttcagagaaggtggggctggaaaagggttagaagcctcctagctgggattgtctttgtttcacctttctttaaattagaattacagaagcccctgcccagtgaacagataacaattggtcttatgctcctccctttcccccattttttcttttgctgttttgttttttgttttttgtttgtttgtttgtttttttgagacagagtcatgctctgtcacccgggctggagtgcagtggtgcgatctcagctcactgtaacctccgcctcccgggttcaagcaattatttgcctcagcctcccgagtagctgggattataggcacccgccaccatgtctggcttttagtagagacggggtttcaccatcttggccaggctggtcttggaactcctgacctcgtgagccaccacgcccagcctcttttgctgtttcattgctgacagtgttcaacaatatgccccatctttatatatcctaagaaacactaatcctaggttattgctagccaaaatatttttgtcctgagtagtgtcactgggccaaaagatagatcaggacgacagcctttagttttcctgaaatcaccaggtcaggcacaaggagaaaaggttcctggatactgactaacttgggtgggtctagccaggagaaagacagtaacatgtgttctgtactttctgggaagatccctgaagccatcacagaggctccccaacttctgagtcgcccatctgttgctgtgggagtgtgaacggatcgctgaaggagagggagctttgctctctctaggtgggcaagtttcctgggctctctgtgttgcctccctctggcttcttcctcccgtgccctctccccgtgtgccccagggggatcagggatcctcaccctcctgaggcccagtggggaagaatgaacatggcttcatccaggttaactgatgctgccatttgcccagcctcttccatcccagccctgtcagtgagcccaggtctggtgcaactgctgcaggatgcctgtagtagggaactctggaagtgtattgggctgaggtgggattttccctccccacagtgcactgagcaatggagggtggtgagggagccatgctgctgaattctggttggcatttccccattatgtaaaatggggtgttgggtagggcagactctgcttgggtttggttgtaagataaacctggaggagaagcacagttgtcccattgaattatttgagcaaaaactactgtaaataacttttttgtcttttgtcaaataaaatttttttttgtttttttaagcaga

SEQ ID NO: 434085 - DNA, 3234 bp, Homo sapiens
  misc_feature (170)..(170): n is a, c, g, or t
cgcggggggtgggcgcagctcgtcgcgctccgcacaaagtttgttttctccctccgggcgggtgggggagggcgcagagggcgcggggggaggagaggggatctgacgtcaggccgcgaggtgctttccacgccgcgagctgtcaggccgagtgtcaggccgggcaggtncgcggcgcgcgcccccggcgccccccgctccccgccgggacgccccgcgccgagccggaggccgcgtggacccgaaagccgctgggaaaagtttacccaaggtccagcctagcccctaggcaccatgtcggacagtgatctaggtgaggacgaaggcctcctctccctggcgggcaaaaggaagcgcagggggaacctgcccaaggagtcggtgaagatcctccgggactggctgtacttgcaccgctacaacgcctacccctcagagcaggagaagctgagcctttctggacagaccaacctgtcagtgctgcaaatatgtaactggttcatcaatgcccggcggcggcttctcccagacatgcttcggaaggatggcaaagaccctaatcagtttaccatttcccgccgcgggggtaaggcctcagatgtggccctcccccgtggcagcagcccctcagtgctggctgtgtctgtcccagcccccaccaatgtgctctccctgtctgtgtgctccatgccgcttcactcaggccagggggaaaagccagcagcccctttcccacgtggggagctggagtctcccaagcccctggtgacccctggtagcacacttactctgctgaccagggctgaggctggaagccccacaggtggactcttcaacacgccaccacccacacccccagagcaggacaaagaggacttcagcagcttccagctgctggtggaggtggcgctacagagggctgctgagatggagcttcagaagcagcaggacccatcactcccattactgcacactcccatccctttagtctctgaaaatccccagtaggcatctgccaagaagggtgctgaaggctccagccagctgtcctgggtttccgttttggttccctttcatacagagggttttctatggatcactgccaaacattgggatcatctcctctgtccagaggtcttcaacaggaagatgccagctggcaccactgcactgtgatgggggccctctcctctgctgactctgccgtttctccaggcctccgctcagtgatgagaccaagagatcggagacaagcatggtgctgctgcttctgctgcttctccagaaaatccctgggacacctttgttccagcctggtttcctgggctgggctcaggaaagctgccaaattcagtcctatgttgggtccaagctgcccctgtgctgtttctgtcaagccaggtgtggacattccaagttcatatgcgtgaacaaaagaaaagaggaacccagtggatgtaacagaaccgactccagttgaatgtttagatttttgctaaactgttttctttttcccttttttgctgtggtttgcattcacggcagtagttagcccaggtgtggggaacgagagtgcactgcatgatagcgttctggtgagctgggaaggacccaccactgccactgaggattgttttggaagaaaggaatatttttatcttggggaccagctaagtctctgcagtagtgtgaaattccaaatggttgttttatcattggtttggtttaccaaaaaaaaggcagggaaaaaaaaaaaaaacaaccgtatgagcgcattggcttgtctgccgcaggcacagaagggtagaaagccacagcagggggcagtccagcagactctgactcaactttctaggcacctagcagagaaagataagatcaaaaggtgtttggtttttcttttaatttttattgtagtttttttgggtgggtgggggaagtaaactagactgaagcgatggatttttttttttcttttttttctttagtgtttttccctttgttcttgaacacttttgccctgcagcctcagttttgaattcttttagcaacttggattagaggggcccatatgtcagaagctcccagcacctcctacttgggagaaaagtgagccatctgctggtcaggaagtcctccagagaggcagcttttcccacaatggtggcaggaaactttggggaaagcaggaatggtgtccactgctgcggaggaactgccttcagagaaggtggggctggaaaagggttagaagcctcctagctgggattgtctttgtttcacctttctttaaattagaattacagaagcccctgcccagtgaacagataacaattggtcttatgctcctccctttcccccattttttcttttgctgttttgttttttgttttttgtttgtttgtttgtttttttgagacagagtcatgctctgtcacccgggctggagtgcagtggtgcgatctcagctcactgtaacctccgcctcccgggttcaagcaattatttgcctcagcctcccgagtagctgggattataggcacccgccaccatgtctggcttttagtagagacggggtttcaccatcttggccaggctggtcttggaactcctgacctcgtgagccaccacgcccagcctcttttgctgtttcattgctgacagtgttcaacaatatgccccatctttatatatcctaagaaacactaatcctaggttattgctagccaaaatatttttgtcctgagtagtgtcactgggccaaaagatagatcaggacgacagcctttagttttcctgaaatcaccaggtcaggcacaaggagaaaaggttcctggatactgactaacttgggtgggtctagccaggagaaagacagtaacatgtgttctgtactttctgggaagatccctgaagccatcacagaggctccccaacttctgagtcgcccatctgttgctgtgggagttgtattgggctgaggtgggattttccctccccacagtgcactgagcaatggagggtggtgagggagccatgctgctgaattctggttggcatttccccattatgtaaaatggggtgttgggtagggcagactctgcttgggtttggttgtaagataaacctggaggagaagcacagttgtcccattgaattatttgagcaaaaactactgtaaataacttttttgtcttttgtcaaataaaatttttttttgtttttttaagcaga

SEQ ID NO: 434086 - DNA, 2859 bp, Homo sapiens
cattcccgctctccttcccgaaccgccattttgaaaatcttgttgattctggggagccgagcgcgcggcgcgagcgtcacgccagacagcggcccgcgcgccttctcctcggcgtcggccgccgccgcctcccagaacctcctcgtgccctcgcgtgccaggcccgcggcggccgaaatccgcggttcacagcatgtccgcctcggcccctgctgcggagggggagggaacccccacccagcccgcgtccgagaaagaacccgaaatgcccggtcccagagaggagagcgaggaggaagaggacgaggacgacgaggaggaggaggaggaggaaaaagaaaagagtctcatcgtggaaggcaagagggaaaagaaaaaagtagagaggttgacaatgcaagtctcttccttacagagagagccatttacaattgcacaaggaaaggggcagaaactttgtgaaattgagaggatacatttttttctaagtaagaagaaaaccgatgaacttagaaatctacacaaactgctttacaacaggccaggcactgtgtcctcattaaagaagaatgtgggtcagttcagtggctttccatttgaaaaaggaagtgtccaatataaaaagaaggaagaaatgttgaaaaaatttagaaatgccatgttaaagagcatctgtgaggttcttgatttggagagatcaggtgtaaatagtgaactagtgaagaggatcttgaatttcttaatgcatccaaagccttctggcaaaccattgccgaaatctaaaaaaacttgtagcaaaggcagtaaaaaggaacggaacagttctggaatggcaaggaaggctaagcgaaccaaatgtcctgaaattctgtcagatgaatctagtagtgatgaagatgaaaagaaaaacaaggaagagtcttcagatgatgaagataaagaaagtgaagaggagccaccaaaaaagacagccaaaagagaaaaacctaaacagaaagctacttctaaaagtaaaaaatctgtgaaaagtgccaatgttaagaaagcagatagcagcaccaccaagaagaatcaaaacagttccaaaaaagaaagtgagtctgaggatagttcagatgatgaacctttaattaaaaagttgaagaaaccccctacagatgaagagttaaaggaaacaataaagaaattactggccagtgctaacttggaagaagtcacaatgaaacagatttgcaaaaaggtctatgaaaattatcctacttatgatttaactgaaagaaaagatttcataaaaacaactgtaaaagagctaatttcttgagatagaggacagagaagatgactcgttcccatagatttgaagatctgatttataccattataccagcaaagagaatgtatttccttttctaaatccttgttaagcaacgttagtagaacttactgctgacctttttatcttgagtgttatgtgaatttgagtttgctgttttaaattgcatttctatgccatttttagtttaaaatcttgcatggcattaattgttccttgcttttatagttgtattttgtacattttggatttctttatataaggtcatagattcttgagctgttgtggtttttagtgcacttaatattagcttgcttaaggcatacttttaatcaagtagaacaaaaactattatcaccaggatttatacatacagagattgtagtatttagtatatgaaatattttgaatacacatctctgtcagtgtgaaaattcagcggcagtgtgtccatcatattaaaaatatacaagctacagttgtccagatcactgaattggaacttttctcctgcatgtgtatatatgtcaaattgtcagcatgacaaaagtgacagatgttatttttgtatttttaaaaaacaattggttgtatataaagtttttttatttcttttgtgcagatcactttttaaactcacataggtaggtatctttatagttgtagactatggaatgtcagtgttcagccaaacagtatgatggaacagtgaaagtcaattcagtgatggcaacactgaaggaacagttaccctgctttgcctcgaaagtgtcatcaatttgtaattttagtattaactctgtaaaagtgtctgtaggtacgttttatattatataaggacagaccaaaaatcaacctatcaaagcttcaaaaactttgggaaagggtgggattaagtacaagcacatttggcttacagtaaatgaactgatttttattaactgcttttgcccatataaaatgctgatatttactggaaacctagccagcttcacgattatgactaaagtaccagattataatgccagaatataatgtgcaggcaatcgtggatgtctctgacaaagtgtgtctcaaaaataatatacttttacattaaagaaatttaatgtttctctggagttggggctcttggctttcagagtttggttaatcagtgttgattctagatgatcaacataatggaccactcctgaatgagacttaattttgtctttcaaatttactgtcttaaatcagtttattaaatctgaattttaaaacatgctgtttatgacacaatgacacatttgttgcaccaattaagtgttgaaaaatatctttgcatcatagaacagaaatatataaaaatatatgttgaatgttaacaggtattttcacaggtttgtttcttgatagttactcagacactagggaaaggtaaatacaagtgaacaaaataagcaactaaatgagacctaataattggccttcgattttaaatatttgttcttataaaccttgtcaataaaaataaatctaaatca

SEQ ID NO: 434087 - DNA, 761 bp, Homo sapiens
  misc_feature (41)..(41): n is a, c, g, or t
  misc_feature (54)..(54): n is a, c, g, or t
  misc_feature (67)..(67): n is a, c, g, or t
  misc_feature (194)..(194): n is a, c, g, or t
gttctgaggtccccgtacggagcaagtgtctctgatggaangtgtctctgatgnagaggtctctggnatgcaaagtgtctctggatgcaaagtgtctctggatgcaaagtgtctctggatgcaaaggcctctggatgcaaagtgtctctggatgcaaagtgtctctggatgcaaagtgtctctggatgcaaagngtctctggatgcaaagtgtcctctggatgcaaagtgtcctctggatgcaaagtgtcctctggatgcaaagtgtctgtaggtacgttttatattatataaggacagaccaaaaatcaacctatcaaagcttcaaaaactttgggaaagggtgggattaagtacaagcacatttggcttacagtaaatgaactgatttttattaactgcttttgcccatataaaatgctgatatttactggaaacctagccagcttcacgattatgactaaagtaccagattataatgccagaatataatgtgcaggcaatcgtggatgtctctgacaaagtgtgtctcaaaaataatatacttttacattaaagaaatttaatgtttctctggagttggggctcttggctttcagagtttggttaatcagtgttgattctagatgatcaacataatggaccactcctgaatgagacttaattttgtctttcaaatttactgtcttaaatcagtttattaaatctgaattttaaaacatgctgtttatgacacaatgacatccagaggggtaccgagct

SEQ ID NO: 434088 - DNA, 817 bp, Homo sapiens
cggacgcgtgggtcgacccacgcgtccgccacgcgtcgctctgacaaagtgtgtctcaaaaataatatacttttacattaaagaaatttaatgtttctctggagttggggctcttggctttcagagtttggttaatcagtgttgattctagatgatcaacataatggaccactcctgaatgagacttaattttgtctttcaaatttactgtcttaaatcagtttattaaatctgaattttaaaacatgctgtttatgacacaatgacacatttgttgcaccaattaagtgttgaaaaatatctttgcatcatagaacagaaatatataaaaatatatgttgaatgttaacaggtattttcacaggtttgtttcttgatagttactcagacactagggaaaggtaaatacaagtgaacaaaataagcaactaaatgagacctaataattggccttcgattttaaatatttgttcttataaaccttgtcaataaaaataaatctaaatcaaaaaagaacatatatgtaaaggaagcagagttgaagtaaaaagggtggccaagacccatgcagggtgcgaggaaacatggaaccaacccacgacgggcgagtccaggtggaggcaccatggctgggttacacccagaaaggtgggcacaccatcttgggcagcaatttacacgaagcgccttgagggtcgagccaacacgagcaacacggggacaaagcagttggcagtagggagcacgggaaagacacgtactcggggaaagggactagaggcaccacggcaagcgaggacaccgagcgcgacaaaag

SEQ ID NO: 434089 - DNA, 2918 bp, Homo sapiens
aattcccctttcactgttgccctactgttaaagttcttcccgcctcgggaatccctggacggcggcggcggagcgggagggaagccgcccctggggactgagcgctgcggtcccggctatgggaggaggcaactttcagggcaggtgtcccgcgggaagggtagcatcattcagggtggccgcccggtcctgcctgcgggagtaggaggaccgagacgtccggctttcttcccgcatgcaggtgttcacagcatgtccgcctcggcccctgctgcggagggggagggaacccccacccagcccgcgtccgagaaagaacccgaaatgcccggtcccagagaggagagcgaggaggaagaggacgaggacgacgaggaggaggaggaggaggaaaaagaaaagagtctcatcgtggaaggcaagagggaaaagaaaaaagtagagaggttgacaatgcaagtctcttccttacagagagagccatttacaattgcacaaggaaaggggcagaaactttgtgaaattgagaggatacatttttttctaagtaagaagaaaaccgatgaacttagaaatctacacaaactgctttacaacaggccaggcactgtgtcctcattaaagaagaatgtgggtcagttcagtggctttccatttgaaaaaggaagtgtccaatataaaaagaaggaagaaatgttgaaaaaatttagaaatgccatgttaaagagcatctgtgaggttcttgatttggagagatcaggtgtaaatagtgaactagtgaagaggatcttgaatttcttaatgcatccaaagccttctggcaaaccattgccgaaatctaaaaaaacttgtagcaaaggcagtaaaaaggaacggaacagttctggaatggcaaggaaggctaagcgaaccaaatgtcctgaaattctgtcagatgaatctagtagtgatgaagatgaaaagaaaaacaaggaagagtcttcagatgatgaagataaagaaagtgaagaggagccaccaaaaaagacagccaaaagagaaaaacctaaacagaaagctacttctaaaagtaaaaaatctgtgaaaagtgccaatgttaagaaagcagatagcagcaccaccaagaagaatcaaaacagttccaaaaaagaaagtgagtctgaggatagttcagatgatgaacctttaattaaaaagttgaagaaaccccctacagatgaagagttaaaggaaacaataaagaaattactggccagtgctaacttggaagaagtcacaatgaaacagatttgcaaaaaggtctatgaaaattatcctacttatgatttaactgaaagaaaagatttcataaaaacaactgtaaaagagctaatttcttgagatagaggacagagaagatgactcgttcccatagatttgaagatctgatttataccattataccagcaaagagaatgtatttccttttctaaatccttgttaagcaacgttagtagaacttactgctgacctttttatcttgagtgttatgtgaatttgagtttgctgttttaaattgcatttctatgccatttttagtttaaaatcttgcatggcattaattgttccttgcttttatagttgtattttgtacattttggatttctttatataaggtcatagattcttgagctgttgtggtttttagtgcacttaatattagcttgcttaaggcatacttttaatcaagtagaacaaaaactattatcaccaggatttatacatacagagattgtagtatttagtatatgaaatattttgaatacacatctctgtcagtgtgaaaattcagcggcagtgtgtccatcatattaaaaatatacaagctacagttgtccagatcactgaattggaacttttctcctgcatgtgtatatatgtcaaattgtcagcatgacaaaagtgacagatgttatttttgtatttttaaaaaacaattggttgtatataaagtttttttatttcttttgtgcagatcactttttaaactcacataggtaggtatctttatagttgtagactatggaatgtcagtgttcagccaaacagtatgatggaacagtgaaagtcaattcagtgatggcaacactgaaggaacagttaccctgctttgcctcgaaagtgtcatcaatttgtaattttagtattaactctgtaaaagtgtctgtaggtacgttttatattatataaggacagaccaaaaatcaacctatcaaagcttcaaaaactttgggaaagggtgggattaagtacaagcacatttggcttacagtaaatgaactgatttttattaactgcttttgcccatataaaatgctgatatttactggaaacctagccagcttcacgattatgactaaagtaccagattataatgccagaatataatgtgcaggcaatcgtggatgtctctgacaaagtgtgtctcaaaaataatatacttttacattaaagaaatttaatgtttctctggagttggggctcttggctttcagagtttggttaatcagtgttgattctagatgatcaacataatggaccactcctgaatgagacttaattttgtctttcaaatttactgtcttaaatcagtttattaaatctgaattttaaaacatgctgtttatgacacaatgacacatttgttgcaccaattaagtgttgaaaaatatctttgcatcatagaacagaaatatataaaaatatatgttgaatgttaacaggtattttcacaggtttgtttcttgatagttactcagacactagggaaaggtaaatacaagtgaacaaaataagcaactaaatgagacctaataattggccttcgattttaaatatttgttcttataaaccttgtcaataaaaataaatctaaatca

SEQ ID NO: 434090 - DNA, 2815 bp, Homo sapiens
aattcccctttcactgttgccctactgttaaagttcttcccgcctcgggaatccctggacggcggcggcggagcgggagggaagccgcccctggggactgagcgctgcggtcccggctatgggaggaggcaactttcagggttcacagcatgtccgcctcggcccctgctgcggagggggagggaacccccacccagcccgcgtccgagaaagaacccgaaatgcccggtcccagagaggagagcgaggaggaagaggacgaggacgacgaggaggaggaggaggaggaaaaagaaaagagtctcatcgtggaaggcaagagggaaaagaaaaaagtagagaggttgacaatgcaagtctcttccttacagagagagccatttacaattgcacaaggaaaggggcagaaactttgtgaaattgagaggatacatttttttctaagtaagaagaaaaccgatgaacttagaaatctacacaaactgctttacaacaggccaggcactgtgtcctcattaaagaagaatgtgggtcagttcagtggctttccatttgaaaaaggaagtgtccaatataaaaagaaggaagaaatgttgaaaaaatttagaaatgccatgttaaagagcatctgtgaggttcttgatttggagagatcaggtgtaaatagtgaactagtgaagaggatcttgaatttcttaatgcatccaaagccttctggcaaaccattgccgaaatctaaaaaaacttgtagcaaaggcagtaaaaaggaacggaacagttctggaatggcaaggaaggctaagcgaaccaaatgtcctgaaattctgtcagatgaatctagtagtgatgaagatgaaaagaaaaacaaggaagagtcttcagatgatgaagataaagaaagtgaagaggagccaccaaaaaagacagccaaaagagaaaaacctaaacagaaagctacttctaaaagtaaaaaatctgtgaaaagtgccaatgttaagaaagcagatagcagcaccaccaagaagaatcaaaacagttccaaaaaagaaagtgagtctgaggatagttcagatgatgaacctttaattaaaaagttgaagaaaccccctacagatgaagagttaaaggaaacaataaagaaattactggccagtgctaacttggaagaagtcacaatgaaacagatttgcaaaaaggtctatgaaaattatcctacttatgatttaactgaaagaaaagatttcataaaaacaactgtaaaagagctaatttcttgagatagaggacagagaagatgactcgttcccatagatttgaagatctgatttataccattataccagcaaagagaatgtatttccttttctaaatccttgttaagcaacgttagtagaacttactgctgacctttttatcttgagtgttatgtgaatttgagtttgctgttttaaattgcatttctatgccatttttagtttaaaatcttgcatggcattaattgttccttgcttttatagttgtattttgtacattttggatttctttatataaggtcatagattcttgagctgttgtggtttttagtgcacttaatattagcttgcttaaggcatacttttaatcaagtagaacaaaaactattatcaccaggatttatacatacagagattgtagtatttagtatatgaaatattttgaatacacatctctgtcagtgtgaaaattcagcggcagtgtgtccatcatattaaaaatatacaagctacagttgtccagatcactgaattggaacttttctcctgcatgtgtatatatgtcaaattgtcagcatgacaaaagtgacagatgttatttttgtatttttaaaaaacaattggttgtatataaagtttttttatttcttttgtgcagatcactttttaaactcacataggtaggtatctttatagttgtagactatggaatgtcagtgttcagccaaacagtatgatggaacagtgaaagtcaattcagtgatggcaacactgaaggaacagttaccctgctttgcctcgaaagtgtcatcaatttgtaattttagtattaactctgtaaaagtgtctgtaggtacgttttatattatataaggacagaccaaaaatcaacctatcaaagcttcaaaaactttgggaaagggtgggattaagtacaagcacatttggcttacagtaaatgaactgatttttattaactgcttttgcccatataaaatgctgatatttactggaaacctagccagcttcacgattatgactaaagtaccagattataatgccagaatataatgtgcaggcaatcgtggatgtctctgacaaagtgtgtctcaaaaataatatacttttacattaaagaaatttaatgtttctctggagttggggctcttggctttcagagtttggttaatcagtgttgattctagatgatcaacataatggaccactcctgaatgagacttaattttgtctttcaaatttactgtcttaaatcagtttattaaatctgaattttaaaacatgctgtttatgacacaatgacacatttgttgcaccaattaagtgttgaaaaatatctttgcatcatagaacagaaatatataaaaatatatgttgaatgttaacaggtattttcacaggtttgtttcttgatagttactcagacactagggaaaggtaaatacaagtgaacaaaataagcaactaaatgagacctaataattggccttcgattttaaatatttgttcttataaaccttgtcaataaaaataaatctaaatca

SEQ ID NO: 434091 - DNA, 2738 bp, Homo sapiens
gggccgcggagacgtgaagctctcgaggctcctcccgctgcggtcggcgctcgcctcgctctcgttcacagcatgtccgcctcggcccctgctgcggagggggagggaacccccacccagcccgcgtccgagaaagaacccgaaatgcccggtcccagagaggagagcgaggaggaagaggacgaggacgacgaggaggaggaggaggaggaaaaagaaaagagtctcatcgtggaaggcaagagggaaaagaaaaaagtagagaggttgacaatgcaagtctcttccttacagagagagccatttacaattgcacaaggaaaggggcagaaactttgtgaaattgagaggatacatttttttctaagtaagaagaaaaccgatgaacttagaaatctacacaaactgctttacaacaggccaggcactgtgtcctcattaaagaagaatgtgggtcagttcagtggctttccatttgaaaaaggaagtgtccaatataaaaagaaggaagaaatgttgaaaaaatttagaaatgccatgttaaagagcatctgtgaggttcttgatttggagagatcaggtgtaaatagtgaactagtgaagaggatcttgaatttcttaatgcatccaaagccttctggcaaaccattgccgaaatctaaaaaaacttgtagcaaaggcagtaaaaaggaacggaacagttctggaatggcaaggaaggctaagcgaaccaaatgtcctgaaattctgtcagatgaatctagtagtgatgaagatgaaaagaaaaacaaggaagagtcttcagatgatgaagataaagaaagtgaagaggagccaccaaaaaagacagccaaaagagaaaaacctaaacagaaagctacttctaaaagtaaaaaatctgtgaaaagtgccaatgttaagaaagcagatagcagcaccaccaagaagaatcaaaacagttccaaaaaagaaagtgagtctgaggatagttcagatgatgaacctttaattaaaaagttgaagaaaccccctacagatgaagagttaaaggaaacaataaagaaattactggccagtgctaacttggaagaagtcacaatgaaacagatttgcaaaaaggtctatgaaaattatcctacttatgatttaactgaaagaaaagatttcataaaaacaactgtaaaagagctaatttcttgagatagaggacagagaagatgactcgttcccatagatttgaagatctgatttataccattataccagcaaagagaatgtatttccttttctaaatccttgttaagcaacgttagtagaacttactgctgacctttttatcttgagtgttatgtgaatttgagtttgctgttttaaattgcatttctatgccatttttagtttaaaatcttgcatggcattaattgttccttgcttttatagttgtattttgtacattttggatttctttatataaggtcatagattcttgagctgttgtggtttttagtgcacttaatattagcttgcttaaggcatacttttaatcaagtagaacaaaaactattatcaccaggatttatacatacagagattgtagtatttagtatatgaaatattttgaatacacatctctgtcagtgtgaaaattcagcggcagtgtgtccatcatattaaaaatatacaagctacagttgtccagatcactgaattggaacttttctcctgcatgtgtatatatgtcaaattgtcagcatgacaaaagtgacagatgttatttttgtatttttaaaaaacaattggttgtatataaagtttttttatttcttttgtgcagatcactttttaaactcacataggtaggtatctttatagttgtagactatggaatgtcagtgttcagccaaacagtatgatggaacagtgaaagtcaattcagtgatggcaacactgaaggaacagttaccctgctttgcctcgaaagtgtcatcaatttgtaattttagtattaactctgtaaaagtgtctgtaggtacgttttatattatataaggacagaccaaaaatcaacctatcaaagcttcaaaaactttgggaaagggtgggattaagtacaagcacatttggcttacagtaaatgaactgatttttattaactgcttttgcccatataaaatgctgatatttactggaaacctagccagcttcacgattatgactaaagtaccagattataatgccagaatataatgtgcaggcaatcgtggatgtctctgacaaagtgtgtctcaaaaataatatacttttacattaaagaaatttaatgtttctctggagttggggctcttggctttcagagtttggttaatcagtgttgattctagatgatcaacataatggaccactcctgaatgagacttaattttgtctttcaaatttactgtcttaaatcagtttattaaatctgaattttaaaacatgctgtttatgacacaatgacacatttgttgcaccaattaagtgttgaaaaatatctttgcatcatagaacagaaatatataaaaatatatgttgaatgttaacaggtattttcacaggtttgtttcttgatagttactcagacactagggaaaggtaaatacaagtgaacaaaataagcaactaaatgagacctaataattggccttcgattttaaatatttgttcttataaaccttgtcaataaaaataaatctaaatca

SEQ ID NO: 434092 - DNA, 2757 bp, Homo sapiens
cattcccgctctccttcccgaaccgccattttgaaaatcttgttgattctggggagccgagcgcgcggcgcgagcgtcacgccagacagcggcccgcgcgccttctcctcggcgtcggccgccgccgcctcccagaacctcctcgtgccctcgcgtgccaggcccgcggcggccgaaatccgcggttcacagcatgtccgcctcggcccctgctgcggagggggagggaacccccacccagcccgcgtccgagaaagaacccgaaatgcccggtcccagagaggagagcgaggaggaagaggacgaggacgacgaggaggaggaggaggaggaaaaaggaaaggggcagaaactttgtgaaattgagaggatacatttttttctaagtaagaagaaaaccgatgaacttagaaatctacacaaactgctttacaacaggccaggcactgtgtcctcattaaagaagaatgtgggtcagttcagtggctttccatttgaaaaaggaagtgtccaatataaaaagaaggaagaaatgttgaaaaaatttagaaatgccatgttaaagagcatctgtgaggttcttgatttggagagatcaggtgtaaatagtgaactagtgaagaggatcttgaatttcttaatgcatccaaagccttctggcaaaccattgccgaaatctaaaaaaacttgtagcaaaggcagtaaaaaggaacggaacagttctggaatggcaaggaaggctaagcgaaccaaatgtcctgaaattctgtcagatgaatctagtagtgatgaagatgaaaagaaaaacaaggaagagtcttcagatgatgaagataaagaaagtgaagaggagccaccaaaaaagacagccaaaagagaaaaacctaaacagaaagctacttctaaaagtaaaaaatctgtgaaaagtgccaatgttaagaaagcagatagcagcaccaccaagaagaatcaaaacagttccaaaaaagaaagtgagtctgaggatagttcagatgatgaacctttaattaaaaagttgaagaaaccccctacagatgaagagttaaaggaaacaataaagaaattactggccagtgctaacttggaagaagtcacaatgaaacagatttgcaaaaaggtctatgaaaattatcctacttatgatttaactgaaagaaaagatttcataaaaacaactgtaaaagagctaatttcttgagatagaggacagagaagatgactcgttcccatagatttgaagatctgatttataccattataccagcaaagagaatgtatttccttttctaaatccttgttaagcaacgttagtagaacttactgctgacctttttatcttgagtgttatgtgaatttgagtttgctgttttaaattgcatttctatgccatttttagtttaaaatcttgcatggcattaattgttccttgcttttatagttgtattttgtacattttggatttctttatataaggtcatagattcttgagctgttgtggtttttagtgcacttaatattagcttgcttaaggcatacttttaatcaagtagaacaaaaactattatcaccaggatttatacatacagagattgtagtatttagtatatgaaatattttgaatacacatctctgtcagtgtgaaaattcagcggcagtgtgtccatcatattaaaaatatacaagctacagttgtccagatcactgaattggaacttttctcctgcatgtgtatatatgtcaaattgtcagcatgacaaaagtgacagatgttatttttgtatttttaaaaaacaattggttgtatataaagtttttttatttcttttgtgcagatcactttttaaactcacataggtaggtatctttatagttgtagactatggaatgtcagtgttcagccaaacagtatgatggaacagtgaaagtcaattcagtgatggcaacactgaaggaacagttaccctgctttgcctcgaaagtgtcatcaatttgtaattttagtattaactctgtaaaagtgtctgtaggtacgttttatattatataaggacagaccaaaaatcaacctatcaaagcttcaaaaactttgggaaagggtgggattaagtacaagcacatttggcttacagtaaatgaactgatttttattaactgcttttgcccatataaaatgctgatatttactggaaacctagccagcttcacgattatgactaaagtaccagattataatgccagaatataatgtgcaggcaatcgtggatgtctctgacaaagtgtgtctcaaaaataatatacttttacattaaagaaatttaatgtttctctggagttggggctcttggctttcagagtttggttaatcagtgttgattctagatgatcaacataatggaccactcctgaatgagacttaattttgtctttcaaatttactgtcttaaatcagtttattaaatctgaattttaaaacatgctgtttatgacacaatgacacatttgttgcaccaattaagtgttgaaaaatatctttgcatcatagaacagaaatatataaaaatatatgttgaatgttaacaggtattttcacaggtttgtttcttgatagttactcagacactagggaaaggtaaatacaagtgaacaaaataagcaactaaatgagacctaataattggccttcgattttaaatatttgttcttataaaccttgtcaataaaaataaatctaaatca

SEQ ID NO: 434093 - DNA, 2655 bp, Homo sapiens
cattcccgctctccttcccgaaccgccattttgaaaatcttgttgattctggggagccgagcgcgcggcgcgagcgtcacgccagacagcggcccgcgcgccttctcctcggcgtcggccgccgccgcctcccagaacctcctcgtgccctcgcgtgccaggcccgcggcggccgaaatccgcggttcacagcatgtccgcctcggcccctgctgcggagggggagggaacccccacccagcccgcgtccgagaaagaacccgaaatgcccggtcccagagaggagagcgaggaggaagaggacgaggacgacgaggaggaggaggaggaggaaaaagaaaagagtctcatcgtggaaggcaagagggaaaagaaaaaagtagagaggttgacaatgcaagtctcttccttacataaaaagaaggaagaaatgttgaaaaaatttagaaatgccatgttaaagagcatctgtgaggttcttgatttggagagatcaggtgtaaatagtgaactagtgaagaggatcttgaatttcttaatgcatccaaagccttctggcaaaccattgccgaaatctaaaaaaacttgtagcaaaggcagtaaaaaggaacggaacagttctggaatggcaaggaaggctaagcgaaccaaatgtcctgaaattctgtcagatgaatctagtagtgatgaagatgaaaagaaaaacaaggaagagtcttcagatgatgaagataaagaaagtgaagaggagccaccaaaaaagacagccaaaagagaaaaacctaaacagaaagctacttctaaaagtaaaaaatctgtgaaaagtgccaatgttaagaaagcagatagcagcaccaccaagaagaatcaaaacagttccaaaaaagaaagtgagtctgaggatagttcagatgatgaacctttaattaaaaagttgaagaaaccccctacagatgaagagttaaaggaaacaataaagaaattactggccagtgctaacttggaagaagtcacaatgaaacagatttgcaaaaaggtctatgaaaattatcctacttatgatttaactgaaagaaaagatttcataaaaacaactgtaaaagagctaatttcttgagatagaggacagagaagatgactcgttcccatagatttgaagatctgatttataccattataccagcaaagagaatgtatttccttttctaaatccttgttaagcaacgttagtagaacttactgctgacctttttatcttgagtgttatgtgaatttgagtttgctgttttaaattgcatttctatgccatttttagtttaaaatcttgcatggcattaattgttccttgcttttatagttgtattttgtacattttggatttctttatataaggtcatagattcttgagctgttgtggtttttagtgcacttaatattagcttgcttaaggcatacttttaatcaagtagaacaaaaactattatcaccaggatttatacatacagagattgtagtatttagtatatgaaatattttgaatacacatctctgtcagtgtgaaaattcagcggcagtgtgtccatcatattaaaaatatacaagctacagttgtccagatcactgaattggaacttttctcctgcatgtgtatatatgtcaaattgtcagcatgacaaaagtgacagatgttatttttgtatttttaaaaaacaattggttgtatataaagtttttttatttcttttgtgcagatcactttttaaactcacataggtaggtatctttatagttgtagactatggaatgtcagtgttcagccaaacagtatgatggaacagtgaaagtcaattcagtgatggcaacactgaaggaacagttaccctgctttgcctcgaaagtgtcatcaatttgtaattttagtattaactctgtaaaagtgtctgtaggtacgttttatattatataaggacagaccaaaaatcaacctatcaaagcttcaaaaactttgggaaagggtgggattaagtacaagcacatttggcttacagtaaatgaactgatttttattaactgcttttgcccatataaaatgctgatatttactggaaacctagccagcttcacgattatgactaaagtaccagattataatgccagaatataatgtgcaggcaatcgtggatgtctctgacaaagtgtgtctcaaaaataatatacttttacattaaagaaatttaatgtttctctggagttggggctcttggctttcagagtttggttaatcagtgttgattctagatgatcaacataatggaccactcctgaatgagacttaattttgtctttcaaatttactgtcttaaatcagtttattaaatctgaattttaaaacatgctgtttatgacacaatgacacatttgttgcaccaattaagtgttgaaaaatatctttgcatcatagaacagaaatatataaaaatatatgttgaatgttaacaggtattttcacaggtttgtttcttgatagttactcagacactagggaaaggtaaatacaagtgaacaaaataagcaactaaatgagacctaataattggccttcgattttaaatatttgttcttataaaccttgtcaataaaaataaatctaaatca

SEQ ID NO: 434094 - DNA, 2226 bp, Homo sapiens
  misc_feature (14)..(14): n is a, c, g, or t
tatttggtcccccncgagtattggatatcgtcgaccacggccctcggttcttgatttggagagatcaggtgtaaatagtgaactagtgaagaggatcttgaatttcttaatgcatccaaagccttctggcaaaccattgccgaaatctaaaaaaacttgtagcaaaggcagtaaaaaggaacggaacagttctggaatggcaaggaaggctaagcgaaccaaatgtcctgaaattctgtcagatgaatctagtagtgatgaagatgaaaagaaaaacaaggaagagtcttcagatgatgaagataaagaaagtgaagaggagccaccaaaaaagacagccaaaagagaaaaacctaaacagaaagctacttctaaaagtaaaaaatctgtgaaaagtgccaatgttaagaaagcagatagcagcaccaccaagaagaatcaaaacagttccaaaaaagaaagtgagtctgaggatagttcagatgatgaacctttaattaaaaagttgaagaaaccccctacagatgaagagttaaaggaaacaataaagaaattactggccagtgctaacttggaagaagtcacaatgaaacagatttgcaaaaaggtctatgaaaattatcctacttatgatttaactgaaagaaaagatttcataaaaacaactgtaaaagagctaatttcttgagatagaggacagagaagatgactcgttcccatagatttgaagatctgatttataccattataccagcaaagagaatgtatttccttttctaaatccttgttaagcaacgttagtagaacttactgctgacctttttatcttgagtgttatgtgaatttgagtttgctgttttaaattgcatttctatgccatttttagtttaaaatcttgcatggcattaattgttccttgcttttatagttgtattttgtacattttggatttctttatataaggtcatagattcttgagctgttgtggtttttagtgcacttaatattagcttgcttaaggcatacttttaatcaagtagaacaaaaactattatcaccaggatttatacatacagagattgtagtatttagtatatgaaatattttgaatacacatctctgtcagtgtgaaaattcagcggcagtgtgtccatcatattaaaaatatacaagctacagttgtccagatcactgaattggaacttttctcctgcatgtgtatatatgtcaaattgtcagcatgacaaaagtgacagatgttatttttgtatttttaaaaaacaattggttgtatataaagtttttttatttcttttgtgcagatcactttttaaactcacataggtaggtatctttatagttgtagactatggaatgtcagtgttcagccaaacagtatgatggaacagtgaaagtcaattcagtgatggcaacactgaaggaacagttaccctgctttgcctcgaaagtgtcatcaatttgtaattttagtattaactctgtaaaagtgtctgtaggtacgttttatattatataaggacagaccaaaaatcaacctatcaaagcttcaaaaactttgggaaagggtgggattaagtacaagcacatttggcttacagtaaatgaactgatttttattaactgcttttgcccatataaaatgctgatatttactggaaacctagccagcttcacgattatgactaaagtaccagattataatgccagaatataatgtgcaggcaatcgtggatgtctctgacaaagtgtgtctcaaaaataatatacttttacattaaagaaatttaatgtttctctggagttggggctcttggctttcagagtttggttaatcagtgttgattctagatgatcaacataatggaccactcctgaatgagacttaattttgtctttcaaatttactgtcttaaatcagtttattaaatctgaattttaaaacatgctgtttatgacacaatgacacatttgttgcaccaattaagtgttgaaaaatatctttgcatcatagaacagaaatatataaaaatatatgttgaatgttaacaggtattttcacaggtttgtttcttgatagttactcagacactagggaaaggtaaatacaagtgaacaaaataagcaactaaatgagacctaataattggccttcgattttaaatatttgttcttataaaccttgtcaataaaaataaatctaaatca

SEQ ID NO: 434095 - DNA, 1961 bp, Homo sapiens
  misc_feature (49)..(50): n is a, c, g, or t
agtggtgatgttggggtggggagggggcagggtgaaatgttgaggaagnngtttcagccaccaaaaaagacagccaaaagagaaaaacctaaacagaaagctacttctaaaagtaaaaaatctgtgaaaagtgccaatgttaagaaagcagatagcagcaccaccaagaagaatcaaaacagttccaaaaaagaaagtgagtctgaggatagttcagatgatgaacctttaattaaaaagttgaagaaaccccctacagatgaagagttaaaggaaacaataaagaaattactggccagtgctaacttggaagaagtcacaatgaaacagatttgcaaaaaggtctatgaaaattatcctacttatgatttaactgaaagaaaagatttcataaaaacaactgtaaaagagctaatttcttgagatagaggacagagaagatgactcgttcccatagatttgaagatctgatttataccattataccagcaaagagaatgtatttccttttctaaatccttgttaagcaacgttagtagaacttactgctgacctttttatcttgagtgttatgtgaatttgagtttgctgttttaaattgcatttctatgccatttttagtttaaaatcttgcatggcattaattgttccttgcttttatagttgtattttgtacattttggatttctttatataaggtcatagattcttgagctgttgtggtttttagtgcacttaatattagcttgcttaaggcatacttttaatcaagtagaacaaaaactattatcaccaggatttatacatacagagattgtagtatttagtatatgaaatattttgaatacacatctctgtcagtgtgaaaattcagcggcagtgtgtccatcatattaaaaatatacaagctacagttgtccagatcactgaattggaacttttctcctgcatgtgtatatatgtcaaattgtcagcatgacaaaagtgacagatgttatttttgtatttttaaaaaacaattggttgtatataaagtttttttatttcttttgtgcagatcactttttaaactcacataggtaggtatctttatagttgtagactatggaatgtcagtgttcagccaaacagtatgatggaacagtgaaagtcaattcagtgatggcaacactgaaggaacagttaccctgctttgcctcgaaagtgtcatcaatttgtaattttagtattaactctgtaaaagtgtctgtaggtacgttttatattatataaggacagaccaaaaatcaacctatcaaagcttcaaaaactttgggaaagggtgggattaagtacaagcacatttggcttacagtaaatgaactgatttttattaactgcttttgcccatataaaatgctgatatttactggaaacctagccagcttcacgattatgactaaagtaccagattataatgccagaatataatgtgcaggcaatcgtggatgtctctgacaaagtgtgtctcaaaaataatatacttttacattaaagaaatttaatgtttctctggagttggggctcttggctttcagagtttggttaatcagtgttgattctagatgatcaacataatggaccactcctgaatgagacttaattttgtctttcaaatttactgtcttaaatcagtttattaaatctgaattttaaaacatgctgtttatgacacaatgacacatttgttgcaccaattaagtgttgaaaaatatctttgcatcatagaacagaaatatataaaaatatatgttgaatgttaacaggtattttcacaggtttgtttcttgatagttactcagacactagggaaaggtaaatacaagtgaacaaaataagcaactaaatgagacctaataattggccttcgattttaaatatttgttcttataaaccttgtcaataaaaataaatctaaatca

SEQ ID NO: 434096 - DNA, 3016 bp, Homo sapiens
cattcccgctctccttcccgaaccgccattttgaaaatcttgttgattctggggagccgagcgcgcggcgcgagcgtcacgccagacagcggcccgcgcgccttctcctcggcgtcggccgccgccgcctcccagaacctcctcgtgccctcgcgtgccaggcccgcggcggccgaaatccgcggttcacagcatgtccgcctcggcccctgctgcggagggggagggaacccccacccagcccgcgtccgagaaagaacccgaaatgcccggtcccagagaggagagcgaggaggaagaggacgaggacgacgaggaggaggaggaggaggaaaaagaaaagagtctcatcgtggaaggcaagagggaaaagaaaaaagtagagaggttgacaatgcaagtctcttccttacagagagagccatttacaattgcacaaggaaaggggcagaaactttgtgaaattgagaggatacatttttttctaagtaagaagaaaaccgatgaacttagaaatctacacaaactgctttacaacaggccaggcactgtgtcctcattaaagaagaatgtgggtcagttcagtggctttccatttgaaaaaggaagtgtccaatataaaaagaaggaagaaatgttgaaaaaatttagaaatgccatgttaaagagcatctgtgaggttcttgatttggagagatcaggtgtaaatagtgaactagtgaagaggatcttgaatttcttaatgcatccaaagccttctggcaaaccattgccgaaatctaaaaaaacttgtagcaaaggcagtaaaaaggaacggaacagttctggaatggcaaggaaggctaagcgaaccaaatgtcctgaaattctgtcagatgaatctagtagtgatgaagatgaaaagaaaaacaaggaagagtcttcagatgatgaagataaagaaagtgaagaggagccaccaaaaaagacagccaaaagagaaaaacctaaacagaaagctacttctaaaagtaaaaaatctgtgaaaagtgccaatgttaagaaagcagatagcagcaccaccaagaagaatcaaaacagttccaaaaaagaaagtgagtctgaggatagttcagatgatgaacctttaattaaaaagttgaagaaaccccctacagatgaagagttaaaggaaacaataaagaaattactggccagtgctaacttggaagaagtcacaatgaaacagatttgcaaaaaggtctatgaaaattatcctacttatgatttaactgaaagaaaagatttcataaaaacaactgtaaaagagctaatttcttgagatagaggacagagaagatgactcgttcccatagatttgaagatctgatttataccattataccagcaaagagaatgtatttccttttctaaatccttgttaagcaacgttagtagaacttactgctgacctttttatcttgagtgttatgtgaatttgagtttgctgttttaaattgcatttctatgccatttttagtttaaaatcttgcatggcattaattgttccttgcttttatagttgtattttgtacattttggatttctttatataaggtcatagattcttgagctgttgtggtttttagtgcacttaatattagcttgcttaaggcatacttttaatcaagtagaacaaaaactattatcaccaggatttatacatacagagattgtagtatttagtatatgaaatattttgaatacacatctctgtcagtgtgaaaattcagcggcagtgtgtccatcatattaaaaatatacaagctacagttgtccagatcactgaattggaacttttctcctgcatgtgtatatatgtcaaattgtcagcatgacaaaagtgacagatgttatttttgtatttttaaaaaacaattggttgtatataaagtttttttatttcttttgtgcagatcactttttaaactcacataggtaggtatctttatagttgtagactatggaatgtcagtgttcagccaaacagtatgatggaacagtgaaagtcaattcagtgatggcaacactgaaggaacagttaccctgctttgcctcgaaagtgtcatcaatttgtaattttagtattaactctgtaaaagtgtctgtaggtacgttttatattatataaggacagaccaaaaatcaacctatcaaagcttcaaaaactttgggaaagggtgggattaagtacaagcacatttggcttacagtaaatgaactgatttttattaactgcttttgcccatataaaatgctgatatttactggaaacctagccagcttcacgattatgactaaagtaccagattataatgccagaatataatgtgcaggcaatcgtggatgtctctgacaaagtgtgtctcaaaaataatatacttttacattaaagaaatttaatgtttctctggagttggggctcttggctttcagagtttggttaatcagtgttgattctagatgatcaacataatggaccactcctgaatgagacttaattttgtctttcaaatttactgtcttaaatcagtttattaaatctgaattttaaaacatgctgtttatgacacaatgacacatttgttgcaccaattaagtgttgaaaaatatctttgcatcatagaacagaaatatataaaaatatatgttgaatgttaacaggtattttcacaggtttgtttcttgatagttactcagacactagggaaaggtaaatacaagtgaacaaaataagcaactaaatgagacctaataattggccttcgattttaaatatttgttcttataaaccttgtcaataaaaataaatctaaatcacaaaaaaaaaccacacagatcagcaccgccccacaccccttggtccggcaccgcctggggccctcccgaaaaagtcctcctgagaacccacgcctggagcgcggcgggccccacaaggatccggcgcaactgcgcccaacaggggctcccagcgccc

SEQ ID NO: 434097 - DNA, 2926 bp, Homo sapiens
  misc_feature (2867)..(2867): n is a, c, g, or t
  misc_feature (2880)..(2880): n is a, c, g, or t
  misc_feature (2896)..(2896): n is a, c, g, or t
cattcccgctctccttcccgaaccgccattttgaaaatcttgttgattctggggagccgagcgcgcggcgcgagcgtcacgccagacagcggcccgcgcgccttctcctcggcgtcggccgccgccgcctcccagaacctcctcgtgccctcgcgtgccaggcccgcggcggccgaaatccgcggttcacagcatgtccgcctcggcccctgctgcggagggggagggaacccccacccagcccgcgtccgagaaagaacccgaaatgcccggtcccagagaggagagcgaggaggaagaggacgaggacgacgaggaggaggaggaggaggaaaaagaaaagagtctcatcgtggaaggcaagagggaaaagaaaaaagtagagaggttgacaatgcaagtctcttccttacagagagagccatttacaattgcacaaggaaaggggcagaaactttgtgaaattgagaggatacatttttttctaagtaagaagaaaaccgatgaacttagaaatctacacaaactgctttacaacaggccaggcactgtgtcctcattaaagaagaatgtgggtcagttcagtggctttccatttgaaaaaggaagtgtccaatataaaaagaaggaagaaatgttgaaaaaatttagaaatgccatgttaaagagcatctgtgaggttcttgatttggagagatcaggtgtaaatagtgaactagtgaagaggatcttgaatttcttaatgcatccaaagccttctggcaaaccattgccgaaatctaaaaaaacttgtagcaaaggcagtaaaaaggaacggaacagttctggaatggcaaggaaggctaagcgaaccaaatgtcctgaaattctgtcagatgaatctagtagtgatgaagatgaaaagaaaaacaaggaagagtcttcagatgatgaagataaagaaagtgaagaggagccaccaaaaaagacagccaaaagagaaaaacctaaacagaaagctacttctaaaagtaaaaaatctgtgaaaagtgccaatgttaagaaagcagatagcagcaccaccaagaagaatcaaaacagttccaaaaaagaaagtgagtctgaggatagttcagatgatgaacctttaattaaaaagttgaagaaaccccctacagatgaagagttaaaggaaacaataaagaaattactggccagtgctaacttggaagaagtcacaatgaaacagatttgcaaaaaggtctatgaaaattatcctacttatgatttaactgaaagaaaagatttcataaaaacaactgtaaaagagctaatttcttgagatagaggacagagaagatgactcgttcccatagatttgaagatctgatttataccattataccagcaaagagaatgtatttccttttctaaatccttgttaagcaacgttagtagaacttactgctgacctttttatcttgagtgttatgtgaatttgagtttgctgttttaaattgcatttctatgccatttttagtttaaaatcttgcatggcattaattgttccttgcttttatagttgtattttgtacattttggatttctttatataaggtcatagattcttgagctgttgtggtttttagtgcacttaatattagcttgcttaaggcatacttttaatcaagtagaacaaaaactattatcaccaggatttatacatacagagattgtagtatttagtatatgaaatattttgaatacacatctctgtcagtgtgaaaattcagcggcagtgtgtccatcatattaaaaatatacaagctacagttgtccagatcactgaattggaacttttctcctgcatgtgtatatatgtcaaattgtcagcatgacaaaagtgacagatgttatttttgtatttttaaaaaacaattggttgtatataaagtttttttatttcttttgtgcagatcactttttaaactcacataggtaggtatctttatagttgtagactatggaatgtcagtgttcagccaaacagtatgatggaacagtgaaagtcaattcagtgatggcaacactgaaggaacagttaccctgctttgcctcgaaagtgtcatcaatttgtaattttagtattaactctgtaaaagtgtctgtaggtacgttttatattatataaggacagaccaaaaatcaacctatcaaagcttcaaaaactttgggaaagggtgggattaagtacaagcacatttggcttacagtaaatgaactgatttttattaactgcttttgcccatataaaatgctgatatttactggaaacctagccagcttcacgattatgactaaagtaccagattataatgccagaatataatgtgcaggcaatcgtggatgtctctgacaaagtgtgtctcaaaaataatatacttttacattaaagaaatttaatgtttctctggagttggggctcttggctttcagagtttggttaatcagtgttgattctagatgatcaacataatggaccactcctgaatgagacttaattttgtctttcaaatttactgtcttaaatcagtttattaaatctgaattttaaaacatgctgtttatgacacaatgacacatttgttgcaccaattaagtgttgaaaaatatctttgcatcatagaacagaaatatataaaaatatatgttgaatgttaacaggtattttcacaggtttgtttcttgatagttactcagacactagggaaaggtaaatacaagtgaacaaaataagcaactaaatgagacctaataattggccttcgattttaaatatttgttcttataaaccttgtcaataaaaataaatctaaatcaaaaaaaanttggttccacctntgcaggtttttataantggtgccaattaaaggtttttgtttttaaa

SEQ ID NO: 434098 - DNA, 2903 bp, Homo sapiens
cattcccgctctccttcccgaaccgccattttgaaaatcttgttgattctggggagccgagcgcgcggcgcgagcgtcacgccagacagcggcccgcgcgccttctcctcggcgtcggccgccgccgcctcccagaacctcctcgtgccctcgcgtgccaggcccgcggcggccgaaatccgcggttcacagcatgtccgcctcggcccctgctgcggagggggagggaacccccacccagcccgcgtccgagaaagaacccgaaatgcccggtcccagagaggagagcgaggaggaagaggacgaggacgacgaggaggaggaggaggaggaaaaagaaaagagtctcatcgtggaaggcaagagggaaaagaaaaaagtagagaggttgacaatgcaagtctcttccttacagagagagccatttacaattgcacaaggaaaggggcagaaactttgtgaaattgagaggatacatttttttctaagtaagaagaaaaccgatgaacttagaaatctacacaaactgctttacaacaggccaggcactgtgtcctcattaaagaagaatgtgggtcagttcagtggctttccatttgaaaaaggaagtgtccaatataaaaagaaggaagaaatgttgaaaaaatttagaaatgccatgttaaagagcatctgtgaggttcttgatttggagagatcaggtgtaaatagtgaactagtgaagaggatcttgaatttcttaatgcatccaaagccttctggcaaaccattgccgaaatctaaaaaaacttgtagcaaaggcagtaaaaaggaacggaacagttctggaatggcaaggaaggctaagcgaaccaaatgtcctgaaattctgtcagatgaatctagtagtgatgaagatgaaaagaaaaacaaggaagagtcttcagatgatgaagataaagaaagtgaagaggagccaccaaaaaagacagccaaaagagaaaaacctaaacagaaagctacttctaaaagtaaaaaatctgtgaaaagtgccaatgttaagaaagcagatagcagcaccaccaagaagaatcaaaacagttccaaaaaagaaagtgagtctgaggatagttcagatgatgaacctttaattaaaaagttgaagaaaccccctacagatgaagagttaaaggaaacaataaagaaattactggccagtgctaacttggaagaagtcacaatgaaacagatttgcaaaaaggtctatgaaaattatcctacttatgatttaactgaaagaaaagatttcataaaaacaactgtaaaagagctaatttcttgagatagaggacagagaagatgactcgttcccatagatttgaagatctgatttataccattataccagcaaagagaatgtatttccttttctaaatccttgttaagcaacgttagtagaacttactgctgacctttttatcttgagtgttatgtgaatttgagtttgctgttttaaattgcatttctatgccatttttagtttaaaatcttgcatggcattaattgttccttgcttttatagttgtattttgtacattttggatttctttatataaggtcatagattcttgagctgttgtggtttttagtgcacttaatattagcttgcttaaggcatacttttaatcaagtagaacaaaaactattatcaccaggatttatacatacagagattgtagtatttagtatatgaaatattttgaatacacatctctgtcagtgtgaaaattcagcggcagtgtgtccatcatattaaaaatatacaagctacagttgtccagatcactgaattggaacttttctcctgcatgtgtatatatgtcaaattgtcagcatgacaaaagtgacagatgttatttttgtatttttaaaaaacaattggttgtatataaagtttttttatttcttttgtgcagatcactttttaaactcacataggtaggtatctttatagttgtagactatggaatgtcagtgttcagccaaacagtatgatggaacagtgaaagtcaattcagtgatggcaacactgaaggaacagttaccctgctttgcctcgaaagtgtcatcaatttgtaattttagtattaactctgtaaaagtgtctgtaggtacgttttatattatataaggacagaccaaaaatcaacctatcaaagcttcaaaaactttgggaaagggtgggattaagtacaagcacatttggcttacagtaaatgaactgatttttattaactgcttttgcccatataaaatgctgatatttactggaaacctagccagcttcacgattatgactaaagtaccagattataatgccagaatataatgtgcaggcaatcgtggatgtctctgacaaagtgtgtctcaaaaataatatacttttacattaaagaaatttaatgtttctctggagttggggctcttggctttcagagtttggttaatcagtgttgattctagatgatcaacataatggaccactcctgaatgagacttaattttgtctttcaaatttactgtcttaaatcagtttattaaatctgaattttaaaacatgctgtttatgacacaatgacacatttgttgcaccaattaagtgttgaaaaatatctttgcatcatagaacagaaatatataaaaatatatgttgaatgttaacaggtattttcacaggtttgtttcttgatagttactcagacactagggaaaggtaaatacaagtgaacaaaataagcaactaaatgagacctaataattggccttcgattttaaatatttgttcttataaaccttgtcaataaaaataaatctaaatcatcccaaaaacatctcccaacaaacgaacaaaaccaaaataacca

SEQ ID NO: 434099 - DNA, 2815 bp, Homo sapiens
cattcccgctctccttcccgaaccgccattttgaaaatcttgttgattctggggagccgagcgcgcggcgcgagcgtcacgccagacagcggcccgcgcgccttctcctcggcgtcggccgccgccgcctcccagaacctcctcgtgccctcgcgtgccaggcccgcggcggccgaaatccgcggttcacagcatgtccgcctcggcccctgctgcggagggggagggaacccccacccagcccgcgtccgagaaagaacccgaaatgcccggtcccagagaggagagcgaggaggaagaggacgaggacgacgaggaggaggaggaggaggaaaaagaaaagagtctcatcgtggaaggcaagagggaaaagaaaaaagtagagaggttgacaatgcaagtctcttccttacagagagagccatttacaattgcacaaggaaaggggcagaaactttgtgaaattgagaggatacatttttttctaagtaagaagaaaaccgatgaacttagaaatctacacaaactgctttacaacaggccaggcactgtgtcctcattaaagaagaatgtgggtcagttcagtggctttccatttgaaaaaggaagtgtccaatataaaaagaaggaagaaatgttgaaaaaatttagaaatgccatgttaaagagcatctgtgaggttcttgatttggagagatcaggtgtaaatagtgaactagtgaagaggatcttgaatttcttaatgcatccaaagccttctggcaaaccattgccgaaatctaaaaaaacttgtagcaaaggcagtaaaaaggaacggaacagttctggaatggcaaggaaggctaagcgaaccaaatgtcctgaaattctgtcagatgaatctagtagtgatgaagatgaaaagaaaaacaaggaagagtcttcagatgatgaagataaagaaagtgaagaggagccaccaaaaaagacagccaaaagagaaaaacctaaacagaaagctacttctaaaagtaaaaaatctgtgaaaagtgccaatgttaagaaagcagatagcagcaccaccaagaagaatcaaaacagttccaaaaaagaaagtgagtctgaggatagttcagatgatgaacctttaattaaaaagttgaagaaaccccctacagatgaagagttaaaggaaacaataaagaaattactggccagtgctaacttggaagaagtcacaatgaaacagatttgcaaaaaggtctatgaaaattatcctacttatgatttaactgaaagaaaagatttcataaaaacaactgtaaaagagctaatttcttgagatagaggacagagaagatgactcgttcccatagatttgaagatctgatttataccattataccagcaaagagaatgtatttccttttctaaatccttgttaagcaacgttagtagaacttactgctgacctttttatcttgagtgttatgtgaatttgagtttgctgttttaaattgcatttctatgccatttttagtttaaaatcttgcatggcattaattgttccttgcttttatagttgtattttgtacattttggatttctttatataaggtcatagattcttgagctgttgtggtttttagtgcacttaatattagcttgcttaaggcatacttttaatcaagtagaacaaaaactattatcaccaggatttatacatacagagattgtagtatttagtatatgaaatattttgaatacacatctctgtcagtgtgaaaattcagcggcagtgtgtccatcatattaaaaatatacaagctacagttgtccagatcactgaattggaacttttctcctgcatgtgtatatatgtcaaattgtcagcatgacaaaagtgacagatgttatttttgtatttttaaaaaacaattggttgttcacataggtaggtatctttatagttgtagactatggaatgtcagtgttcagccaaacagtatgatggaacagtgaaagtcaattcagtgatggcaacactgaaggaacagttaccctgctttgcctcgaaagtgtcatcaatttgtaattttagtattaactctgtaaaagtgtctgtaggtacgttttatattatataaggacagaccaaaaatcaacctatcaaagcttcaaaaactttgggaaagggtgggattaagtacaagcacatttggcttacagtaaatgaactgatttttattaactgcttttgcccatataaaatgctgatatttactggaaacctagccagcttcacgattatgactaaagtaccagattataatgccagaatataatgtgcaggcaatcgtggatgtctctgacaaagtgtgtctcaaaaataatatacttttacattaaagaaatttaatgtttctctggagttggggctcttggctttcagagtttggttaatcagtgttgattctagatgatcaacataatggaccactcctgaatgagacttaattttgtctttcaaatttactgtcttaaatcagtttattaaatctgaattttaaaacatgctgtttatgacacaatgacacatttgttgcaccaattaagtgttgaaaaatatctttgcatcatagaacagaaatatataaaaatatatgttgaatgttaacaggtattttcacaggtttgtttcttgatagttactcagacactagggaaaggtaaatacaagtgaacaaaataagcaactaaatgagacctaataattggccttcgattttaaatatttgttcttataaaccttgtcaataaaaataaatctaaatca

SEQ ID NO: 434100 - DNA, 2653 bp, Homo sapiens
  misc_feature (2619)..(2619): n is a, c, g, or t
  misc_feature (2627)..(2627): n is a, c, g, or t
  misc_feature (2629)..(2631): n is a, c, g, or t
  misc_feature (2635)..(2635): n is a, c, g, or t
cattcccgctctccttcccgaaccgccattttgaaaatcttgttgattctggggagccgagcgcgcggcgcgagcgtcacgccagacagcggcccgcgcgccttctcctcggcgtcggccgccgccgcctcccagaacctcctcgtgccctcgcgtgccaggcccgcggcggccgaaatccgcggttcacagcatgtccgcctcggcccctgctgcggagggggagggaacccccacccagcccgcgtccgagaaagaacccgaaatgcccggtcccagagaggagagcgaggaggaagaggacgaggacgacgaggaggaggaggaggaggaaaaagaaaagagtctcatcgtggaaggcaagagggaaaagaaaaaagtagagaggttgacaatgcaagtctcttccttacagagagagccatttacaattgcacaaggaaaggggcagaaactttgtgaaattgagaggatacatttttttctaagtaagaagaaaaccgatgaacttagaaatctacacaaactgctttacaacaggccaggcactgtgtcctcattaaagaagaatgtgggtcagttcagtggctttccatttgaaaaaggaagtgtccaatataaaaagaaggaagaaatgttgaaaaaatttagaaatgccatgttaaagagcatctgtgaggttcttgatttggagagatcaggtgtaaatagtgaactagtgaagaggatcttgaatttcttaatgcatccaaagccttctggcaaaccattgccgaaatctaaaaaaacttgtagcaaaggcagtaaaaaggaacggaacagttctggaatggcaaggaaggctaagcgaaccaaatgtcctgaaattctgtcagatgaatctagtagtgatgaagatgaaaagaaaaacaaggaagagtcttcagatgatgaagataaagaaagtgaagaggagccaccaaaaaagacagccaaaagagaaaaacctaaacagaaagctacttctaaaagtaaaaaatctgtgaaaagtgccaatgttaagaaagcagatagcagcaccaccaagaagaatcaaaacagttccaaaaaagaaagtgagtctgaggatagttcagatgatgaacctttaattaaaaagttgaagaaaccccctacagatgaagagttaaaggaaacaataaagaaattactggccagtgctaacttggaagaagtcacaatgaaacagatttgcaaaaaggtctatgaaaattatcctacttatgatttaactgaaagaaaagatttcataaaaacaactgtaaaagagctaatttcttgagatagaggacagagaagatgactcgttcccatagatttgaagatctgatttataccattataccagcaaagagaatgtatttccttttctaaatccttgttaagcaacgttagtagaacttactgctgacctttttatcttgagtgttatgtgaatttgagtttgctgttttaaattgcatttctatgccatttttagtttaaaatcttgcatggcattaattgttccttgcttttatagttgtattttgtacattttggatttctttatataaggtcatagattcttgagctgttgtggtttttagtgcacttaatattagcttgcttaaggcatacttttaatcaagtagaacaaaaactattatcaccaggatttatacatacagagattgtagtatttagtatatgaaatattttgaatacacatctctgtcagtgtgaaaattcagcggcagtgtgtccatcatattaaaaatatacaagctacagttgtccagatcactgaattggaacttttctcctgcatgtgtatatatgtcaaattgtcagcatgacaaaagtgacagatgttatttttgtatttttaaaaaacaattggttgtatataaagtttttttatttcttttgtgcagatcactttttaaactcacataggtaggtatctttatagttgtagactatggaatgtcagtgttcagccaaacagtatgatggaacagtgaaagtcaattcagtgatggcaacactgaaggaacagttaccctgctttgcctcgaaagtgtcatcaatttgtaattttagtattaactctgtaaaagtgtctgtaggtacgttttatattatataaggacagaccaaaaatcaacctatcaaagcttcaaaaactttgggaaagggtgggattaagtacaagcacatttggcttacagtaaatgaactgatttttattaactgcttttgcccatataaaatgctgatatttactggaaacctagccagcttcacgattatgactaaagtaccagattataatgccagaatataatgtgcaggcaatcgtggatgtctctgacaaagtgtgtctcaaaaataatatacttttacattaaagaaatttaatgtttctctggagttggggctcttggctttcagagtttggttaatcagtgttgattctagatgatcaacataatggaccactcctgaatgagacttaattttgtctttcaaatttactgtcttaaatcagtttattaaatctgaattttaaaacatgctgtttatgacacaatgatntgcatccngnnnggancctctgaacgctatcacg

SEQ ID NO: 434101 - DNA, 2862 bp, Homo sapiens
cattcccgctctccttcccgaaccgccattttgaaaatcttgttgattctggggagccgagcgcgcggcgcgagcgtcacgccagacagcggcccgcgcgccttctcctcggcgtcggccgccgccgcctcccagaacctcctcgtgccctcgcgtgccaggcccgcggcggccgaaatccgcggttcacagcatgtccgcctcggcccctgctgcggagggggagggaacccccacccagcccgcgtccgagaaagaacccgaaatgcccggtcccagagaggagagcgaggaggaagaggacgaggacgacgaggaggaggaggaggaggaaaaagaaaagagtctcatcgtggaaggcaagagggaaaagaaaaaagtagagaggttgacaatgcaagtctcttccttacagagagagccatttacaattgcacaaggaaaggggcagaaactttgtgaaattgagaggatacatttttttctaagtaagaagaaaaccgatgaacttagaaatctacacaaactgctttacaacaggccaggcactgtgtcctcattaaagaagaatgtgggtcagttcagtggctttccatttgaaaaaggaagtgtccaatataaaaagaaggaagaaatgttgaaaaaatttagaaatgccatgttaaagagcatctgtgaggttcttgatttggagagatcaggtgtaaatagtgaactagtgaagaggatcttgaatttcttaatgcatccaaagccttctggcaaaccattgccgaaatctaaaaaaacttgtagcaaaggcagtaaaaaggaacggaacagttctggaatggcaaggaaggctaagcgaaccaaatgtcctgaaattctgtcagatgaatctagtagtgatgaagatgaaaagaaaaacaaggaagagtcttcagatgatgaagataaagaaagtgaagaggagccaccaaaaaagacagccaaaagagaaaaacctaaacagaaagctacttctaaaagtaaaaaatctgtgaaaagtgccaatgttaagaaagcagatagcagcaccaccaagaagaatcaaaacagttccaaaaaagaaagtgagtctgaggatagttcagatgatgaacctttaattaaaaagttgaagaaaccccctacagatgaagagttaaaggaaacaataaagaaattactggccagtgctaacttggaagaagtcacaatgaaacagatttgcaaaaaggtctatgaaaattatcctacttatgatttaactgaaagaaaagatttcataaaaacaactgtaaaagagctaatttcttgagatagaggacagagaagatgactcgttcccatagatttgaagatctgatttataccattataccagcaaagagaatgtatttccttttctaaatccttgttaagcaacgttagtagaacttactgctgacctttttatcttgagtgttatgtgaatttgagtttgctgttttaaattgcatttctatgccatttttagtttaaaatcttgcatggcattaattgttccttgcttttatagttgtattttgtacattttggatttctttatataaggtcatagattcttgagctgttgtggtttttagtgcacttaatattagcttgcttaaggcatacttttaatcaagtagaacaaaaactattatcaccaggatttatacatacagagattgtagtatttagtatatgaaatattttgaatacacatctctgtcagtgtgaaaattcagcggcagtgtgtccatcatattaaaaatatacaagctacagttgtccagatcactgaattggaacttttctcctgcatgtgtatatatgtcaaattgtcagcatgacaaaagtgacagatgttatttttgtatttttaaaaaacaattggttgtatataaagtttttttatttcttttgtgcagatcactttttaaactcacataggtaggtatctttatagttgtagactatggaatgtcagtgttcagccaaacagtatgatggaacagtgaaagtcaattcagtgatggcaacactgaaggaacagttaccctgctttgcctcgaaagtgtcatcaatttgtaattttagtattaactctgtaaaagtgtctgtaggtacgttttatattatataaggacagaccaaaaatcaacctatcaaagcttcaaaaactttgggaaagggtgggattaagtacaagcacatttggcttacagtaaatgaactgatttttattaactgcttttgcccatataaaatgctgatatttactggaaacctagccagcttcacgattatgactaaagtaccagattataatgccagaatataatgtgcaggcaatcgtggatgtctctgacaaagtgtgtctcaaaaataatatacttttacattaaagaaatttaatgtttctctggagttggggctcttggctttcagagtttggttaatcagtgttgattctagatgatcaacataatggaccactcctgaatgagacttaattttgtctttcaaatttactgtcttaaatcagtttattaaatctgaattttaaaacatgctgtttatgacacaatgaagcaagcttctgttgaaaagacccagtgctcccccaccccggtgtccagcggctgacgaaggggccgcgaactgtgttggtggtaccaggtattttcacaggtttgtttcttgatagttactcagacactagggaaaggtaaatacaagtgaacaaaataagcaactaaatgagacctaataattggccttcgattttaaatatttgttcttataaaccttgtcaataaaaataaatctaaatca

SEQ ID NO: 434102 - DNA, 2638 bp, Homo sapiens
cattcccgctctccttcccgaaccgccattttgaaaatcttgttgattctggggagccgagcgcgcggcgcgagcgtcacgccagacagcggcccgcgcgccttctcctcggcgtcggccgccgccgcctcccagaacctcctcgtgccctcgcgtgccaggcccgcggcggccgaaatccgcggttcacagcatgtccgcctcggcccctgctgcggagggggagggaacccccacccagcccgcgtccgagaaagaacccgaaatgcccggtcccagagaggagagcgaggaggaagaggacgaggacgacgaggaggaggaggaggaggaaaaagaaaagagtctcatcgtggaaggcaagagggaaaagaaaaaagtagagaggttgacaatgcaagtctcttccttacagagagagccatttacaattgcacaaggaaaggggcagaaactttgtgaaattgagaggatacatttttttctaagtaagaagaaaaccgatgaacttagaaatctacacaaactgctttacaacaggccaggcactgtgtcctcattaaagaagaatgtgggtcagttcagtggctttccatttgaaaaaggaagtgtccaatataaaaagaaggaagaaatgttgaaaaaatttagaaatgccatgttaaagagcatctgtgaggttcttgatttggagagatcaggtgtaaatagtgaactagtgaagaggatcttgaatttcttaatgcatccaaagccttctggcaaaccattgccgaaatctaaaaaaacttgtagcaaaggcagtaaaaaggaacggaacagttctggaatggcaaggaaggctaagcgaaccaaatgtcctgaaattctgtcagatgaatctagtagtgatgaagatgaaaagaaaaacaaggaagagtcttcagatgatgaagataaagaaagtgaagaggagccaccaaaaaagacagccaaaagagaaaaacctaaacagaaagctacttctaaaagtaaaaaatctgtgaaaagtgccaatgttaagaaagcagatagcagcaccaccaagaagaatcaaaacagttccaaaaaagaaagtgagtctgaggatagttcagatgatgaacctttaattaaaaagttgaagaaaccccctacagatgaagagttaaaggaaacaataaagaaattactggccagtgctaacttggaagaagtcacaatgaaacagatttgcaaaaaggtctatgaaaattatcctacttatgatttaactgaaagaaaagatttcataaaaacaactgtaaaagagctaatttcttgagatagaggacagagaagatgactcgttcccatagatttgaagatctgatttataccattataccagcaaagagaatgtatttccttttctaaatccttgttaagcaacgttagtagaacttactgctgacctttttatcttgagtgttatgtgaatttgagtttgctgttttaaattgcatttctatgccatttttagtttaaaatcttgcatggcattaattgttccttgcttttatagttgtattttgtacattttggatttctttatataaggtcatagattcttgagctgttgtggtttttagtgcacttaatattagcttgcttaaggcatacttttaatcaagtagaacaaaaactattatcaccaggatttatacatacagagattgtagtatttagtatatgaaatattttgaatacacatctctgtcagtgtgaaaattcagcggcagtgtgtccatcatattaaaaatatacaagctacagttgtccagatcactgaattggaacttttctcctgcatgtgtatatatgtcaaattgtcagcatgacaaaagtgacagatgttatttttgtatttttaaaaaacaattggttgtatataaagtttttttatttcttttgtgcagatcactttttaaactcacataggtaggtatctttatagttgtagactatggaatgtcagtgttcagccaaacagtatgatggaacagtgaaagtcaattcagtgatggcaacactgaaggaacagttaccctgctttgcctcgaaagtgtcatcaatttgtaattttagtattaactctgtaaaagtgtctgtaggtacgttttatattatataaggacagaccaaaaatcaacctatcaaagcttcaaaaactttgggaaagggtgggattaagtacaagcacatttggcttacagtaaatgaactgatttttattaactgcttttgcccatataaaatgctgatatttactggaaacctagccagcttcacgattatgactaaagtaccagattataatgccagaatataatgtgcaggcaatcgtggatgtctctgacaaagtgtgtctcaaaaataatatacttttacattaaagaaatttaatgtttctctggagttggggctcttggctttcagagtttggttaatcagtgttgattctagatgatcaacataatggaccactcctgaatgagacttaattttgtctttcaaatttactgtcttaaatcagtttattaaatctgaattttaaaacatgctgtttatgacacaatgacatccagaggggtaccgagct

SEQ ID NO: 434103 - DNA, 2634 bp, Homo sapiens
cattcccgctctccttcccgaaccgccattttgaaaatcttgttgattctggggagccgagcgcgcggcgcgagcgtcacgccagacagcggcccgcgcgccttctcctcggcgtcggccgccgccgcctcccagaacctcctcgtgccctcgcgtgccaggcccgcggcggccgaaatccgcggttcacagcatgtccgcctcggcccctgctgcggagggggagggaacccccacccagcccgcgtccgagaaagaacccgaaatgcccggtcccagagaggagagcgaggaggaagaggacgaggacgacgaggaggaggaggaggaggaaaaagaaaagagtctcatcgtggaaggcaagagggaaaagaaaaaagtagagaggttgacaatgcaagtctcttccttacagagagagccatttacaattgcacaaggaaaggggcagaaactttgtgaaattgagaggatacatttttttctaagtaagaagaaaaccgatgaacttagaaatctacacaaactgctttacaacaggccaggcactgtgtcctcattaaagaagaatgtgggtcagttcagtggctttccatttgaaaaaggaagtgtccaatataaaaagaaggaagaaatgttgaaaaaatttagaaatgccatgttaaagagcatctgtgaggttcttgatttggagagatcaggtgtaaatagtgaactagtgaagaggatcttgaatttcttaatgcatccaaagccttctggcaaaccattgccgaaatctaaaaaaacttgtagcaaaggcagtaaaaaggaacggaacagttctggaatggcaaggaaggctaagcgaaccaaatgtcctgaaattctgtcagatgaatctagtagtgatgaagatgaaaagaaaaacaaggaagagtcttcagatgatgaagataaagaaagtgaagaggagccaccaaaaaagacagccaaaagagaaaaacctaaacagaaagctacttctaaaagtaaaaaatctgtgaaaagtgccaatgttaagaaagcagatagcagcaccaccaagaagaatcaaaacagttccaaaaaagaaagtgagtctgaggatagttcagatgatgaacctttaattaaaaagttgaagaaaccccctacagatgaagagttaaaggaaacaataaagaaattactggccagtgctaacttggaagaagtcacaatgaaacagatttgcaaaaaggtctatgaaaattatcctacttatgatttaactgaaagaaaagatttcataaaaacaactgtaaaagagctaatttcttgagatagaggacagagaagatgactcgttcccatagatttgaagatctgatttataccattataccagcaaagagaatgtatttccttttctaaatccttgttaagcaacgttagtagaacttactgctgacctttttatcttgagtgttatgtgaatttgagtttgctgttttaaattgcatttctatgccatttttagtttaaaatcttgcatggcattaattgttccttgcttttatagttgtattttgtacattttggatttctttatataaggtcatagattcttgagctgttgtggtttttagtgcacttaatattagcttgcttaaggcatacttttaatcaagtagaacaaaaactattatcaccaggatttatacatacagagattgtagtatttagtatatgaaatattttgaatacacatctctgtcagtgtgaaaattcagcggcagtgtgtccatcatattaaaaatatacaagctacagttgtccagatcactgaattggaacttttctcctgcatgtgtatatatgtcaaattgtcagcatgacaaaagtgacagatgttatttttgtatttttaaaaaacaattggttgtatataaagtttttttatttcttttgtgcagatcactttttaaactcacataggtaggtatctttatagttgtagactatggaatgtcagtgttcagccaaacagtatgatggaacagtgaaagtcaattcagtgatggcaacactgaaggaacagttaccctgctttgcctcgaaagtgtcatcaatttgtaattttagtattaactctgtaaaagtgtctgtaggtacgttttatattatataaggacagaccaaaaatcaacctatcaaagcttcaaaaactttgggaaagggtgggattaagtacaagcacatttggcttacagtaaatgaactgatttttattaactgcttttgcccatataaaatgctgatatttactggaaacctagccagcttcacgattatgactaaagtaccagattataatgccagaatataatgtgcaggcaatcgtggatgtctctgacaaagtgtgtctcaaaaataatatacttttacattaaagaaatttaatgtttctctggagttggggctcttggctttcagagtttggttaatcagtgttgattctagatgatcaacataatggaccactcctgaatgagacttaattttgtctttcaaatttactgtcttaaatcagtttatctatatgaattatcccacaggctctctaaacacgatacctagcatcccgagcgttgt

SEQ ID NO: 434104 - DNA, 2602 bp, Homo sapiens
cattcccgctctccttcccgaaccgccattttgaaaatcttgttgattctggggagccgagcgcgcggcgcgagcgtcacgccagacagcggcccgcgcgccttctcctcggcgtcggccgccgccgcctcccagaacctcctcgtgccctcgcgtgccaggcccgcggcggccgaaatccgcggttcacagcatgtccgcctcggcccctgctgcggagggggagggaacccccacccagcccgcgtccgagaaagaacccgaaatgcccggtcccagagaggagagcgaggaggaagaggacgaggacgacgaggaggaggaggaggaggaaaaagaaaagagtctcatcgtggaaggcaagagggaaaagaaaaaagtagagaggttgacaatgcaagtctcttccttacagagagagccatttacaattgcacaaggaaaggggcagaaactttgtgaaattgagaggatacatttttttctaagtaagaagaaaaccgatgaacttagaaatctacacaaactgctttacaacaggccaggcactgtgtcctcattaaagaagaatgtgggtcagttcagtggctttccatttgaaaaaggaagtgtccaatataaaaagaaggaagaaatgttgaaaaaatttagaaatgccatgttaaagagcatctgtgaggttcttgatttggagagatcaggtgtaaatagtgaactagtgaagaggatcttgaatttcttaatgcatccaaagccttctggcaaaccattgccgaaatctaaaaaaacttgtagcaaaggcagtaaaaaggaacggaacagttctggaatggcaaggaaggctaagcgaaccaaatgtcctgaaattctgtcagatgaatctagtagtgatgaagatgaaaagaaaaacaaggaagagtcttcagatgatgaagataaagaaagtgaagaggagccaccaaaaaagacagccaaaagagaaaaacctaaacagaaagctacttctaaaagtaaaaaatctgtgaaaagtgccaatgttaagaaagcagatagcagcaccaccaagaagaatcaaaacagttccaaaaaagaaagtgagtctgaggatagttcagatgatgaacctttaattaaaaagttgaagaaaccccctacagatgaagagttaaaggaaacaataaagaaattactggccagtgctaacttggaagaagtcacaatgaaacagatttgcaaaaaggtctatgaaaattatcctacttatgatttaactgaaagaaaagatttcataaaaacaactgtaaaagagctaatttcttgagatagaggacagagaagatgactcgttcccatagatttgaagatctgatttataccattataccagcaaagagaatgtatttccttttctaaatccttgttaagcaacgttagtagaacttactgctgacctttttatcttgagtgttatgtgaatttgagtttgctgttttaaattgcatttctatgccatttttagtttaaaatcttgcatggcattaattgttccttgcttttatagttgtattttgtacattttggatttctttatataaggtcatagattcttgagctgttgtggtttttagtgcacttaatattagcttgcttaaggcatacttttaatcaagtagaacaaaaactattatcaccaggatttatacatacagagattgtagtatttagtatatgaaatattttgaatacacatctctgtcagtgtgaaaattcagcggcagtgtgtccatcatattaaaaatatacaagctacagttgtccagatcactgaattggaacttttctcctgcatgtgtatatatgtcaaattgtcagcatgacaaaagtgacagatgttatttttgtatttttaaaaaacaattggttgtatataaagtttttttatttcttttgtgcagatcactttttaaactcacataggtaggtatctttatagttgtagactatggaatgtcagtgttcagccaaacagtatgatggaacagtgaaagtcaattcagtgatggcaacactgaaggaacagttaccctgctttgcctcgaaagtgtcatcaatttgtaattttagtattaactctgtaaaagtgtctgtaggtacgttttatattatataaggacagaccaaaaatcaacctatcaaagcttcaaaaactttgggaaagggtgggattaagtacaagcacatttggcttacagtaaatgaactgatttttattaactgcttttgcccatataaaatgctgatatttactggaaacctagccagcttcacgattatgactaaagtaccagattataatgccagaatataatgtgcaggcaatcgtggatgtctctgacaaagtgtgtctcaaaaataatatacttttacattaaagaaatttaatgtttctctggagttggggctcttggctttcagagtttggttaatcagtgttgattctagatgatcaacataatggaccactcctgaatgagactcatggttatctgtaaaatctcagcgggtctggtatcactcttgactatatgtgaacttccaggac

SEQ ID NO: 434105 - DNA, 2807 bp, Homo sapiens
cattcccgctctccttcccgaaccgccattttgaaaatcttgttgattctggggagccgagcgcgcggcgcgagcgtcacgccagacagcggcccgcgcgccttctcctcggcgtcggccgccgccgcctcccagaacctcctcgtgccctcgcgtgccaggcccgcggcggccgaaatccgcggttcacagcatgtccgcctcggcccctgctgcggagggggagggaacccccacccagcccgcgtccgagaaagaacccgaaatgcccggtcccagagaggagagcgaggaggaagaggacgaggacgacgaggaggaggaggaggaggaaaaagaaaagagtctcatcgtggaaggcaagagggaaaagaaaaaagtagagaggttgacaatgcaagtctcttccttacagagagagccatttacaattgcacaaggaaaggggcagaaactttgtgaaattgagaggatacatttttttctaagtaagaagaaaaccgatgaacttagaaatctacacaaactgctttacaacaggccaggcactgtgtcctcattaaagaagaatgtgggtcagttcagtggctttccatttgaaaaaggaagtgtccaatataaaaagaaggaagaaatgttgaaaaaatttagaaatgccatgttaaagagcatctgtgaggttcttgatttggagagatcaggtgtaaatagtgaactagtgaagaggatcttgaatttcttaatgcatccaaagccttctggcaaaccattgccgaaatctaaaaaaacttgtagcaaaggcagtaaaaaggaacggaacagttctggaatggcaaggaaggctaagcgaaccaaatgtcctgaaattctgtcagatgaatctagtagtgatgaagatgaaaagaaaaacaaggaagagtcttcagatgatgaagataaagaaagtgaagaggagccaccaaaaaagacagccaaaagagaaaaacctaaacagaaagctacttctaaaagtaaaaaatctgtgaaaagtgccaatgttaagaaagcagatagcagcaccaccaagaagaatcaaaacagttccaaaaaagaaagtgagtctgaggatagttcagatgatgaacctttaattaaaaagttgaagaaaccccctacagatgaagagttaaaggaaacaataaagaaattactggccagtgctaacttggaagaagtcacaatgaaacagatttgcaaaaaggtctatgaaaattatcctacttatgatttaactgaaagaaaagatttcataaaaacaactgtaaaagagctaatttcttgagatagaggacagagaagatgactcgttcccatagatttgaagatctgatttataccattataccagcaaagagaatgtatttccttttctaaatccttgttaagcaacgttagtagaacttactgctgacctttttatcttgagtgttatgtgaatttgagtttgctgttttaaattgcatttctatgccatttttagtttaaaatcttgcatggcattaattgttccttgcttttatagttgtattttgtacattttggatttctttatataaggtcatagattcttgagctgttgtggtttttagtgcacttaatattagcttgcttaaggcatacttttaatcaagtagaacaaaaactattatcaccaggatttatacatacagagattgtagtatttagtatatgaaatattttgaatacacatctctgtcagtgtgaaaattcagcggcagtgtgtccatcatattaaaaatatacaagctacagttgtccagatcactgaattggaacttttctcctgcatgtgtatatatgtcaaattgtcagcatgacaaaagtgacagatgttatttttgtatttttaaaaaacaattggttgtatataaagtttttttatttcttttgtgcagatcactttttaaactcacataggtaggtatctttatagttgtagactatggaatgtcagtgttcagccaaacagtatgatggaacagtgaaagtcaattcagtgatggcaacactgaaggaacagttaccctgctttgcctcgaaagtgtcatcaatttgtaattttagtattaactctgtaaaagtgtctgtaggtacgttttatattatataaggacagaccaaaaatcaacctatcaaagcttcaaaaactttgggaaagggtgggattaagtacaagcacatttggcttacagtaaatgaactgatttttattaactgcttttgcccatataaaatgctgatatttactggaaacctagccagcttcacgattatgactaaagtaccagattataatgccagaatataatgtgcaggcaatcgtggatgtctctgacaaagtgtgtctcactcttggctttcagagtttggttaatcagtgttgattctagatgatcaacataatggaccactcctgaatgagacttaattttgtctttcaaatttactgtcttaaatcagtttattaaatctgaattttaaaacatgctgtttatgacacaatgacacatttgttgcaccaattaagtgttgaaaaatatctttgcatcatagaacagaaatatataaaaatatatgttgaatgttaacaggtattttcacaggtttgtttcttgatagttactcagacactagggaaaggtaaatacaagtgaacaaaataagcaactaaatgagacctaataattggccttcgattttaaatatttgttcttataaaccttgtcaataaaaataaatctaaatca

SEQ ID NO: 434106 - DNA, 2609 bp, Homo sapiens
  misc_feature (2575)..(2575): n is a, c, g, or t
  misc_feature (2583)..(2583): n is a, c, g, or t
  misc_feature (2585)..(2587): n is a, c, g, or t
  misc_feature (2591)..(2591): n is a, c, g, or t
cattcccgctctccttcccgaaccgccattttgaaaatcttgttgattctggggagccgagcgcgcggcgcgagcgtcacgccagacagcggcccgcgcgccttctcctcggcgtcggccgccgccgcctcccagaacctcctcgtgccctcgcgtgccaggcccgcggcggccgaaatccgcggttcacagcatgtccgcctcggcccctgctgcggagggggagggaacccccacccagcccgcgtccgagaaagaacccgaaatgcccggtcccagagaggagagcgaggaggaagaggacgaggacgacgaggaggaggaggaggaggaaaaagaaaagagtctcatcgtggaaggcaagagggaaaagaaaaaagtagagaggttgacaatgcaagtctcttccttacagagagagccatttacaattgcacaaggaaaggggcagaaactttgtgaaattgagaggatacatttttttctaagtaagaagaaaaccgatgaacttagaaatctacacaaactgctttacaacaggccaggcactgtgtcctcattaaagaagaatgtgggtcagttcagtggctttccatttgaaaaaggaagtgtccaatataaaaagaaggaagaaatgttgaaaaaatttagaaatgccatgttaaagagcatctgtgaggttcttgatttggagagatcaggtgtaaatagtgaactagtgaagaggatcttgaatttcttaatgcatccaaagccttctggcaaaccattgccgaaatctaaaaaaacttgtagcaaaggcagtaaaaaggaacggaacagttctggaatggcaaggaaggctaagcgaaccaaatgtcctgaaattctgtcagatgaatctagtagtgatgaagatgaaaagaaaaacaaggaagagtcttcagatgatgaagataaagaaagtgaagaggagccaccaaaaaagacagccaaaagagaaaaacctaaacagaaagctacttctaaaagtaaaaaatctgtgaaaagtgccaatgttaagaaagcagatagcagcaccaccaagaagaatcaaaacagttccaaaaaagaaagtgagtctgaggatagttcagatgatgaacctttaattaaaaagttgaagaaaccccctacagatgaagagttaaaggaaacaataaagaaattactggccagtgctaacttggaagaagtcacaatgaaacagatttgcaaaaaggtctatgaaaattatcctacttatgatttaactgaaagaaaagatttcataaaaacaactgtaaaagagctaatttcttgagatagaggacagagaagatgactcgttcccatagatttgaagatctgatttataccattataccagcaaagagaatgtatttccttttctaaatccttgttaagcaacgttagtagaacttactgctgacctttttatcttgagtgttatgtgaatttgagtttgctgttttaaattgcatttctatgccatttttagtttaaaatcttgcatggcattaattgttccttgcttttatagttgtattttgtacattttggatttctttatataaggtcatagattcttgagctgttgtggtttttagtgcacttaatattagcttgcttaaggcatacttttaatcaagtagaacaaaaactattatcaccaggatttatacatacagagattgtagtatttagtatatgaaatattttgaatacacatctctgtcagtgtgaaaattcagcggcagtgtgtccatcatattaaaaatatacaagctacagttgtccagatcactgaattggaacttttctcctgcatgtgtatatatgtcaaattgtcagcatgacaaaagtgacagatgttatttttgtatttttaaaaaacaattggttgttcacataggtaggtatctttatagttgtagactatggaatgtcagtgttcagccaaacagtatgatggaacagtgaaagtcaattcagtgatggcaacactgaaggaacagttaccctgctttgcctcgaaagtgtcatcaatttgtaattttagtattaactctgtaaaagtgtctgtaggtacgttttatattatataaggacagaccaaaaatcaacctatcaaagcttcaaaaactttgggaaagggtgggattaagtacaagcacatttggcttacagtaaatgaactgatttttattaactgcttttgcccatataaaatgctgatatttactggaaacctagccagcttcacgattatgactaaagtaccagattataatgccagaatataatgtgcaggcaatcgtggatgtctctgacaaagtgtgtctcaaaaataatatacttttacattaaagaaatttaatgtttctctggagttggggctcttggctttcagagtttggttaatcagtgttgattctagatgatcaacataatggaccactcctgaatgagacttaattttgtctttcaaatttactgtcttaaatcagtttattaaatctgaattttaaaacatgctgtttatgacacaatgatntgcatccngnnnggancctctgaacgctatcacg

SEQ ID NO: 434107 - DNA, 2125 bp, Homo sapiens
cattcccgctctccttcccgaaccgccattttgaaaatcttgttgattctggggagccgagcgcgcggcgcgagcgtcacgccagacagcggcccgcgcgccttctcctcggcgtcggccgccgccgcctcccagaacctcctcgtgccctcgcgtgccaggcccgcggcggccgaaatccgcggttcacagcatgtccgcctcggcccctgctgcggagggggagggaacccccacccagcccgcgtccgagaaagaacccgaaatgcccggtcccagagaggagagcgaggaggaagaggacgaggacgacgaggaggaggaggaggaggaaaaagaaaagagtctcatcgtggaaggcaagagggaaaagaaaaaagtagagaggttgacaatgcaagtctcttccttacagagagagccatttacaattgcacaaggaaaggggcagaaactttgtgaaattgagaggatacatttttttctaagtaagaagaaaaccgatgaacttagaaatctacacaaactgctttacaacaggccaggcactgtgtcctcattaaagaagaatgtgggtcagttcagtggctttccatttgaaaaaggaagtgtccaatataaaaagaaggaagaaatgttgaaaaaatttagaaatgccatgttaaagagcatctgtgaggttcttgatttggagagatcaggtgtaaatagtgaactagtgaagaggatcttgaatttcttaatgcatccaaagccttctggcaaaccattgccgaaatctaaaaaaacttgtagcaaaggcagtaaaaaggaacggaacagttctggaatggcaaggaaggctaagcgaaccaaatgtcctgaaattctgtcagatgaatctagtagtgatgaagatgaaaagaaaaacaaggaagagtcttcagatgatgaagataaagaaagtgaagaggagccaccaaaaaagacagccaaaagagaaaaacctaaacagaaagctacttctaaaagtaaaaaatctgtgaaaagtgccaatgttaagaaagcagatagcagcaccaccaagaagaatcaaaacagttccaaaaaagaaagtgagtctgaggatagttcagatgatgaacctttaattaaaaagttgaagaaaccccctacagatgaagagttaaaggaaacaataaagaaattactggccagtgctaacttggaagaagtcacaatgaaacagatttgcaaaaaggtctatgaaaattatcctacttatgatttaactgaaagaaaagatttcataaaaacaactgtaaaagagctaatttcttgagatagaggacagagaagatgactcgttcccatagatttgaagatctgatttataccattataccagcaaagagaatgtatttccttttctaaatccttgttaagcaacgttagtagaacttactgctgacctttttatcttgagtgttatgtgaatttgagtttgctgttttaaattgcatttctatgccatttttagtttaaaatcttgcatggcattaattgttccttgcttttatagttgtattttgtacattttggatttctttatataaggtcatagattcttgagctgttgtggtttttagtgcacttaatattagcttgcttaaggcatacttttaatcaagtagaacaaaaactattatcaccaggatttatacatacagagattgtagtatttagtatatgaaatattttgaatacacatctctgtcagtgtgaaaattcagcggcagtgtgtccatcatattaaaaatatacaagctacagttgtccagatcactgaattggaacttttctcctgcatgtgtatatatgtcaaattgtcagcatgacaaaagtgacagatgttatttttgtatttttaaaaaacaattggttgtatataaagtttttttatttcttttgtgcagatcactttttaaactcacataggtaggtatctttatagttgtagactatggaatgtcagtgttcagccaaacagtatgatggaacagtgaaagtcaattcagtgatggcaacactgaaggaacagttaccctgctttgcctcgaaacttgggaacctctagaatcagccc

SEQ ID NO: 434108 - DNA, 2202 bp, Homo sapiens
  misc_feature (2108)..(2108): n is a, c, g, or t
  misc_feature (2111)..(2111): n is a, c, g, or t
cattcccgctctccttcccgaaccgccattttgaaaatcttgttgattctggggagccgagcgcgcggcgcgagcgtcacgccagacagcggcccgcgcgccttctcctcggcgtcggccgccgccgcctcccagaacctcctcgtgccctcgcgtgccaggcccgcggcggccgaaatccgcggttcacagcatgtccgcctcggcccctgctgcggagggggagggaacccccacccagcccgcgtccgagaaagaacccgaaatgcccggtcccagagaggagagcgaggaggaagaggacgaggacgacgaggaggaggaggaggaggaaaaagaaaagagtctcatcgtggaaggcaagagggaaaagaaaaaagtagagaggttgacaatgcaagtctcttccttacagagagagccatttacaattgcacaaggaaaggggcagaaactttgtgaaattgagaggatacatttttttctaagtaagaagaaaaccgatgaacttagaaatctacacaaactgctttacaacaggccaggcactgtgtcctcattaaagaagaatgtgggtcagttcagtggctttccatttgaaaaaggaagtgtccaatataaaaagaaggaagaaatgttgaaaaaatttagaaatgccatgttaaagagcatctgtgaggttcttgatttggagagatcaggtgtaaatagtgaactagtgaagaggatcttgaatttcttaatgcatccaaagccttctggcaaaccattgccgaaatctaaaaaaacttgtagcaaaggcagtaaaaaggaacggaacagttctggaatggcaaggaaggctaagcgaaccaaatgtcctgaaattctgtcagatgaatctagtagtgatgaagatgaaaagaaaaacaaggaagagtcttcagatgatgaagataaagaaagtgaagaggagccaccaaaaaagacagccaaaagagaaaaacctaaacagaaagctacttctaaaagtaaaaaatctgtgaaaagtgccaatgttaagaaagcagatagcagcaccaccaagaagaatcaaaacagttccaaaaaagaaagtgagtctgaggatagttcagatgatgaacctttaattaaaaagttgaagaaaccccctacagatgaagagttaaaggaaacaataaagaaattactggccagtgctaacttggaagaagtcacaatgaaacagatttgcaaaaaggtctatgaaaattatcctacttatgatttaactgaaagaaaagatttcataaaaacaactgtaaaagagctaatttcttgagatagaggacagagaagatgactcgttcccatagatttgaagatctgatttataccattataccagcaaagagaatgtatttccttttctaaatccttgttaagcaacgttagtagaacttactgctgacctttttatcttgagtgttatgtgaatttgagtttgctgttttaaattgcatttctatgccatttttagtttaaaatcttgcatggcattaattgttccttgcttttatagttgtattttgtacattttggatttctttatataaggtcatagattcttgagctgttgtggtttttagtgcacttaatattagcttgcttaaggcatacttttaatcaagtagaacaaaaactattatcaccaggatttatacatacagagattgtagtatttagtatatgaaatattttgaatacacatctctgtcagtgtgaaaattcagcggcagtgtgtccatcatattaaaaatatacaagctacagttgtccagatcactgaattggaacttttctcctgcatgtgtatatatgtcaaattgtcagcatgacaaaagtgacagatgttatttttgtatttttaaaaaacaattggttgtatataaagtttttttatttcttttgtgcagatcactttttaaactcacataggtaggtatctttatagttgtagactatggaatgtcagtgttcagccaaacagtatgatggaacagtgaaagtcaattcagtgatggcaacactgaaggaacagttaccctgctttgcctcgaaacaaggtngtnatcccaattccgccccccttttaggtatataaactccttggtaaaaagtggtcctggtagggttacggtttttattatttattaataagcg

SEQ ID NO: 434109 - DNA, 982 bp, Homo sapiens
  misc_feature (41)..(41): n is a, c, g, or t
  misc_feature (54)..(54): n is a, c, g, or t
  misc_feature (67)..(67): n is a, c, g, or t
  misc_feature (194)..(194): n is a, c, g, or t
gttctgaggtccccgtacggagcaagtgtctctgatggaangtgtctctgatgnagaggtctctggnatgcaaagtgtctctggatgcaaagtgtctctggatgcaaagtgtctctggatgcaaaggcctctggatgcaaagtgtctctggatgcaaagtgtctctggatgcaaagtgtctctggatgcaaagngtctctggatgcaaagtgtcctctggatgcaaagtgtcctctggatgcaaagtgtcctctggatgcaaagtgtctgtaggtacgttttatattatataaggacagaccaaaaatcaacctatcaaagcttcaaaaactttgggaaagggtgggattaagtacaagcacatttggcttacagtaaatgaactgatttttattaactgcttttgcccatataaaatgctgatatttactggaaacctagccagcttcacgattatgactaaagtaccagattataatgccagaatataatgtgcaggcaatcgtggatgtctctgacaaagtgtgtctcaaaaataatatacttttacattaaagaaatttaatgtttctctggagttggggctcttggctttcagagtttggttaatcagtgttgattctagatgatcaacataatggaccactcctgaatgagacttaattttgtctttcaaatttactgtcttaaatcagtttattaaatctgaattttaaaacatgctgtttatgacacaatgacacatttgttgcaccaattaagtgttgaaaaatatctttgcatcatagaacagaaatatataaaaatatatgttgaatgttaacaggtattttcacaggtttgtttcttgatagttactcagacactagggaaaggtaaatacaagtgaacaaaataagcaactaaatgagacctaataattggccttcgattttaaatatttgttcttataaaccttgtcaataaaaataaatctaaatca

SEQ ID NO: 434110 - DNA, 656 bp, Homo sapiens
  misc_feature (17)..(17): n is a, c, g, or t
gaggtgatctagaggantccgggagtagtcaagcacatttggcttacagtaaatgaactgatttttattaactgcttttgcccatataaaatgctgatatttactggaaacctagccagcttcacgattatgactaaagtaccagattataatgccagaatataatgtgcaggcaatcgtggatgtctctgacaaagtgtgtctcaaaaataatatacttttacattaaagaaatttaatgtttctctggagttggggctcttggctttcagagtttggttaatcagtgttgattctagatgatcaacataatggaccactcctgaatgagacttaattttgtctttcaaatttactgtcttaaatcagtttattaaatctgaattttaaaacatgctgtttatgacacaatgacacatttgttgcaccaattaagtgttgaaaaatatctttgcatcatagaacagaaatatataaaaatatatgttgaatgttaacaggtattttcacaggtttgtttcttgatagttactcagacactagggaaaggtaaatacaagtgaacaaaataagcaactaaatgagacctaataattggccttcgattttaaatatttgttcttataaaccttgtcaataaaaataaatctaaatca

SEQ ID NO: 434111 - DNA, 1808 bp, Homo sapiens
cattcccgctctccttcccgaaccgccattttgaaaatcttgttgattctggggagccgagcgcgcggcgcgagcgtcacgccagacagcggcccgcgcgccttctcctcggcgtcggccgccgccgcctcccagaacctcctcgtgccctcgcgtgccaggcccgcggcggccgaaatccgcggttcacagcatgtccgcctcggcccctgctgcggagggggagggaacccccacccagcccgcgtccgagaaagaacccgaaatgcccggtcccagagaggagagcgaggaggaagaggacgaggacgacgaggaggaggaggaggaggaaaaagaaaagagtctcatcgtggaaggcaagagggaaaagaaaaaagtagagaggttgacaatgcaagtctcttccttacagagagagccatttacaattgcacaaggaaaggggcagaaactttgtgaaattgagaggatacatttttttctaagtaagaagaaaaccgatgaacttagaaatctacacaaactgctttacaacaggccaggcactgtgtcctcattaaagaagaatgtgggtcagttcagtggctttccatttgaaaaaggaagtgtccaatataaaaagaaggaagaaatgttgaaaaaatttagaaatgccatgttaaagagcatctgtgaggttcttgatttggagagatcaggtgtaaatagtgaactagtgaagaggatcttgaatttcttaatgcatccaaagccttctggcaaaccattgccgaaatctaaaaaaacttgtagcaaaggcagtaaaaaggaacggaacagttctggaatggcaaggaaggctaagcgaaccaaatgtcctgaaattctgtcagatgaatctagtagtgatgaagatgaaaagaaaaacaaggaagagtcttcagatgatgaagataaagaaagtgaagaggagccaccaaaaaagacagccaaaagagaaaaacctaaacagaaagctacttctaaaagtaaaaaatctgtgaaaagtgccaatgttaagaaagcagatagcagcaccaccaagaagaatcaaaacagttccaaaaaagaaagtgagtctgaggatagttcagatgatgaacctttaattaaaaagttgaagaaaccccctacagatgaagagttaaaggaaacaataaagaaattactggccagtgctaacttggaagaagtcacaatgaaacagatttgcaaaaaggtctatgaaaattatcctacttatgatttaactgaaagaaaagatttcataaaaacaactgtaaaagagctaatttcttgagatagaggacagagaagatgactcgttcccatagatttgaagatctgatttataccattataccagcaaagagaatgtatttccttttctaaatccttgttaagcaacgttagtagaacttactgctgacctttttatcttgagtgttatgtgaatttgagtttgctgttttaaattgcatttctatgccatttttagtttaaaatcttgcatggcattaattgttccttgcttttatagttgtattttgtacattttggatttctttatataaggtcatagattcttgagctgttgtggtttttagtgcacttaatattagcttgcttaaggcatacttttaatcaagtagaacaaaaactattatcaccaggatttatacatacagagattgtagtatttagtatatgaaatattttgaatacacatctctgtcagtgtgaaaattcagcggcagtgtgtccatcatattaaaaatatacaagct

SEQ ID NO: 434112 - DNA, 1926 bp, Homo sapiens
cattcccgctctccttcccgaaccgccattttgaaaatcttgttgattctggggagccgagcgcgcggcgcgagcgtcacgccagacagcggcccgcgcgccttctcctcggcgtcggccgccgccgcctcccagaacctcctcgtgccctcgcgtgccaggcccgcggcggccgaaatccgcggttcacagcatgtccgcctcggcccctgctgcggagggggagggaacccccacccagcccgcgtccgagaaagaacccgaaatgcccggtcccagagaggagagcgaggaggaagaggacgaggacgacgaggaggaggaggaggaggaaaaagaaaagagtctcatcgtggaaggcaagagggaaaagaaaaaagtagagaggttgacaatgcaagtctcttccttacagagagagccatttacaattgcacaaggaaaggggcagaaactttgtgaaattgagaggatacatttttttctaagtaagaagaaaaccgatgaacttagaaatctacacaaactgctttacaacaggccaggcactgtgtcctcattaaagaagaatgtgggtcagttcagtggctttccatttgaaaaaggaagtgtccaatataaaaagaaggaagaaatgttgaaaaaatttagaaatgccatgttaaagagcatctgtgaggttcttgatttggagagatcaggtgtaaatagtgaactagtgaagaggatcttgaatttcttaatgcatccaaagccttctggcaaaccattgccgaaatctaaaaaaacttgtagcaaaggcagtaaaaaggaacggaacagttctggaatggcaaggaaggctaagcgaaccaaatgtcctgaaattctgtcagatgaatctagtagtgatgaagatgaaaagaaaaacaaggaagagtcttcagatgatgaagataaagaaagtgaagaggagccaccaaaaaagacagccaaaagagaaaaacctaaacagaaagctacttctaaaagtaaaaaatctgtgaaaagtgccaatgttaagaaagcagatagcagcaccaccaagaagaatcaaaacagttccaaaaaagaaagtgagtctgaggatagttcagatgatgaacctttaattaaaaagttgaagaaaccccctacagatgaagagttaaaggaaacaataaagaaattactggccagtgctaacttggaagaagtcacaatgaaacagatttgcaaaaaggtctatgaaaattatcctacttatgatttaactgaaagaaaagatttcataaaaacaactgtaaaagagctaatttcttgagatagaggacagagaagatgactcgttcccatagatttgaagatctgatttataccattataccagcaaagagaatgtatttccttttctaaatccttgttaagcaacgttagtagaacttactgctgacctttttatcttgagtgttatgtgaatttgagtttgctgttttaaattgcatttctatgccatttttagtttaaaatcttgcatggcattaattgttccttgcttttatagttgtattttgtacattttggatttctttatataaggtcatagaaaatatctgcagatattttctatgcctttttatagtaatatattaataacattaataactatgaccaatagttcaattaaaaaaatactttagataattttgagagtgctcacagtaagaaaactctgaggtcttgtaataaacagctataaaaatgtttcctctaagatctgattaaaatttggattattgctcttttgctttggtaaatgtataacaacattctaatttctactccttaagtaatgatttctagcaccacccagaataaaatagcttcaacagctaatctttacatagaaaatatctgggggatcctaag

SEQ ID NO: 434113 - DNA, 1604 bp, Homo sapiens
cattcccgctctccttcccgaaccgccattttgaaaatcttgttgattctggggagccgagcgcgcggcgcgagcgtcacgccagacagcggcccgcgcgccttctcctcggcgtcggccgccgccgcctcccagaacctcctcgtgccctcgcgtgccaggcccgcggcggccgaaatccgcggttcacagcatgtccgcctcggcccctgctgcggagggggagggaacccccacccagcccgcgtccgagaaagaacccgaaatgcccggtcccagagaggagagcgaggaggaagaggacgaggacgacgaggaggaggaggaggaggaaaaagaaaagagtctcatcgtggaaggcaagagggaaaagaaaaaagtagagaggttgacaatgcaagtctcttccttacagagagagccatttacaattgcacaaggaaaggggcagaaactttgtgaaattgagaggatacatttttttctaagtaagaagaaaaccgatgaacttagaaatctacacaaactgctttacaacaggccaggcactgtgtcctcattaaagaagaatgtgggtcagttcagtggctttccatttgaaaaaggaagtgtccaatataaaaagaaggaagaaatgttgaaaaaatttagaaatgccatgttaaagagcatctgtgaggttcttgatttggagagatcaggtgtaaatagtgaactagtgaagaggatcttgaatttcttaatgcatccaaagccttctggcaaaccattgccgaaatctaaaaaaacttgtagcaaaggcagtaaaaaggaacggaacagttctggaatggcaaggaaggctaagcgaaccaaatgtcctgaaattctgtcagatgaatctagtagtgatgaagatgaaaagaaaaacaaggaagagtcttcagatgatgaagataaagaaagtgaagaggagccaccaaaaaagacagccaaaagagaaaaacctaaacagaaagctacttctaaaagtaaaaaatctgtgaaaagtgccaatgttaagaaagcagatagcagcaccaccaagaagaatcaaaacagttccaaaaaagaaagtgagtctgaggatagttcagatgatgaacctttaattaaaaagttgaagaaaccccctacagatgaagagttaaaggaaacaataaagaaattactggccagtgctaacttggaagaagtcacaatgaaacagatttgcaaaaaggtctatgaaaattatcctacttatgatttaactgaaagaaaagatttcataaaaacaactgtaaaagaggtaaatatttcagtctttcaagtttgactttagaaatataagacaaaagtaattacataaaatactccatatttttcaaaatattcatgtcactaaatatcacatttgatcctcacatttcttcataatagggaaatttatttcttctcattcccactttaaagcttaaaattaaagtttgaacagttagtgataagacctgaactcagattatgatgtggcctcatggtgtacctgggtagctgggcatctcaacgttgctctcacaaatacttgaggaagttcctgtctacga

SEQ ID NO: 434114 - DNA, 1342 bp, Homo sapiens
cattcccgctctccttcccgaaccgccattttgaaaatcttgttgattctggggagccgagcgcgcggcgcgagcgtcacgccagacagcggcccgcgcgccttctcctcggcgtcggccgccgccgcctcccagaacctcctcgtgccctcgcgtgccaggcccgcggcggccgaaatccgcggttcacagcatgtccgcctcggcccctgctgcggagggggagggaacccccacccagcccgcgtccgagaaagaacccgaaatgcccggtcccagagaggagagcgaggaggaagaggacgaggacgacgaggaggaggaggaggaggaaaaagaaaagagtctcatcgtggaaggcaagagggaaaagaaaaaagtagagaggttgacaatgcaagtctcttccttacagagagagccatttacaattgcacaaggaaaggggcagaaactttgtgaaattgagaggatacatttttttctaagtaagaagaaaaccgatgaacttagaaatctacacaaactgctttacaacaggccaggcactgtgtcctcattaaagaagaatgtgggtcagttcagtggctttccatttgaaaaaggaagtgtccaatataaaaagaaggaagaaatgttgaaaaaatttagaaatgccatgttaaagagcatctgtgaggttcttgatttggagagatcaggtgtaaatagtgaactagtgaagaggatcttgaatttcttaatgcatccaaagccttctggcaaaccattgccgaaatctaaaaaaacttgtagcaaaggcagtaaaaaggaacggaacagttctggaatggcaaggaaggctaagcgaaccaaatgtcctgaaattctgtcagatgaatctagtagtgatgaagatgaaaagaaaaacaaggaagagtcttcagatgatgaagataaagaaagtgaagaggagccaccaaaaaagacagccaaaagagaaaaacctaaacagaaagctacttctaaaagtaaaaaatctgtgaaaagtgccaatgttaagaaagcagatagcagcaccaccaagaagaatcaaaacagttccaaaaaagaaagtgagtctgaggatagttcagatgatgaacctttaattaaaaagttgaagaaaccccctacagatgaagagttaaaggaaacaataaagaaattactggccagtgctaacttggaagaagtcacaatgaaacagatttgcaaaaagaaaagagtctcatcgtggaaggcaagagggaaaagaaaaaagtagagaggttgacaatgcaagtctcttccttacagagagagccatttacaattgcacaag

SEQ ID NO: 434115 - DNA, 1295 bp, Homo sapiens
cattcccgctctccttcccgaaccgccattttgaaaatcttgttgattctggggagccgagcgcgcggcgcgagcgtcacgccagacagcggcccgcgcgccttctcctcggcgtcggccgccgccgcctcccagaacctcctcgtgccctcgcgtgccaggcccgcggcggccgaaatccgcggttcacagcatgtccgcctcggcccctgctgcggagggggagggaacccccacccagcccgcgtccgagaaagaacccgaaatgcccggtcccagagaggagagcgaggaggaagaggacgaggacgacgaggaggaggaggaggaggaaaaagaaaagagtctcatcgtggaaggcaagagggaaaagaaaaaagtagagaggttgacaatgcaagtctcttccttacagagagagccatttacaattgcacaaggaaaggggcagaaactttgtgaaattgagaggatacatttttttctaagtaagaagaaaaccgatgaacttagaaatctacacaaactgctttacaacaggccaggcactgtgtcctcattaaagaagaatgtgggtcagttcagtggctttccatttgaaaaaggaagtgtccaatataaaaagaaggaagaaatgttgaaaaaatttagaaatgccatgttaaagagcatctgtgaggttcttgatttggagagatcaggtgtaaatagtgaactagtgaagaggatcttgaatttcttaatgcatccaaagccttctggcaaaccattgccgaaatctaaaaaaacttgtagcaaaggcagtaaaaaggaacggaacagttctggaatggcaaggaaggctaagcgaaccaaatgtcctgaaattctgtcagatgaatctagtagtgatgaagatgaaaagaaaaacaaggaagagtcttcagatgatgaagataaagaaagtgaagaggagccaccaaaaaagacagccaaaagagaaaaacctaaacagaaagctacttctaaaagtaaaaaatctgtgaaaagtgccaatgttaagaaagcagatagcagcaccaccaagaagaatcaaaacagttccaaaaaagaaagtgagtctgaggatagttaataaataacagaggcataagtgattggccgggctggattatttccctgggaaaactcaccaaaatcacaacgctgctaccttggaaaatactctgacatccagcccaagtctgccttgaacttgctatgacgagctgcacctcagattccctactttacaacatggcacgcgacatcgccag

SEQ ID NO: 434116 - DNA, 508 bp, Homo sapiens
cggacgcgtgggtcgacccacgcgtccgccacgcgtcgctctgacaaagtgtgtctcaaaaataatatacttttacattaaagaaatttaatgtttctctggagttggggctcttggctttcagagtttggttaatcagtgttgattctagatgatcaacataatggaccactcctgaatgagacttaattttgtctttcaaatttactgtcttaaatcagtttattaaatctgaattttaaaacatgctgtttatgacacaatgacacatttgttgcaccaattaagtgttgaaaaatatctttgcatcatagaacagaaatatataaaaatatatgttgaatgttaacaggtattttcacaggtttgtttcttgatagttactcagacactagggaaaggtaaatacaagtgaacaaaataagcaactaaatgagacctaataattggccttcgattttaaatatttgttcttataaaccttgtcaataaaaataaatctaaatca

SEQ ID NO: 434117 - DNA, 463 bp, Homo sapiens
gtttattaaatctgatttaagacagtaaatttgaaagacaaaattaagtctcattcaggagtggtccattatgttgatcatctagaatcaacactgattaaccaaactctgaaagccaagagccccaactccagagaaacataattttgtctttcaaatttactgtcttaaatcagtttattaaatctgaattttaaaacatgctgtttatgacacaatgacacatttgttgcaccaattaagtgttgaaaaatatctttgcatcatagaacagaaatatataaaaatatatgttgaatgttaacaggtattttcacaggtttgtttcttgatagttactcagacactagggaaaggtaaatacaagtgaacaaaataagcaactaaatgagacctaataattggccttcgattttaaatatttgttcttataaaccttgtcaataaaaataaatctaaatca

SEQ ID NO: 434118 - DNA, 441 bp, Homo sapiens
tttgtctttcaaatttactgtcttaaatcagtttattaaatctgaattttaaaacatgctgtttatgacacaatgacacatttgttgcaccaattaagtgttgaaaaatatctttgcatcatagaacagaaatatataaaaatatatgttgaatgttaacaggtattttcacaggtttgtttcttgatagttactcagacactagggaaaggtaaatacaagtgaacaaaataagcaactaaatgagacctaataattggccttcgattttaaatatttgttcttataaaccttgtcaataaaaataaatctaaatcacactggtgttttaagtcacttgcatttgatatcttataggtgtatatagcatttccttatggggaataattctgaaaagggatttttaaattgattcagccctataacctatacaatttggaa

SEQ ID NO: 434119 - DNA, 3342 bp, Homo sapiens
ggcacggcgccagcggccgcacgccgcggagcaggggctcggaggtcccgggattacggtgctcgagcacgctggtgggaaaggacccgggacttgaacagtgttgtgcggcgccatgcaggtctccagcctcaatgaggtgaagatttacagcctcagctgcggcaagtcccttcctgagtggctttctgataggaagaagagagcgctacagaagaaagatgtagatgtccgtaggagaattgaacttattcaggactttgaaatgcctactgtgtgtaccactattaaggtgtcaaaagatggacagtacattttagcaactggaacatataaacctcgggttcgatgttatgacacctatcaattatccttgaagtttgaaaggtgtttagattcagaagttgtcacctttgaaattttgtctgatgactactcaaagattgtcttcttacataatgatagatacattgaatttcattcgcaatcaggtttttactacaaaaccagaataccaaagtttgggagagatttctcttaccactatccatcctgtgacttgtactttgttggtgcaagttctgaagtttataggttaaacttagaacaaggacgatacctgaatcctctacaaactgatgctgcggagaataatgtttgtgacataaattcagtgcatggcttgtttgccacaggaaccatagagggtagagtggagtgctgggacccaagaactcgaaacagagttggcctgttagactgcgccttaaacagtgtcacagcagattcagagataaacagtttaccaacaatctctgctttgaaatttaatggtgccttgaccatggcagttggaacaaccacagggcagggaaaaatatttacttccttggagccagagcatgaccttaatgatgtttgtctctaccccaactcaggcatgcttctgacggccaatgaaacccccaagatgggcatctattacattccagttttgggtcctgctcctcggtggtgttccttcttagacaacttgaccgaagaattagaagagaatccagaaagcacagtctatgatgattataaatttgtcaccaagaaagaccttgaaaatttagggctcacccacctcattggatctcctttcctccgggcatatatgcatgggtttttcatggatataagactctatcacaaggtgaaactgatggtaaatccatttgcttatgaagaatataggaaagataaaatacgacagaaaatagaagaaacacgtgcacagagagtccagttaaagaaattgccaaaagttaacaaagagctggcacttaaattaattgaggaagaagaggagaagcagaaatctacatggaaaaagaaagttaagagtcttcctaatattctcaccgatgatcgatttaaagttatgtttgagaaccctgacttccaagtagatgaagagagtgaagaatttaggcttctgaatccacttgtttcaaaaattagtgaaaaaaggaagaagaaactaagactcttagagcaacaagaacttcgtgaaaaagaagaggaggaagagccggaaggaaaaccaagtgatgcagaaagttcggagagttcagatgatgaaaaagcctgggttgaagaggtcaggaagcaacgcagactcctccagcaggaggaaaaagtgaagcggcaggaacgactcaaggaggaccagcagacagtcctaaagccccagttttatgagatcaaagcaggagaagaatttagaagcttcaaagattctgccacaaagcagaaactgatgaacaaaacccttgaagatcgtttgaaaattgaagcaaaaaatgggacattgagtgtatccgacaccaccgttggcagcaaacaattgacattcacgttaaagaggtctgaacagcagaagaagcaacaggaggctgagaaactgcatcgacaagaaaggaaaagactccgtcgttcggccggacacctgaagtcaagacacaaaagaggacggtcgtttcattgatttgggaagtggtcctacctgtgattagggaggggtacgtctcccccaaactgatcatcgttagggtgttaaacacagacgaggaaacacacgtttttaaagttcatgtacgttcttgtacacagaggtaaagatttgaaaacctgtgccttgtgggttggactttgaagctggccccgccgacggccaccgcacagccccaggggtgtgcttgcgagtcgttgctccctggaaacattgtcctttccccacggctttaatcatgaaaaccaggctggggtttttttaatattgtgaaatgtacaccatgaaatgaaaggtttatcctgtgccagaaaccaaggtttatcatgctctaggaacttttttcttacactgcctaccgccattcatgattaaaccatccagaaataccatccctgttttacctggtgtctgtgtattgcctgtgtttgtgtttataagtttatgctgataggtttgttcggcttgtttatgtattagtttgggatttgtttttaaataatttataccaagagagtataatctaatggtgcaggttgagagcatcccaaatccgaaaatctaaaactgtttgagcactgtatttatctgttcttgcactgctataaagaactacctgaaactgggtaatttataagtaaagaaaagaggtttaattgactcacagttctacaggtggtacaggaagcatggctgtggaggccctgggaagcttacaatcgtggcagaaggtgaagcggaagcaggtatgtcctgcgtggctagagccagaggaggagggcaaaggggcagatgctgcacactttcaaacaccagatctccaagaactcactaacacagaatagcaagggggaagtctgcccccatgtttcagtcacctccctccaggcccctcctccaacaccgaagattacaatttgacatgagatttgtgtggggacacagagcaaaaccatatcaagcactgacatgacactggaggaaaatgctcattagagcttttcaggttttggattttcggatttgggatacttgactagtaaatataatacagatattccaaaacacacaaaaaaaccaaagtctaaaagacttctggtcccaagcatttcagataagggatacccaacctgtaataatgggaaacaagcagtagaggctgttggttaatcttggcacaagtttaattacaggttttttttttttcctgtttcttaagtacagtcaaacataaacttactggaggaaacatttataaaaataaatatactttcatttgaatagct

SEQ ID NO: 434120 - DNA, 2598 bp, Homo sapiens
ggcacggcgccagcggccgcacgccgcggagcaggggctcggaggtcccgggattacggtgctcgagcacgctggtgggaaaggacccgggacttgaacagtgttgtgcggcgccatgcaggtctccagcctcaatgaggtgaagatttacagcctcagctgcggcaagtcccttcctgagtggctttctgataggaagaagagagcgctacagaagaaagatgtagatgtccgtaggagaattgaacttattcaggactttgaaatgcctactgtgtgtaccactattaaggtgtcaaaagatggacagtacattttagcaactggaacatataaacctcgggttcgatgttatgacacctatcaattatccttgaagtttgaaaggtgtttagattcagaagttgtcacctttgaaattttgtctgatgactactcaaagattgtcttcttacataatgatagatacattgaatttcattcgcaatcaggtttttactacaaaaccagaataccaaagtttgggagagatttctcttaccactatccatcctgtgacttgtactttgttggtgcaagttctgaagtttataggttaaacttagaacaaggacgatacctgaatcctctacaaactgatgctgcggagaataatgtttgtgacataaattcagtgcatggcttgtttgccacaggaaccatagagggtagagtggagtgctgggacccaagaactcgaaacagagttggcctgttagactgcgccttaaacagtgtcacagcagattcagagataaacagtttaccaacaatctctgctttgaaatttaatggtgccttgaccatggcagttggaacaaccacagggcaggttttattatatgaccttcgatctgataagccattgctagttaaagatcaccagtatgggctgcccattaagtccgttcatttccaggattcattagatctgattttgtctgctgactctcgaattgtcaagatgtggaataagaactccggaaaaatatttacttccttggagccagagcatgaccttaatgatgtttgtctctaccccaactcaggcatgcttctgacggccaatgaaacccccaagatgggcatctattacattccagttttgggtcctgctcctcggtggtgttccttcttagacaacttgaccgaagaattagaagagaatccagaaagcacagtctatgatgattataaatttgtcaccaagaaagaccttgaaaatttagggctcacccacctcattggatctcctttcctccgggcatatatgcatgggtttttcatggatataagactctatcacaaggtgaaactgatggtaaatccatttgcttatgaagaatataggaaagataaaatacgacagaaaatagaagaaacacgtgcacagagagtccagttaaagaaattgccaaaagttaacaaagagctggcacttaaattaattgaggaagaagaggagaagcagaaatctacatggaaaaagaaagttaagagtcttcctaatattctcaccgatgatcgatttaaagttatgtttgagaaccctgacttccaagtagatgaagagagtgaagaatttaggcttctgaatccacttgtttcaaaaattagtgaaaaaaggaagaagaaactaagactcttagagcaacaagaacttcgtgaaaaagaagaggaggaagagccggaaggaaaaccaagtgatgcagaaagttcggagagttcagatgatgaaaaagcctgggttgaagaggtcaggaagcaacgcagactcctccagcaggaggaaaaagtgaagcggcaggaacgactcaaggaggaccagcagacagtcctaaagccccagttttatgagatcaaagcaggagaagaatttagaagcttcaaagattctgccacaaagcagaaactgatgaacaaaacccttgaagatcgtttgaaaattgaagcaaaaaatgggacattgagtgtatccgacaccaccgttggcagcaaacaattgacattcacgttaaagaggtctgaacagcagaagaagcaacaggaggctgagaaactgcatcgacaagaaaggaaaagactccgtcgttcggccggacacctgaagtcaagacacaaaagaggacggtcgtttcattgatttgggaagtggtcctacctgtgattagggaggggtacgtctcccccaaactgatcatcgttagggtgttaaacacagacgaggaaacacacgtttttaaagttcatgtacgttcttgtacacagaggtaaagatttgaaaacctgtgccttgtgggttggactttgaagctggccccgccgacggccaccgcacagccccaggggtgtgcttgcgagtcgttgctccctggaaacattgtcctttccccacggctttaatcatgaaaaccaggctggggtttttttaatattgtgaaatgtacaccatgaaatgaaaggtttatcctgtgccagaaaccaaggtttatcatgctctaggaacttttttcttacactgcctaccgccattcatgattaaaccatccagaaatacca

SEQ ID NO: 434121 - DNA, 752 bp, Homo sapiens
  misc_feature (23)..(23): n is a, c, g, or t
  misc_feature (738)..(738): n is a, c, g, or t
  misc_feature (740)..(740): n is a, c, g, or t
tgacatgatacgactcgagtctnagacccgggagtagtccaaaaggaagaagaaactaagactcttagagcaacaagaacttcgtgaaaaagaagaggaggaagagccggaaggaaaaccaagtgatgcagaaagttcggagagttcagatgatgaaaaagcctgggttgaagaggtcaggaagcaacgcagactcctccagcaggaggaaaaagtgaagcggcaggaacgactcaaggaggaccagcagacagtcctaaagccccagttttatgagatcaaagcaggagaagaatttagaagcttcaaagattctgccacaaagcagaaactgatgaacaaaacccttgaagatcgtttgaaaattgaagcaaaaaatgggacattgagtgtatccgacaccaccgttggcagcaaacaattgacattcacgttaaagaggtctgaacagcagaagaagcaacaggaggctgagaaactgcatcgacaagaaaggaaaagactccgtcgttcggccggacacctgaagtcaagacacaaaagaggacggtcgtttcattgatttgggaagtggtcctacctgtgattagggaggggtacgtctcccccaaactgatcatcgttagggtgttaaacacagacgaggaaacacacgtttttaaagttcatgtacgttcttgtacacagaggtaaagatttgaaaacctgtgccttgtgggttggactacccccgggtcnanctcgagtcgtat

SEQ ID NO: 434122 - DNA, 1429 bp, Homo sapiens
ggcacggcgccagcggccgcacgccgcggagcaggggctcggaggtcccgggattacggtgctcgagcacgctggtgggaaaggacccgggacttgaacagtgttgtgcggcgccatgcaggtctccagcctcaatgaggtgaagatttacagcctcagctgcggcaagtcccttcctgagtggctttctgataggaagaagagagcgctacagaagaaagatgtagatgtccgtaggagaattgaacttattcaggactttgaaatgcctactgtgtgtaccactattaaggtgtcaaaagatggacagtacattttagcaactggaacatataaacctcgggttcgatgttatgacacctatcaattatccttgaagtttgaaaggtgtttagattcagaagttgtcacctttgaaattttgtctgatgactactcaaagttctgaagtttataggttaaacttagaacaaggacgatacctgaatcctctacaaactgatgctgcggagaataatgtttgtgacataaattcagtgcatggcttgtttgccacaggaaccatagagggtagagtggagtgctgggacccaagaactcgaaacagagttggcctgttagactgcgccttaaacagtgtcacagcagattcagagataaacagtttaccaacaatctctgctttgaaatttaatggtgccttgaccatggcagttggaacaaccacagggcaggttttattatatgaccttcgatctgataagccattgctagttaaagatcaccagtatgggctgcccattaagtccgttcatttccaggattcattagatctgattttgtctgctgactctcgaattgtcaagatgtggaataagaactccggaaaaatatttacttccttggagccagagcatgaccttaatgatgtttgtctctaccccaactcaggcatgcttctgacggccaatgaaacccccaagatgggcatctattacattccaccttccctctgagctacagaggtacatatccaccagtctactcggcttctccacttggatgtctaatagcacatcctgtttaatgtgtctacatcagaacttctgatccagctccccacctgcaccccacctgccagggtctccatttcagctgaagccttgttgttgctcactcggctgtctaggcttagagcgcaggagccatccttgtttcctctcctctccacttcatgcctcgtcatccagtccatcagctgtttgcagattttgttccacatccagccatttctcagtgcttcccttccatcaggcctctggattactgtaatactggataactgatctttctgcttctgcttttgtctctcttgtaacctattttccatgtaacagccagactgatgtaaaatattaaaaatataaac

SEQ ID NO: 434123 - DNA, 232 bp, Homo sapiens
catgaaaaccaggctggggttttcatgtttaaagccgtggggaaaggacaatgtttccagggagcaacggctttaatcatgaaaaccaggctggggtttttttaatattgtgaaatgtacaccatgaaatgaaaggtttatcctgtgccagaaaccaaggtttatcatgctctaggaacttttttcttacactgcctaccgccattcatgattaaaccatccagaaatacca

SEQ ID NO: 434124 - DNA, 364 bp, Homo sapiens
ccatgcccagctaattttgtgtttttagtagagatggggtttctccatgttggtcaggctggtctcaagctccctacctcaggtgacccacccgccttgtcctcccaaagtgctgggattacaggtgtgagccaccatgcccggccaggattatttaaatgtgttcccaagtgaaagagggaactgatcattgagggtaccatgagagtgctctatgttatgacatgctggtgccatgtaaatgaagggcgtttgtttcaagtctttaattagtatgtaaggtttgcagaaaagctatcaggatacaggaaggcattaaggagccgatggagtgttttcattcttaatcccagtggagtgtgtg

SEQ ID NO: 434125 - DNA, 2523 bp, Homo sapiens
ggcagtgaatcggtatcagggtcatagtcgttccagaggatccccgtcgtccagttatcatgaggtgaagatttacagcctcagctgcggcaagtcccttcctgagtggctttctgataggaagaagagagcgctacagaagaaagatgtagatgtccgtaggagaattgaacttattcaggactttgaaatgcctactgtgtgtaccactattaaggtgtcaaaagatggacagtacattttagcaactggaacatataaacctcgggttcgatgttatgacacctatcaattatccttgaagtttgaaaggtgtttagattcagaagttgtcacctttgaaattttgtctgatgactactcaaagattgtcttcttacataatgatagatacattgaatttcattcgcaatcaggtttttactacaaaaccagaataccaaagtttgggagagatttctcttaccactatccatcctgtgacttgtactttgttggtgcaagttctgaagtttataggttaaacttagaacaaggacgatacctgaatcctctacaaactgatgctgcggagaataatgtttgtgacataaattcagtgcatggcttgtttgccacaggaaccatagagggtagagtggagtgctgggacccaagaactcgaaacagagttggcctgttagactgcgccttaaacagtgtcacagcagattcagagataaacagtttaccaacaatctctgctttgaaatttaatggtgccttgaccatggcagttggaacaaccacagggcaggttttattatatgaccttcgatctgataagccattgctagttaaagatcaccagtatgggctgcccattaagtccgttcatttccaggattcattagatctgattttgtctgctgactctcgaattgtcaagatgtggaataagaactccggaaaaatatttacttccttggagccagagcatgaccttaatgatgtttgtctctaccccaactcaggcatgcttctgacggccaatgaaacccccaagatgggcatctattacattccagttttgggtcctgctcctcggtggtgttccttcttagacaacttgaccgaagaattagaagagaatccagaaagcacagtctatgatgattataaatttgtcaccaagaaagaccttgaaaatttagggctcacccacctcattggatctcctttcctccgggcatatatgcatgggtttttcatggatataagactctatcacaaggtgaaactgatggtaaatccatttgcttatgaagaatataggaaagataaaatacgacagaaaatagaagaaacacgtgcacagagagtccagttaaagaaattgccaaaagttaacaaagagctggcacttaaattaattgaggaagaagaggagaagcagaaatctacatggaaaaagaaagttaagagtcttcctaatattctcaccgatgatcgatttaaagttatgtttgagaaccctgacttccaagtagatgaagagagtgaagaatttaggcttctgaatccacttgtttcaaaaattagtgaaaaaaggaagaagaaactaagactcttagagcaacaagaacttcgtgaaaaagaagaggaggaagagccggaaggaaaaccaagtgatgcagaaagttcggagagttcagatgatgaaaaagcctgggttgaagaggtcaggaagcaacgcagactcctccagcaggaggaaaaagtgaagcggcaggaacgactcaaggaggaccagcagacagtcctaaagccccagttttatgagatcaaagcaggagaagaatttagaagcttcaaagattctgccacaaagcagaaactgatgaacaaaacccttgaagatcgtttgaaaattgaagcaaaaaatgggacattgagtgtatccgacaccaccgttggcagcaaacaattgacattcacgttaaagaggtctgaacagcagaagaagcaacaggaggctgagaaactgcatcgacaagaaaggaaaagactccgtcgttcggccggacacctgaagtcaagacacaaaagaggacggtcgtttcattgatttgggaagtggtcctacctgtgattagggaggggtacgtctcccccaaactgatcatcgttagggtgttaaacacagacgaggaaacacacgtttttaaagttcatgtacgttcttgtacacagaggtaaagatttgaaaacctgtgccttgtgggttggactttgaagctggccccgccgacggccaccgcacagccccaggggtgtgcttgcgagtcgttgctccctggaaacattgtcctttccccacggctttaatcatgaaaaccaggctggggtttttttaatattgtgaaatgtacaccatgaaatgaaaggtttatcctgtgccagaaaccaaggtttatcatgctctaggaacttttttcttacactgcctaccgccattcatgattaaaccatccagaaatacca

SEQ ID NO: 434126 - DNA, 1516 bp, Homo sapiens
tgtgcgggggcgtttcatcagccactcctggcgtctatattcgaaaccacccaaatctagttttgggtcctgctcctcggtggtgttccttcttagacaacttgaccgaagaattagaagagaatccagaaagcacagtctatgatgattataaatttgtcaccaagaaagaccttgaaaatttagggctcacccacctcattggatctcctttcctccgggcatatatgcatgggtttttcatggatataagactctatcacaaggtgaaactgatggtaaatccatttgcttatgaagaatataggaaagataaaatacgacagaaaatagaagaaacacgtgcacagagagtccagttaaagaaattgccaaaagttaacaaagagctggcacttaaattaattgaggaagaagaggagaagcagaaatctacatggaaaaagaaagttaagagtcttcctaatattctcaccgatgatcgatttaaagttatgtttgagaaccctgacttccaagtagatgaagagagtgaagaatttaggcttctgaatccacttgtttcaaaaattagtgaaaaaaggaagaagaaactaagactcttagagcaacaagaacttcgtgaaaaagaagaggaggaagagccggaaggaaaaccaagtgatgcagaaagttcggagagttcagatgatgaaaaagcctgggttgaagaggtcaggaagcaacgcagactcctccagcaggaggaaaaagtgaagcggcaggaacgactcaaggaggaccagcagacagtcctaaagccccagttttatgagatcaaagcaggagaagaatttagaagcttcaaagattctgccacaaagcagaaactgatgaacaaaacccttgaagatcgtttgaaaattgaagcaaaaaatgggacattgagtgtatccgacaccaccgttggcagcaaacaattgacattcacgttaaagaggtctgaacagcagaagaagcaacaggaggctgagaaactgcatcgacaagaaaggaaaagactccgtcgttcggccggacacctgaagtcaagacacaaaagaggacggtcgtttcattgatttgggaagtggtcctacctgtgattagggaggggtacgtctcccccaaactgatcatcgttagggtgttaaacacagacgaggaaacacacgtttttaaagttcatgtacgttcttgtacacagaggtaaagatttgaaaacctgtgccttgtgggttggactttgaagctggccccgccgacggccaccgcacagccccaggggtgtgcttgcgagtcgttgctccctggaaacattgtcctttccccacggctttaatcatgaaaaccaggctggggtttttttaatattgtgaaatgtacaccatgaaatgaaaggtttatcctgtgccagaaaccaaggtttatcatgctctaggaacttttttcttacactgcctaccgccattcatgattaaaccatccagaaatacca

SEQ ID NO: 434127 - DNA, 2523 bp, Homo sapiens
ggcacggcgccagcggccgcacgccgcggagcaggggctcggaggtcccgggattacggtgctcgagcacgctggtgggaaaggacccgggacttgaacagtgttgtgcggcgccatgcaggtctccagcctcaatgaggtgaagatttacagcctcagctgcggcaagtcccttcctgagtggctttctgataggaagaagagagcgctacagaagaaagatgtagatgtccgtaggagaattgaacttattcaggactttgaaatgcctactgtgtgtaccactattaaggtgtcaaaagatggacagtacattttagcaactggaacatataaacctcgggttcgatgttatgacacctatcaattatccttgaagtttgaaaggtgtttagattcagaagttgtcacctttgaaattttgtctgatgactactcaaagattgtcttcttacataatgatagatacattgaatttcattcgcaatcaggtttttactacaaaaccagaataccaaagtttgggagagatttctcttaccactatccatcctgtgacttgtactttgttggtgcaagttctgaagtttataggttaaacttagaacaaggacgatacctgaatcctctacaaactgatgctgcggagaataatgtttgtgacataaattcagtgcatggcttgtttgccacaggaaccatagagggtagagtggagtgctgggacccaagaactcgaaacagagttggcctgttagactgcgccttaaacagtgtcacagcagattcagagataaacagtttaccaacaatctctgctttgaaatttaatggtgccttgaccatggcagttggaacaaccacagggcaggttttattatatgaccttcgatctgataagccattgctagttaaagatcaccagtatgggctgcccattaagtccgttcatttccaggattcattagatctgattttgtctgctgactctcgaattgtcaagatgtggaataagaactccggaaaaatatttacttccttggagccagagcatgaccttaatgatgtttgtctctaccccaactcaggcatgcttctgacggccaatgaaacccccaagatgggcatctattacattccagttttgggtcctgctcctcggtggtgttccttcttagacaacttgaccgaagaattagaagagaatccagaaagcacagtctatgatgattataaatttgtcaccaagaaagaccttgaaaatttagggctcacccacctcattggatctcctttcctccgggcatatatgcatgggtttttcatggatataagactctatcacaaggtgaaactgatggtaaatccatttgcttatgaagaatataggaaagataaaatacgacagaaaatagaagaaacacgtgcacagagagtccagttaaagaaattgccaaaagttaacaaagagctggcacttaaattaattgaggaagaagaggagaagcagaaatctacatggaaaaagaaagttaagagtcttcctaatattctcaccgatgatcgatttaaagttatgtttgagaaccctgacttccaagtagatgaagagagtgaagaatttaggcttctgaatccacttgtttcaaaaattagtgaaaaaaggaagaagaaactaagactcttagagcaacaagaacttcgtgaaaaagaagaggaggaagagccggaaggaaaaccaagtgatgcagaaagttcggagagttcagatgatgaaaaagcctgggttgaagaggtcaggaagcaacgcagactcctccagcaggaggaaaaagtgaagcggcaggaacgactcaaggaggaccagcagacagtcctaaagccccagttttatgagatcaaagcaggagaagaatttagaagcttcaaagattctgccacaaagcagaaactgatgaacaaaacccttgaagatcgtttgaaaattgaagcaaaaaatgggacattgagtgtatccgacaccaccgttggcagcaaacaattgacattcacgttaaagaggtctgaacagcagaagaagcaacaggaggctgagaaactgcatcgacaagaaaggaaaagactccgtcgttcggccggacacctgaagtcaagacacaaaagaggacggtcgtttcattgatttgggaagtggtcctacctgtgattagggaggggtacgtctcccccaaactgatcatcgttagggtgttaaacacagacgaggaaacacacgtttttaaagttcatgtacgttcttgtacacagaggtaaagatttgaaaacctgtgccttgtgggttggactttgaagctggccccgccgacggccaccgcacagccccaggggtgtgcttgcgagtcgttgctccctggaaacattgtcctttccccacggctttaatcatgaaaaccaggctggggtttttttaatattgtgaaatgtacaccatgaaatgaaaggtttatcctgtgccagaaacca

SEQ ID NO: 434128 - DNA, 2372 bp, Homo sapiens
  misc_feature (2358)..(2358): n is a, c, g, or t
  misc_feature (2360)..(2360): n is a, c, g, or t
ggcacggcgccagcggccgcacgccgcggagcaggggctcggaggtcccgggattacggtgctcgagcacgctggtgggaaaggacccgggacttgaacagtgttgtgcggcgccatgcaggtctccagcctcaatgaggtgaagatttacagcctcagctgcggcaagtcccttcctgagtggctttctgataggaagaagagagcgctacagaagaaagatgtagatgtccgtaggagaattgaacttattcaggactttgaaatgcctactgtgtgtaccactattaaggtgtcaaaagatggacagtacattttagcaactggaacatataaacctcgggttcgatgttatgacacctatcaattatccttgaagtttgaaaggtgtttagattcagaagttgtcacctttgaaattttgtctgatgactactcaaagattgtcttcttacataatgatagatacattgaatttcattcgcaatcaggtttttactacaaaaccagaataccaaagtttgggagagatttctcttaccactatccatcctgtgacttgtactttgttggtgcaagttctgaagtttataggttaaacttagaacaaggacgatacctgaatcctctacaaactgatgctgcggagaataatgtttgtgacataaattcagtgcatggcttgtttgccacaggaaccatagagggtagagtggagtgctgggacccaagaactcgaaacagagttggcctgttagactgcgccttaaacagtgtcacagcagattcagagataaacagtttaccaacaatctctgctttgaaatttaatggtgccttgaccatggcagttggaacaaccacagggcaggttttattatatgaccttcgatctgataagccattgctagttaaagatcaccagtatgggctgcccattaagtccgttcatttccaggattcattagatctgattttgtctgctgactctcgaattgtcaagatgtggaataagaactccggaaaaatatttacttccttggagccagagcatgaccttaatgatgtttgtctctaccccaactcaggcatgcttctgacggccaatgaaacccccaagatgggcatctattacattccagttttgggtcctgctcctcggtggtgttccttcttagacaacttgaccgaagaattagaagagaatccagaaagcacagtctatgatgattataaatttgtcaccaagaaagaccttgaaaatttagggctcacccacctcattggatctcctttcctccgggcatatatgcatgggtttttcatggatataagactctatcacaaggtgaaactgatggtaaatccatttgcttatgaagaatataggaaagataaaatacgacagaaaatagaagaaacacgtgcacagagagtccagttaaagaaattgccaaaagttaacaaagagctggcacttaaattaattgaggaagaagaggagaagcagaaatctacatggaaaaagaaagttaagagtcttcctaatattctcaccgatgatcgatttaaagttatgtttgagaaccctgacttccaagtagatgaagagagtgaagaatttaggcttctgaatccacttgtttcaaaaattagtgaaaaaaggaagaagaaactaagactcttagagcaacaagaacttcgtgaaaaagaagaggaggaagagccggaaggaaaaccaagtgatgcagaaagttcggagagttcagatgatgaaaaagcctgggttgaagaggtcaggaagcaacgcagactcctccagcaggaggaaaaagtgaagcggcaggaacgactcaaggaggaccagcagacagtcctaaagccccagttttatgagatcaaagcaggagaagaatttagaagcttcaaagattctgccacaaagcagaaactgatgaacaaaacccttgaagatcgtttgaaaattgaagcaaaaaatgggacattgagtgtatccgacaccaccgttggcagcaaacaattgacattcacgttaaagaggtctgaacagcagaagaagcaacaggaggctgagaaactgcatcgacaagaaaggaaaagactccgtcgttcggccggacacctgaagtcaagacacaaaagaggacggtcgtttcattgatttgggaagtggtcctacctgtgattagggaggggtacgtctcccccaaactgatcatcgttagggtgttaaacacagacgaggaaacacacgtttttaaagttcatgtacgttcttgtacacagaggtaaagatttgaaaacctgtgccttgtgggttggactacccccgggtcnanctcgagtcgtat

SEQ ID NO: 434129 - DNA, 1816 bp, Homo sapiens
ggcacggcgccagcggccgcacgccgcggagcaggggctcggaggtcccgggattacggtgctcgagcacgctggtgggaaaggacccgggacttgaacagtgttgtgcggcgccatgcaggtctccagcctcaatgaggtgaagatttacagcctcagctgcggcaagtcccttcctgagtggctttctgataggaagaagagagcgctacagaagaaagatgtagatgtccgtaggagaattgaacttattcaggactttgaaatgcctactgtgtgtaccactattaaggtgtcaaaagatggacagtacattttagcaactggaacatataaacctcgggttcgatgttatgacacctatcaattatccttgaagtttgaaaggtgtttagattcagaagttgtcacctttgaaattttgtctgatgactactcaaagattgtcttcttacataatgatagatacattgaatttcattcgcaatcaggtttttactacaaaaccagaataccaaagtttgggagagatttctcttaccactatccatcctgtgacttgtactttgttggtgcaagttctgaagtttataggttaaacttagaacaaggacgatacctgaatcctctacaaactgatgctgcggagaataatgtttgtgacataaattcagtgcatggcttgtttgccacaggaaccatagagggtagagtggagtgctgggacccaagaactcgaaacagagttggcctgttagactgcgccttaaacagtgtcacagcagattcagagataaacagtttaccaacaatctctgctttgaaatttaatggtgccttgaccatggcagttggaacaaccacagggcaggttttattatatgaccttcgatctgataagccattgctagttaaagatcaccagtatgggctgcccattaagtccgttcatttccaggattcattagatctgattttgtctgctgactctcgaattgtcaagatgtggaataagaactccggaaaaatatttacttccttggagccagagcatgaccttaatgatgtttgtctctaccccaactcaggcatgcttctgacggccaatgaaacccccaagatgggcatctattacattccagttttgggtcctgctcctcggtggtgttccttcttagacaacttgaccgaagaattagaagagaatccagaaagcacagtctatgatgattataaatttgtcaccaagaaagaccttgaaaatttagggctcacccacctcattggatctcctttcctccgggcatatatgcatgggtttttcatggatataagactctatcacaaggtgaaactgatggtaaatccatttgcttatgaagaatataggaaagataaaatacgacagaaaatagaagaaacacgtgcacagagagtccagttaaagaaattgccaaaagttaacaaagagctggcacttaaattaattgaggaagaagaggagaagcagaaatctacatggaaaaagaaagttaagagtcttcctaatattctcaccgatgatcgatttaaagttatgtttgagaaccctgacttccaagtagatgaagagagtgaagaatttaggcttctgaatccacttgtttcaaaaattagtgaaaaaaggaagaagaaactaagactcttagagcaacaagaacttcgtgaaaaagaagaggaggaagagccggaaggaaaaccaagtgatgcagaaagttcggagagctcttactgcccaggctggagtagctcttctgcagcgggtccccaggttacc

SEQ ID NO: 434130 - DNA, 545 bp, Homo sapiens
gtgccatgtaaatgaagggcgtttgtttcaagtctttaattagtatgtaaggtttgcagaaaagctatcaggatacaggaaggcattaaggagccgatggagtgttttcattcttaatcccagtggagtgtgtgtgcatggacatgtgtgtttagatacagaaagtgagagagaggtaagggttttccttggtttgccagttttttagcgataatgaagtaaacacctaactagaaacctaagcaaactaatttttttgttttattttcagattgtcttcttacataatgatagatacattgaatttcattcgcaatcaggtttttactacaaaaccagaataccaaagtttgggagagatttctcttaccactatccatcctgtgacttgtactttgttggtgcaaggtattggatccagtccctttttctccttttcacctcctaaaacaaccaacttctgttcctaaatttcgtgtacattttctctgtttaggtaacttgctttaataaaaaagtgatacgtggctcttgtaaaaaaaaaa

SEQ ID NO: 434131 - DNA, 2461 bp, Homo sapiens
ggcacggcgccagcggccgcacgccgcggagcaggggctcggaggtcccgggattacggtgctcgagcacgctggtgggaaaggacccgggacttgaacagtgttgtgcggcgccatgcaggtctccagcctcaatgaggtgaagatttacagcctcagctgcggcaagtcccttcctgagtggctttctgataggaagaagagagcgctacagaagaaagatgtagatgtccgtaggagaattgaacttattcaggactttgaaatgcctactgtgtgtaccactattaaggtgtcaaaagatggacagtacattttagcaactggaacatataaacctcgggttcgatgttatgacacctatcaattatccttgaagtttgaaaggtgtttagattcagaagttgtcacctttgaaattttgtctgatgactactcaaagttctgaagtttataggttaaacttagaacaaggacgatacctgaatcctctacaaactgatgctgcggagaataatgtttgtgacataaattcagtgcatggcttgtttgccacaggaaccatagagggtagagtggagtgctgggacccaagaactcgaaacagagttggcctgttagactgcgccttaaacagtgtcacagcagattcagagataaacagtttaccaacaatctctgctttgaaatttaatggtgccttgaccatggcagttggaacaaccacagggcaggttttattatatgaccttcgatctgataagccattgctagttaaagatcaccagtatgggctgcccattaagtccgttcatttccaggattcattagatctgattttgtctgctgactctcgaattgtcaagatgtggaataagaactccggaaaaatatttacttccttggagccagagcatgaccttaatgatgtttgtctctaccccaactcaggcatgcttctgacggccaatgaaacccccaagatgggcatctattacattccagttttgggtcctgctcctcggtggtgttccttcttagacaacttgaccgaagaattagaagagaatccagaaagcacagtctatgatgattataaatttgtcaccaagaaagaccttgaaaatttagggctcacccacctcattggatctcctttcctccgggcatatatgcatgggtttttcatggatataagactctatcacaaggtgaaactgatggtaaatccatttgcttatgaagaatataggaaagataaaatacgacagaaaatagaagaaacacgtgcacagagagtccagttaaagaaattgccaaaagttaacaaagagctggcacttaaattaattgaggaagaagaggagaagcagaaatctacatggaaaaagaaagttaagagtcttcctaatattctcaccgatgatcgatttaaagttatgtttgagaaccctgacttccaagtagatgaagagagtgaagaatttaggcttctgaatccacttgtttcaaaaattagtgaaaaaaggaagaagaaactaagactcttagagcaacaagaacttcgtgaaaaagaagaggaggaagagccggaaggaaaaccaagtgatgcagaaagttcggagagttcagatgatgaaaaagcctgggttgaagaggtcaggaagcaacgcagactcctccagcaggaggaaaaagtgaagcggcaggaacgactcaaggaggaccagcagacagtcctaaagccccagttttatgagatcaaagcaggagaagaatttagaagcttcaaagattctgccacaaagcagaaactgatgaacaaaacccttgaagatcgtttgaaaattgaagcaaaaaatgggacattgagtgtatccgacaccaccgttggcagcaaacaattgacattcacgttaaagaggtctgaacagcagaagaagcaacaggaggctgagaaactgcatcgacaagaaaggaaaagactccgtcgttcggccggacacctgaagtcaagacacaaaagaggacggtcgtttcattgatttgggaagtggtcctacctgtgattagggaggggtacgtctcccccaaactgatcatcgttagggtgttaaacacagacgaggaaacacacgtttttaaagttcatgtacgttcttgtacacagaggtaaagatttgaaaacctgtgccttgtgggttggactttgaagctggccccgccgacggccaccgcacagccccaggggtgtgcttgcgagtcgttgctccctggaaacattgtcctttccccacggctttaatcatgaaaaccaggctggggtttttttaatattgtgaaatgtacaccatgaaatgaaaggtttatcctgtgccagaaaccaaggtttatcatgctctaggaacttttttcttacactgcctaccgccattcatgattaaaccatccagaaatacca

SEQ ID NO: 434132 - DNA, 1514 bp, Homo sapiens
ccctccctctttcatccctcctcttactgtttctcttctcctaatagaggagattccgttttgggtcctgctcctcggtggtgttccttcttagacaacttgaccgaagaattagaagagaatccagaaagcacagtctatgatgattataaatttgtcaccaagaaagaccttgaaaatttagggctcacccacctcattggatctcctttcctccgggcatatatgcatgggtttttcatggatataagactctatcacaaggtgaaactgatggtaaatccatttgcttatgaagaatataggaaagataaaatacgacagaaaatagaagaaacacgtgcacagagagtccagttaaagaaattgccaaaagttaacaaagagctggcacttaaattaattgaggaagaagaggagaagcagaaatctacatggaaaaagaaagttaagagtcttcctaatattctcaccgatgatcgatttaaagttatgtttgagaaccctgacttccaagtagatgaagagagtgaagaatttaggcttctgaatccacttgtttcaaaaattagtgaaaaaaggaagaagaaactaagactcttagagcaacaagaacttcgtgaaaaagaagaggaggaagagccggaaggaaaaccaagtgatgcagaaagttcggagagttcagatgatgaaaaagcctgggttgaagaggtcaggaagcaacgcagactcctccagcaggaggaaaaagtgaagcggcaggaacgactcaaggaggaccagcagacagtcctaaagccccagttttatgagatcaaagcaggagaagaatttagaagcttcaaagattctgccacaaagcagaaactgatgaacaaaacccttgaagatcgtttgaaaattgaagcaaaaaatgggacattgagtgtatccgacaccaccgttggcagcaaacaattgacattcacgttaaagaggtctgaacagcagaagaagcaacaggaggctgagaaactgcatcgacaagaaaggaaaagactccgtcgttcggccggacacctgaagtcaagacacaaaagaggacggtcgtttcattgatttgggaagtggtcctacctgtgattagggaggggtacgtctcccccaaactgatcatcgttagggtgttaaacacagacgaggaaacacacgtttttaaagttcatgtacgttcttgtacacagaggtaaagatttgaaaacctgtgccttgtgggttggactttgaagctggccccgccgacggccaccgcacagccccaggggtgtgcttgcgagtcgttgctccctggaaacattgtcctttccccacggctttaatcatgaaaaccaggctggggtttttttaatattgtgaaatgtacaccatgaaatgaaaggtttatcctgtgccagaaaccaaggtttatcatgctctaggaacttttttcttacactgcctaccgccattcatgattaaaccatccagaaatacca

SEQ ID NO: 434133 - DNA, 978 bp, Homo sapiens
  misc_feature (23)..(23): n is a, c, g, or t
tgacatgatacgactcgagtctnagacccgggagtagtccaaaaggaagaagaaactaagactcttagagcaacaagaacttcgtgaaaaagaagaggaggaagagccggaaggaaaaccaagtgatgcagaaagttcggagagttcagatgatgaaaaagcctgggttgaagaggtcaggaagcaacgcagactcctccagcaggaggaaaaagtgaagcggcaggaacgactcaaggaggaccagcagacagtcctaaagccccagttttatgagatcaaagcaggagaagaatttagaagcttcaaagattctgccacaaagcagaaactgatgaacaaaacccttgaagatcgtttgaaaattgaagcaaaaaatgggacattgagtgtatccgacaccaccgttggcagcaaacaattgacattcacgttaaagaggtctgaacagcagaagaagcaacaggaggctgagaaactgcatcgacaagaaaggaaaagactccgtcgttcggccggacacctgaagtcaagacacaaaagaggacggtcgtttcattgatttgggaagtggtcctacctgtgattagggaggggtacgtctcccccaaactgatcatcgttagggtgttaaacacagacgaggaaacacacgtttttaaagttcatgtacgttcttgtacacagaggtaaagatttgaaaacctgtgccttgtgggttggactttgaagctggccccgccgacggccaccgcacagccccaggggtgtgcttgcgagtcgttgctccctggaaacattgtcctttccccacggctttaatcatgaaaaccaggctggggtttttttaatattgtgaaatgtacaccatgaaatgaaaggtttatcctgtgccagaaaccaaggtttatcatgctctaggaacttttttcttacactgcctaccgccattcatgattaaaccatccagaaatacca

SEQ ID NO: 434134 - DNA, 1610 bp, Homo sapiens
gcgcaggcggggcgcaggcgcgggcgcgctctcccggcagcccgcgctccctgaccccgcgccgccgagcgccctgaggactcagcgaagggtgggcgccgccgaggcctcctgccgctggcgggtttccgcggagtgccgcccggctccgctctgccgccggcgcggctcatgggcagagtcggccgggcgggccggcattaaactgaagaaaagatgtccctgtacgatgacctaggagtggagaccagtgactcaaaaacagaaggctggtccaaaaacttcaaacttctgcagtctcagcttcaggtgaagaaggcagctctcactcaggcaaagagccaaaggacgaaacaaagtacagtcctcgccccagtcattgacctgaagcgaggtggctcctcagatgaccggcaaattgtggacactccaccgcatgtagcagctgggctgaaggatcctgttcccagtgggttttctgcaggggaagttctgattcccttagctgacgaatatgaccctatgtttcctaatgattatgagaaagtagtgaagcgccaaagagaggaacgacagagacagcgggagctggaaagacaaaaggaaatagaagaaagggaaaaaaggcgtaaagacagacatgaagcaagtgggtttgcaaggagaccagatccagattctgatgaagatgaagattatgagcgagagaggaggaaaagaagtatgggcggagctgccattgccccacccacttctctggtagagaaagacaaagagttaccccgagattttccttatgaagaggactcaagacctcgatcacagtcttccaaagcagccattcctcccccagtgtacgaggaacaagacagaccgagatctccaaccggacctagcaactccttcctcgctaacatggggggcacggtggcgcacaagatcatgcagaagtacggcttccgggagggccagggtctggggaagcatgagcagggcctgagcactgccttgtcagtggagaagaccagcaagcgtggcggcaagatcatcgtgggcgacgccacagagaaagatgcatccaagaagtcagattcaaatccgctgactgaaatacttaagtgtcctactaaagtggtcttactaaggaacatggttggtgcgggagaggtggatgaagacttggaagttgaaaccaaggaagaatgtgaaaaatatggcaaagttggaaaatgtgtgatatttgaaattcctggtgcccctgatgatgaagcagtacggatatttttagaatttgagagagttgaatcagcaattaaagcggttgttgacttgaatgggaggtattttggtggacgggtggtaaaagcatgtttctacaatttggacaaattcagggtcttggatttggcagaacaagtttgattttaagaactagagcacgagtcatctccggtgatccttaaatgaactgcaggctgagaaaagaaggaaaaaggtcacagcctccatggctgttgcataccaagactcttggaaggacttctaagatatatgttgattgatcccttttttattttgtggttttttaatatagtataaaaatcctttta

SEQ ID NO: 434135 - DNA, 2695 bp, Homo sapiens
gcgcaggcggggcgcaggcgcgggcgcgctctcccggcagcccgcgctccctgaccccgcgccgccgagcgccctgaggactcagcgaagggtgggcgccgccgaggcctcctgccgctggcgggtttccgcggagtgccgcccggctccgctctgccgccggcgcggctcatgggcagagtcggccgggcgggccggcattaaactgaagaaaagatgtccctgtacgatgacctaggagtggagaccagtgactcaaaaacagaaggctggtccaaaaacttcaaacttctgcagtctcagcttcaggtgaagaaggcagctctcactcaggcaaagagccaaaggacgaaacaaagtacagtcctcgccccagtcattgacctgaagcgaggtggctcctcagatgaccggcaaattgtggacactccaccgcatgtagcagctgggctgaaggatcctgttcccagtgggttttctgcaggggaagttctgattcccttagctgacgaatatgaccctatgtttcctaatgattatgagaaagtagtgaagcgccaaagagaggaacgacagagacagcgggagctggaaagacaaaaggaaatagaagaaagggaaaaaaggcgtaaagacagacatgaagcaagtgggtttgcaaggagaccagatccagattctgatgaagatgaagattatgagcgagagaggaggaaaagaagtatgggcggagctgccattgccccacccacttctctggtagagaaagacaaagagttaccccgagattttccttatgaagaggactcaagacctcgatcacagtcttccaaagcagccattcctcccccagtgtacgaggaacaagacagaccgagatctccaaccggacctagcaactccttcctcgctaacatggggggcacggtggcgcacaagatcatgcagaagtacggcttccgggagggccagggtctggggaagcatgagcagggcctgagcactgccttgtcagtggagaagaccagcaagcgtggcggcaagatcatcgtgggcgacgccacagagaaagatgcatccaagaagtcagattcaaatccgctgactgaaatacttaagtgtcctactaaagtggtcttactaaggaacatggttggtgcgggagaggtggatgaagacttggaagttgaaaccaaggaagaatgtgaaaaatatggcaaagttggaaaatgtgtgatatttgaaattcctggtgcccctgatgatgaagcagtacggatatttttagaatttgagagagttgaatcagcaattaaagcggttgttgacttgaatgggaggtattttggtggacgggtggtaaaagcatgtttctacaatttggacaaattcagggtcttggatttggcagaacaagtttgattttaagaactagagcacgagtcatctccggtgatccttaaatgaactgcaggctgagaaaagaaggaaaaaggtcacagcctccatggctgttgcataccaagactcttggaaggacttctaagatatatgttgattgatcccttttttattttgtggttttttaatatagtataaaaatccttttaaaaaaacaacaatctgtgtgcctctctggttgtttctcttttttattattactcctgagttgatgacattttttgttagatttcatggtaattctcaagtgcttcaatgatgcagcatttcttgcactaaaaaaaaaaaaaaaaaaactagaaagttttgggacatggggttatattaaattattctttgtttttctttttcttttaataaagcctgcaagttactaaattgtagtttcataaattctgtagtaaagtatcatcttggcagtgtgccaaaggtgaaaatgatgctttctctaacagagaaattcttagtgactccagtcgtagaaaaacgtctttacaacctgaataagattgaagaattgtgaacataccatggcctattggatgaatcatttgccgtaggctaaatcagactgtagggtttgtgatggatttatggagtatgtgggtatagaaatcatgaatctagcatttgttttcagagattcaagcatagtcttaagggtagatcagaaatgacaaatgaattcaaaacctagcaggtgcattgtaaatgtgtgcccagttatgttttggaaatggcagttccttggggtcatgtttctactggcaaaatttgcaatagtgttctattgtatgtaattttaaaatttataagattatccacgttggccaagtaaactgtactgccaatagaattctggaattgtgagaaattgtatcattgaagttcagtaggatgtgtggcttaaaaatttatcaggaccacaaaaaagaaaacaaaaatatttggtactgaggttcattgccagggcaggaggtatttccagaaaatactcatgcctgtgttctgttccttgctttcccaaatactgcatgtgactttcctaagcggcagctgaaagactcgagcccgtgctgtctcctttggttattatgacatgaaagtgtatcaagaactcagcatttctttgcatccatggacttggtttggagacataaggaatattctgaccctttttaaaaaaggattttctcatgtttttatttaacataaataaaagaataacatttta

SEQ ID NO: 434136 - DNA, 2744 bp, Homo sapiens
gcgcaggcggggcgcaggcgcgggcgcgctctcccggcagcccgcgctccctgaccccgcgccgccgagcgccctgaggactcagcgaagggtgggcgccgccgaggcctcctgccgctggcgggtttccgcggagtgccgcccggctccgctctgccgccggcgcggctcatgggcagagtcggccgggcgggccggcattaaactgaagaaaagatgtccctgtacgatgacctaggagtggagaccagtgactcaaaaacagaaggctggtccaaaaacttcaaacttctgcagtctcagcttcaggtgaagaaggcagctctcactcaggcaaagagccaaaggacgaaacaaagtacagtcctcgccccagtcattgacctgaagcgaggtggctcctcagatgaccggcaaattgtggacactccaccgcatgtagcagctgggctgaaggatcctgttcccagtgggttttctgcaggggaagttctgattcccttagctgacgaatatgaccctatgtttcctaatgattatgagaaagtagtgaagcgccaaagagaggaacgacagagacagcgggagctggaaagacaaaaggaaatagaagaaagggaaaaaaggcgtaaagacagacatgaagcaagtgggtttgcaaggagaccagatccagattctgatgaagatgaagattatgagcgagagaggaggaaaagaagtatgggcggagctgccattgccccacccacttctctggtagagaaagacaaagagttaccccgagattttccttatgaagaggactcaagacctcgatcacagtcttccaaagcagccattcctcccccagtgtacgaggaacaagacagaccgagatctccaaccggacctagcaactccttcctcgctaacatggggggcacggtggcgcacaagatcatgcagaagtacggcttccgggagggccagggtctggggaagcatgagcagggcctgagcactgccttgtcagtggagaagaccagcaagcgtggcggcaagatcatcgtgggcgacgccacagagaaagatgcatccaagaagtcagattcaaatccgctgactgaaatacttaagtgtcctactaaagtggtcttactaaggaacatggttggtgcgggagaggtggatgaagacttggaagttgaaaccaaggaagaatgtgaaaaatatggcaaagttggaaaatgtgtgatatttgaaattcctggtgcccctgatgatgaagcagtacggatatttttagaatttgagagagttgaatcagcaattaaagcggttgttgacttgaatgggaggtattttggtggacgggtggtaaaagcatgtttctacaatttggacaaattcagggtcttggatttggcagaacaagtttgattttaagaactagagcacgagtcatctccggtgatccttaaatgaactgcaggctgagaaaagaaggaaaaaggtcacagcctccatggctgttgcataccaagactcttggaaggacttctaagatatatgttgattgatcccttttttattttgtggttttttaatatagtataaaaatccttttaaaaaaacaacaatctgtgtgcctctctggttgtttctcttttttattattactcctgagttgatgacattttttgttagatttcatggtaattctcaagtgcttcaatgatgcagcatttcttgcactaaaaaaaaaaaaaaaaaaactagaaagttttgggacatggggttatattaaattattctttgtttttctttttcttttaataaagcctgcaagttactaaattgtagtttcataaattctgtagtaaagtatcatcttggcagtgtgccaaaggtgaaaatgatgctttctctaacagagaaattcttagtgactccagtcgtagaaaaacgtctttacaacctgaataagattgaagaattgtgaacataccatggcctattggatgaatcatttgccgtaggctaaatcagactgtagggtttgtgatggatttatggagtatgtgggtatagaaatcatgaatctagcatttgttttcagagattcaagcatagtcttaagggtagatcagaaatgacaaatgaattcaaaacctagcaggtgcattgtaaatgtgtgcccagttatgttttggaaatggcagttccttggggtcatgtttctactggcaaaatttgcaatagtgttctattgtatgtaattttaaaatttataagattatccacgttggccaagtaaactgtactgccaatagaattctggaattgtgagaaattgtatcattgaagttcagtaggatgtgtggcttaaaaatttatcaggaccacaaaaaagaaaacaaaaatatttggtactgaggttcattgccagggcaggaggtatttccagaaaatactcatgcctgtgttctgttccttgctttcccaaatactgcatgtgactttcctaagcggcagctgaaagactcgagcccgtgctgtctcctttggttattatgacatgaaagtgtatcaagaactcagcatttctttgcatccatggacttggtttggagacataaggaatattctgaccctttttaaaaaaggattttctcatgtttttatttaacataaataaaagaataacattttatcttttgtggtattattttattgaataaaattgagttttatgataaaag

SEQ ID NO: 434137 - DNA, 3402 bp, Homo sapiens
gcgcaggcggggcgcaggcgcgggcgcgctctcccggcagcccgcgctccctgaccccgcgccgccgagcgccctgaggactcagcgaagggtgggcgccgccgaggcctcctgccgctggcgggtttccgcggagtgccgcccggctccgctctgccgccggcgcggctcatgggcagagtcggccgggcgggccggcattaaactgaagaaaagatgtccctgtacgatgacctaggagtggagaccagtgactcaaaaacagaaggctggtccaaaaacttcaaacttctgcagtctcagcttcaggtgaagaaggcagctctcactcaggcaaagagccaaaggacgaaacaaagtacagtcctcgccccagtcattgacctgaagcgaggtggctcctcagatgaccggcaaattgtggacactccaccgcatgtagcagctgggctgaaggatcctgttcccagtgggttttctgcaggggaagttctgattcccttagctgacgaatatgaccctatgtttcctaatgattatgagaaagtagtgaagcgccaaagagaggaacgacagagacagcgggagctggaaagacaaaaggaaatagaagaaagggaaaaaaggcgtaaagacagacatgaagcaagtgggtttgcaaggagaccagatccagattctgatgaagatgaagattatgagcgagagaggaggaaaagaagtatgggcggagctgccattgccccacccacttctctggtagagaaagacaaagagttaccccgagattttccttatgaagaggactcaagacctcgatcacagtcttccaaagcagccattcctcccccagtgtacgaggaacaagacagaccgagatctccaaccggacctagcaactccttcctcgctaacatggggggcacggtggcgcacaagatcatgcagaagtacggcttccgggagggccagggtctggggaagcatgagcagggcctgagcactgccttgtcagtggagaagaccagcaagcgtggcggcaagatcatcgtgggcgacgccacagagaaaggtgtgtccccagggaagcgtgtgactagagggaaaggactggccccatccatatcagacatggccagtcttgatcctcatgtgtcagcagggggacaatgaggcgtgtggccagagggagagggctggccctgccatcactagaacacaggccgtcctgttcatatgatgcactgccacttccgttttgtgaaaccaggaatcctgaggctcatctttattttttcagaacagacgtagagagatgaaggcttgtggaggaaaagatggtgagagacttgggcagaaaatgagtagtcctcaggaagaaatcttggttatgtgtttagagcatgaaggacagagccatatagtgtggcagtgaatatacctgctatctccatctcagaggtcgtctctacttttcccttttgccctttcagtatagatgtgatttctgattctcttacagattgtttgctttgcgagatctgatgttatgttgcagtctcttggtaaatgatgcctagttggtgttttattttcatttaatttttacagtctgttctgtgttgagggaattcaggaaagagacaaacatatgttagcattttaatcagggaattaagtttgagtcagcctagctgaacttcctttgctaaagaaagaagaaaacttttctggcagccccgttcatgcacagcttaggatacatcacgagcctgacagatgcatccaagaagtcagattcaaatccgctgactgaaatacttaagtgtcctactaaagtggtcttactaaggaacatggttggtgcgggagaggtggatgaagacttggaagttgaaaccaaggaagaatgtgaaaaatatggcaaagttggaaaatgtgtgatatttgaaattcctggtgcccctgatgatgaagcagtacggatatttttagaatttgagagagttgaatcagcaattaaagcggttgttgacttgaatgggaggtattttggtggacgggtggtaaaagcatgtttctacaatttggacaaattcagggtcttggatttggcagaacaagtttgattttaagaactagagcacgagtcatctccggtgatccttaaatgaactgcaggctgagaaaagaaggaaaaaggtcacagcctccatggctgttgcataccaagactcttggaaggacttctaagatatatgttgattgatcccttttttattttgtggttttttaatatagtataaaaatccttttaaaaaaacaacaatctgtgtgcctctctggttgtttctcttttttattattactcctgagttgatgacattttttgttagatttcatggtaattctcaagtgcttcaatgatgcagcatttcttgcactaaaaaaaaaaaaaaaaaaactagaaagttttgggacatggggttatattaaattattctttgtttttctttttcttttaataaagcctgcaagttactaaattgtagtttcataaattctgtagtaaagtatcatcttggcagtgtgccaaaggtgaaaatgatgctttctctaacagagaaattcttagtgactccagtcgtagaaaaacgtctttacaacctgaataagattgaagaattgtgaacataccatggcctattggatgaatcatttgccgtaggctaaatcagactgtagggtttgtgatggatttatggagtatgtgggtatagaaatcatgaatctagcatttgttttcagagattcaagcatagtcttaagggtagatcagaaatgacaaatgaattcaaaacctagcaggtgcattgtaaatgtgtgcccagttatgttttggaaatggcagttccttggggtcatgtttctactggcaaaatttgcaatagtgttctattgtatgtaattttaaaatttataagattatccacgttggccaagtaaactgtactgccaatagaattctggaattgtgagaaattgtatcattgaagttcagtaggatgtgtggcttaaaaatttatcaggaccacaaaaaagaaaacaaaaatatttggtactgaggttcattgccagggcaggaggtatttccagaaaatactcatgcctgtgttctgttccttgctttcccaaatactgcatgtgactttcctaagcggcagctgaaagactcgagcccgtgctgtctcctttggttattatgacatgaaagtgtatcaagaactcagcatttctttgcatccatggacttggtttggagacataaggaatattctgaccctttttaaaaaaggattttctcatgtttttatttaacataaataaaagaataacatttta

SEQ ID NO: 434138 - DNA, 2836 bp, Homo sapiens
gcgcaggcggggcgcaggcgcgggcgcgctctcccggcagcccgcgctccctgaccccgcgccgccgagcgccctgaggactcagcgaagggtgggcgccgccgaggcctcctgccgctggcgggtttccgcggagtgccgcccggctccgctctgccgccggcgcggctcatgggcagagtcggccgggcgggccggcattaaactgaagaaaagatgtccctgtacgatgacctaggagtggagaccagtgactcaaaaacagaaggctggtccaaaaacttcaaacttctgcagtctcagcttcaggtgaagaaggcagctctcactcaggcaaagagccaaaggacgaaacaaagtacagtcctcgccccagtcattgacctgaagcgaggtggctcctcagatgaccggcaaattgtggacactccaccgcatgtagcagctgggctgaaggatcctgttcccagtgggttttctgcaggggaagttctgattcccttagctgacgaatatgaccctatgtttcctaatgattatgagaaagtagtgaagcgccaaagagaggaacgacagagacagcgggagctggaaagacaaaaggaaatagaagaaagggaaaaaaggcgtaaagacagacatgaagcaagtgggtttgcaaggagaccagatccagattctgatgaagatgaagattatgagcgagagaggaggaaaagaagtatgggcggagctgccattgccccacccacttctctggtagagaaagacaaagagttaccccgagattttccttatgaagaggactcaagacctcgatcacagtcttccaaagcagccattcctcccccagtgtacgaggaacaagacagaccgagatctccaaccggacctagcaactccttcctcgctaacatggggggcacggtggcgcacaagatcatgcagaagtacggcttccgggagggccagggtctggggaagcatgagcagggcctgagcactgccttgtcagtggagaagaccagcaagcgtggcggcaagatcatcgtgggcgacgccacagagaaagatgcatccaagaagtcagattcaaatccgctgactgaaatacttaagtgtcctactaaagtggtcttactaaggaacatggttggtgcgggagaggtggatgaagacttggaagttgaaaccaaggaagaatgtgaaaaatatggcaaagttggaaaatgtgtgatatttgaaattcctggtgcccctgatgatgaagcagtacggatatttttagaatttgagagagttgaatcagcaattaaaggttagtggtacagctaaatattaaagaataaaaaagttgaatttacagccttaatctttacaagtaaagttactgtttaattaaagttaaacctttatcttataggatacctgtattaactgtcttttgtttgcctttcagcggttgttgacttgaatgggaggtattttggtggacgggtggtaaaagcatgtttctacaatttggacaaattcagggtcttggatttggcagaacaagtttgattttaagaactagagcacgagtcatctccggtgatccttaaatgaactgcaggctgagaaaagaaggaaaaaggtcacagcctccatggctgttgcataccaagactcttggaaggacttctaagatatatgttgattgatcccttttttattttgtggttttttaatatagtataaaaatccttttaaaaaaacaacaatctgtgtgcctctctggttgtttctcttttttattattactcctgagttgatgacattttttgttagatttcatggtaattctcaagtgcttcaatgatgcagcatttcttgcactaaaaaaaaaaaaaaaaaaactagaaagttttgggacatggggttatattaaattattctttgtttttctttttcttttaataaagcctgcaagttactaaattgtagtttcataaattctgtagtaaagtatcatcttggcagtgtgccaaaggtgaaaatgatgctttctctaacagagaaattcttagtgactccagtcgtagaaaaacgtctttacaacctgaataagattgaagaattgtgaacataccatggcctattggatgaatcatttgccgtaggctaaatcagactgtagggtttgtgatggatttatggagtatgtgggtatagaaatcatgaatctagcatttgttttcagagattcaagcatagtcttaagggtagatcagaaatgacaaatgaattcaaaacctagcaggtgcattgtaaatgtgtgcccagttatgttttggaaatggcagttccttggggtcatgtttctactggcaaaatttgcaatagtgttctattgtatgtaattttaaaatttataagattatccacgttggccaagtaaactgtactgccaatagaattctggaattgtgagaaattgtatcattgaagttcagtaggatgtgtggcttaaaaatttatcaggaccacaaaaaagaaaacaaaaatatttggtactgaggttcattgccagggcaggaggtatttccagaaaatactcatgcctgtgttctgttccttgctttcccaaatactgcatgtgactttcctaagcggcagctgaaagactcgagcccgtgctgtctcctttggttattatgacatgaaagtgtatcaagaactcagcatttctttgcatccatggacttggtttggagacataaggaatattctgaccctttttaaaaaaggattttctcatgtttttatttaacataaataaaagaataacatttta

SEQ ID NO: 434139 - DNA, 2635 bp, Homo sapiens
aatggtaccaggagcctgggcctctgttgctgaaaggtcctggaccttttacctctaaaatttcatgatacttattttaacatgaaaagcctttattgaattgtgcattctttaatccccaccccttttgcctttcagcattaaactgaagaaaagatgtccctgtacgatgacctaggagtggagaccagtgactcaaaaacagaaggctggtccaaaaacttcaaacttctgcagtctcagcttcaggtgaagaaggcagctctcactcaggcaaagagccaaaggacgaaacaaagtacagtcctcgccccagtcattgacctgaagcgaggtggctcctcagatgaccggcaaattgtggacactccaccgcatgtagcagctgggctgaaggatcctgttcccagtgggttttctgcaggggaagttctgattcccttagctgacgaatatgaccctatgtttcctaatgattatgagaaagtagtgaagcgccaaagagaggaacgacagagacagcgggagctggaaagacaaaaggaaatagaagaaagggaaaaaaggcgtaaagacagacatgaagcaagtgggtttgcaaggagaccagatccagattctgatgaagatgaagattatgagcgagagaggaggaaaagaagtatgggcggagctgccattgccccacccacttctctggtagagaaagacaaagagttaccccgagattttccttatgaagaggactcaagacctcgatcacagtcttccaaagcagccattcctcccccagtgtacgaggaacaagacagaccgagatctccaaccggacctagcaactccttcctcgctaacatggggggcacggtggcgcacaagatcatgcagaagtacggcttccgggagggccagggtctggggaagcatgagcagggcctgagcactgccttgtcagtggagaagaccagcaagcgtggcggcaagatcatcgtgggcgacgccacagagaaagatgcatccaagaagtcagattcaaatccgctgactgaaatacttaagtgtcctactaaagtggtcttactaaggaacatggttggtgcgggagaggtggatgaagacttggaagttgaaaccaaggaagaatgtgaaaaatatggcaaagttggaaaatgtgtgatatttgaaattcctggtgcccctgatgatgaagcagtacggatatttttagaatttgagagagttgaatcagcaattaaagcggttgttgacttgaatgggaggtattttggtggacgggtggtaaaagcatgtttctacaatttggacaaattcagggtcttggatttggcagaacaagtttgattttaagaactagagcacgagtcatctccggtgatccttaaatgaactgcaggctgagaaaagaaggaaaaaggtcacagcctccatggctgttgcataccaagactcttggaaggacttctaagatatatgttgattgatcccttttttattttgtggttttttaatatagtataaaaatccttttaaaaaaacaacaatctgtgtgcctctctggttgtttctcttttttattattactcctgagttgatgacattttttgttagatttcatggtaattctcaagtgcttcaatgatgcagcatttcttgcactaaaaaaaaaaaaaaaaaaactagaaagttttgggacatggggttatattaaattattctttgtttttctttttcttttaataaagcctgcaagttactaaattgtagtttcataaattctgtagtaaagtatcatcttggcagtgtgccaaaggtgaaaatgatgctttctctaacagagaaattcttagtgactccagtcgtagaaaaacgtctttacaacctgaataagattgaagaattgtgaacataccatggcctattggatgaatcatttgccgtaggctaaatcagactgtagggtttgtgatggatttatggagtatgtgggtatagaaatcatgaatctagcatttgttttcagagattcaagcatagtcttaagggtagatcagaaatgacaaatgaattcaaaacctagcaggtgcattgtaaatgtgtgcccagttatgttttggaaatggcagttccttggggtcatgtttctactggcaaaatttgcaatagtgttctattgtatgtaattttaaaatttataagattatccacgttggccaagtaaactgtactgccaatagaattctggaattgtgagaaattgtatcattgaagttcagtaggatgtgtggcttaaaaatttatcaggaccacaaaaaagaaaacaaaaatatttggtactgaggttcattgccagggcaggaggtatttccagaaaatactcatgcctgtgttctgttccttgctttcccaaatactgcatgtgactttcctaagcggcagctgaaagactcgagcccgtgctgtctcctttggttattatgacatgaaagtgtatcaagaactcagcatttctttgcatccatggacttggtttggagacataaggaatattctgaccctttttaaaaaaggattttctcatgtttttatttaacataaataaaagaataacatttta

SEQ ID NO: 434140 - DNA, 2754 bp, Homo sapiens
gcgcaggcggggcgcaggcgcgggcgcgctctcccggcagcccgcgctccctgaccccgcgccgccgagcgccctgaggactcagcgaagggtgggcgccgccgaggcctcctgccgctggcgggtttccgcggagtgccgcccggctccgctctgccgccggcgcggctcatgggcagagtcggccgggcgggccggcattaaactgaagaaaagatgtccctgtacgatgacctaggagtggagaccagtgactcaaaaacagaaggctggtccaaaaacttcaaacttctgcagtctcagcttcaggtgaagaaggcagctctcactcaggcaaagagccaaaggacgaaacaaagtacagtcctcgccccagtcattgacctgaagcgaggtggctcctcagatgaccggcaaattgtggacactccaccgcatgtagcagctgggctgaaggatcctgttcccagtgggttttctgcaggggaagttctgattcccttagctgacgaatatgaccctatgtttcctaatgattatgagaaagtagtgaagcgccaaagagaggaacgacagagacagcgggagctggaaagacaaaaggaaatagaagaaagggaaaaaaggcgtaaagacagacatgaagcaagtgggtttgcaaggagaccagatccagattctgatgaagatgaagattatgagcgagagaggaggaaaagaagtatgggcggagctgccattgccccacccacttctctggtagagaaagacaaagagttaccccgagattttccttatgaagaggactcaagacctcgatcacagtcttccaaagcagccattcctcccccagtgtacgaggaacaagacagaccgagatctccaaccggacctagcaactccttcctcgctaacatggggggcacggtggcgcacaagatcatgcagaagtacggcttccgggagggccagggtctggggaagcatgagcagggcctgagcactgccttgtcagtggagaagaccagcaagcgtggcggcaagatcatcgtgggcgacgccacagagaaagatgcatccaagaagtcagattcaaatccgctgactgaaatacttaagtgtcctactaaagtggtcttactaaggaacatggttggtgcgggagaggtggatgaagacttggaagttgaaaccaaggaagaatgtgaaaaatatggcaaagttggaaaatgtgtgatatttgaaattcctggtgcccctgatgatgaagcagtacggatatttttagaatttgagagagttgaatcagcaattaaagcggttgttgacttgaatgggaggtattttggtggacgggtggtaaaagcatgtttctacaatttggacaaattcagggtcttggatttggcagaacaagtttgataaaaaaaaaacccccccaaaaagaaaggggggcgttttttttttttttttgggggaacctttaagaactagagcacgagtcatctccggtgatccttaaatgaactgcaggctgagaaaagaaggaaaaaggtcacagcctccatggctgttgcataccaagactcttggaaggacttctaagatatatgttgattgatcccttttttattttgtggttttttaatatagtataaaaatccttttaaaaaaacaacaatctgtgtgcctctctggttgtttctcttttttattattactcctgagttgatgacattttttgttagatttcatggtaattctcaagtgcttcaatgatgcagcatttcttgcactaaaaaaaaaaaaaaaaaaactagaaagttttgggacatggggttatattaaattattctttgtttttctttttcttttaataaagcctgcaagttactaaattgtagtttcataaattctgtagtaaagtatcatcttggcagtgtgccaaaggtgaaaatgatgctttctctaacagagaaattcttagtgactccagtcgtagaaaaacgtctttacaacctgaataagattgaagaattgtgaacataccatggcctattggatgaatcatttgccgtaggctaaatcagactgtagggtttgtgatggatttatggagtatgtgggtatagaaatcatgaatctagcatttgttttcagagattcaagcatagtcttaagggtagatcagaaatgacaaatgaattcaaaacctagcaggtgcattgtaaatgtgtgcccagttatgttttggaaatggcagttccttggggtcatgtttctactggcaaaatttgcaatagtgttctattgtatgtaattttaaaatttataagattatccacgttggccaagtaaactgtactgccaatagaattctggaattgtgagaaattgtatcattgaagttcagtaggatgtgtggcttaaaaatttatcaggaccacaaaaaagaaaacaaaaatatttggtactgaggttcattgccagggcaggaggtatttccagaaaatactcatgcctgtgttctgttccttgctttcccaaatactgcatgtgactttcctaagcggcagctgaaagactcgagcccgtgctgtctcctttggttattatgacatgaaagtgtatcaagaactcagcatttctttgcatccatggacttggtttggagacataaggaatattctgaccctttttaaaaaaggattttctcatgtttttatttaacataaataaaagaataacatttta

SEQ ID NO: 434141 - DNA, 2507 bp, Homo sapiens
ctatttccttttgtctttccagctcccgatgtccctgtacgatgacctaggagtggagaccagtgactcaaaaacagaaggctggtccaaaaacttcaaacttctgcagtctcagcttcaggtgaagaaggcagctctcactcaggcaaagagccaaaggacgaaacaaagtacagtcctcgccccagtcattgacctgaagcgaggtggctcctcagatgaccggcaaattgtggacactccaccgcatgtagcagctgggctgaaggatcctgttcccagtgggttttctgcaggggaagttctgattcccttagctgacgaatatgaccctatgtttcctaatgattatgagaaagtagtgaagcgccaaagagaggaacgacagagacagcgggagctggaaagacaaaaggaaatagaagaaagggaaaaaaggcgtaaagacagacatgaagcaagtgggtttgcaaggagaccagatccagattctgatgaagatgaagattatgagcgagagaggaggaaaagaagtatgggcggagctgccattgccccacccacttctctggtagagaaagacaaagagttaccccgagattttccttatgaagaggactcaagacctcgatcacagtcttccaaagcagccattcctcccccagtgtacgaggaacaagacagaccgagatctccaaccggacctagcaactccttcctcgctaacatggggggcacggtggcgcacaagatcatgcagaagtacggcttccgggagggccagggtctggggaagcatgagcagggcctgagcactgccttgtcagtggagaagaccagcaagcgtggcggcaagatcatcgtgggcgacgccacagagaaagatgcatccaagaagtcagattcaaatccgctgactgaaatacttaagtgtcctactaaagtggtcttactaaggaacatggttggtgcgggagaggtggatgaagacttggaagttgaaaccaaggaagaatgtgaaaaatatggcaaagttggaaaatgtgtgatatttgaaattcctggtgcccctgatgatgaagcagtacggatatttttagaatttgagagagttgaatcagcaattaaagcggttgttgacttgaatgggaggtattttggtggacgggtggtaaaagcatgtttctacaatttggacaaattcagggtcttggatttggcagaacaagtttgattttaagaactagagcacgagtcatctccggtgatccttaaatgaactgcaggctgagaaaagaaggaaaaaggtcacagcctccatggctgttgcataccaagactcttggaaggacttctaagatatatgttgattgatcccttttttattttgtggttttttaatatagtataaaaatccttttaaaaaaacaacaatctgtgtgcctctctggttgtttctcttttttattattactcctgagttgatgacattttttgttagatttcatggtaattctcaagtgcttcaatgatgcagcatttcttgcactaaaaaaaaaaaaaaaaaaactagaaagttttgggacatggggttatattaaattattctttgtttttctttttcttttaataaagcctgcaagttactaaattgtagtttcataaattctgtagtaaagtatcatcttggcagtgtgccaaaggtgaaaatgatgctttctctaacagagaaattcttagtgactccagtcgtagaaaaacgtctttacaacctgaataagattgaagaattgtgaacataccatggcctattggatgaatcatttgccgtaggctaaatcagactgtagggtttgtgatggatttatggagtatgtgggtatagaaatcatgaatctagcatttgttttcagagattcaagcatagtcttaagggtagatcagaaatgacaaatgaattcaaaacctagcaggtgcattgtaaatgtgtgcccagttatgttttggaaatggcagttccttggggtcatgtttctactggcaaaatttgcaatagtgttctattgtatgtaattttaaaatttataagattatccacgttggccaagtaaactgtactgccaatagaattctggaattgtgagaaattgtatcattgaagttcagtaggatgtgtggcttaaaaatttatcaggaccacaaaaaagaaaacaaaaatatttggtactgaggttcattgccagggcaggaggtatttccagaaaatactcatgcctgtgttctgttccttgctttcccaaatactgcatgtgactttcctaagcggcagctgaaagactcgagcccgtgctgtctcctttggttattatgacatgaaagtgtatcaagaactcagcatttctttgcatccatggacttggtttggagacataaggaatattctgaccctttttaaaaaaggattttctcatgtttttatttaacataaataaaagaataacatttta

SEQ ID NO: 434142 - DNA, 2379 bp, Homo sapiens
tgaaggctcctgctcaggcaaagagccaaaggacgaaacaaagtacagtcctcgccccagtcattgacctgaagcgaggtggctcctcagatgaccggcaaattgtggacactccaccgcatgtagcagctgggctgaaggatcctgttcccagtgggttttctgcaggggaagttctgattcccttagctgacgaatatgaccctatgtttcctaatgattatgagaaagtagtgaagcgccaaagagaggaacgacagagacagcgggagctggaaagacaaaaggaaatagaagaaagggaaaaaaggcgtaaagacagacatgaagcaagtgggtttgcaaggagaccagatccagattctgatgaagatgaagattatgagcgagagaggaggaaaagaagtatgggcggagctgccattgccccacccacttctctggtagagaaagacaaagagttaccccgagattttccttatgaagaggactcaagacctcgatcacagtcttccaaagcagccattcctcccccagtgtacgaggaacaagacagaccgagatctccaaccggacctagcaactccttcctcgctaacatggggggcacggtggcgcacaagatcatgcagaagtacggcttccgggagggccagggtctggggaagcatgagcagggcctgagcactgccttgtcagtggagaagaccagcaagcgtggcggcaagatcatcgtgggcgacgccacagagaaagatgcatccaagaagtcagattcaaatccgctgactgaaatacttaagtgtcctactaaagtggtcttactaaggaacatggttggtgcgggagaggtggatgaagacttggaagttgaaaccaaggaagaatgtgaaaaatatggcaaagttggaaaatgtgtgatatttgaaattcctggtgcccctgatgatgaagcagtacggatatttttagaatttgagagagttgaatcagcaattaaagcggttgttgacttgaatgggaggtattttggtggacgggtggtaaaagcatgtttctacaatttggacaaattcagggtcttggatttggcagaacaagtttgattttaagaactagagcacgagtcatctccggtgatccttaaatgaactgcaggctgagaaaagaaggaaaaaggtcacagcctccatggctgttgcataccaagactcttggaaggacttctaagatatatgttgattgatcccttttttattttgtggttttttaatatagtataaaaatccttttaaaaaaacaacaatctgtgtgcctctctggttgtttctcttttttattattactcctgagttgatgacattttttgttagatttcatggtaattctcaagtgcttcaatgatgcagcatttcttgcactaaaaaaaaaaaaaaaaaaactagaaagttttgggacatggggttatattaaattattctttgtttttctttttcttttaataaagcctgcaagttactaaattgtagtttcataaattctgtagtaaagtatcatcttggcagtgtgccaaaggtgaaaatgatgctttctctaacagagaaattcttagtgactccagtcgtagaaaaacgtctttacaacctgaataagattgaagaattgtgaacataccatggcctattggatgaatcatttgccgtaggctaaatcagactgtagggtttgtgatggatttatggagtatgtgggtatagaaatcatgaatctagcatttgttttcagagattcaagcatagtcttaagggtagatcagaaatgacaaatgaattcaaaacctagcaggtgcattgtaaatgtgtgcccagttatgttttggaaatggcagttccttggggtcatgtttctactggcaaaatttgcaatagtgttctattgtatgtaattttaaaatttataagattatccacgttggccaagtaaactgtactgccaatagaattctggaattgtgagaaattgtatcattgaagttcagtaggatgtgtggcttaaaaatttatcaggaccacaaaaaagaaaacaaaaatatttggtactgaggttcattgccagggcaggaggtatttccagaaaatactcatgcctgtgttctgttccttgctttcccaaatactgcatgtgactttcctaagcggcagctgaaagactcgagcccgtgctgtctcctttggttattatgacatgaaagtgtatcaagaactcagcatttctttgcatccatggacttggtttggagacataaggaatattctgaccctttttaaaaaaggattttctcatgtttttatttaacataaataaaagaataacatttta

SEQ ID NO: 434143 - DNA, 3348 bp, Homo sapiens
gcgcaggcggggcgcaggcgcgggcgcgctctcccggcagcccgcgctccctgaccccgcgccgccgagcgccctgaggactcagcgaagggtgggcgccgccgaggcctcctgccgctggcgggtttccgcggagtgccgcccggctccgctctgccgccggcgcggctcatgggcagagtcggccgggcgggccggcattaaactgaagaaaagatgtccctgtacgatgacctaggagtggagaccagtgactcaaaaacagaaggctggtccaaaaacttcaaacttctgcagtctcagcttcaggtgaagaaggcagctctcactcaggcaaagagccaaaggacgaaacaaagtacagtcctcgccccagtcattgacctgaagcgaggtggctcctcagatgaccggcaaattgtggacactccaccgcatgtagcagctgggctgaaggatcctgttcccagtgggttttctgcaggggaagttctgattcccttagctgacgaatatgaccctatgtttcctaatgattatgagaaagtagtgaagcgccaaagagaggaacgacagagacagcgggagctggaaagacaaaaggaaatagaagaaagggaaaaaaggcgtaaagacagacatgaagcaagtgggtttgcaaggagaccagatccagattctgatgaagatgaagattatgagcgagagaggaggaaaagaagtatgggcggagctgccattgccccacccacttctctggtagagaaagacaaagagttaccccgagattttccttatgaagaggactcaagacctcgatcacagtcttccaaagcagccattcctcccccagtgtacgaggaacaagacagaccgagatctccaaccggacctagcaactccttcctcgctaacatggggggcacggtggcgcacaagatcatgcagaagtacggcttccgggagggccagggtctggggaagcatgagcagggcctgagcactgccttgtcagtggagaagaccagcaagcgtggcggcaagatcatcgtgggcgacgccacagagaaaggtgtgtccccagggaagcgtgtgactagagggaaaggactggccccatccatatcagacatggccagtcttgatcctcatgtgtcagcagggggacaatgaggcgtgtggccagagggagagggctggccctgccatcactagaacacaggccgtcctgttcatatgatgcactgccacttccgttttgtgaaaccaggaatcctgaggctcatctttattttttcagaacagacgtagagagatgaaggcttgtggaggaaaagatggtgagagacttgggcagaaaatgagtagtcctcaggaagaaatcttggttatgtgtttagagcatgaaggacagagccatatagtgtggcagtgaatatacctgctatctccatctcagaggtcgtctctacttttcccttttgccctttcagtatagatgtgatttctgattctcttacagattgtttgctttgcgagatctgatgttatgttgcagtctcttggtaaatgatgcctagttggtgttttattttcatttaatttttacagtctgttctgtgttgagggaattcaggaaagagacaaacatatgttagcattttaatcagggaattaagtttgagtcagcctagctgaacttcctttgctaaagaaagaagaaaacttttctggcagccccgttcatgcacagcttaggatacatcacgagcctgacagatgcatccaagaagtcagattcaaatccgctgactgaaatacttaagtgtcctactaaagtggtcttactaaggaacatggttggtgcgggagaggtggatgaagacttggaagttgaaaccaaggaagaatgtgaaaaatatggcaaagttggaaaatgtgtgatatttgaaattcctggtgcccctgatgatgaagcagtacggatatttttagaatttgagagagttgaatcagcaattaaagcggttgttgacttgaatgggaggtattttggtggacgggtggtaaaagcatgtttctacaatttggacaaattcagggtcttggatttggcagaacaagtttgattttaagaactagagcacgagtcatctccggtgatccttaaatgaactgcaggctgagaaaagaaggaaagatatatgttgattgatcccttttttattttgtggttttttaatatagtataaaaatccttttaaaaaaacaacaatctgtgtgcctctctggttgtttctcttttttattattactcctgagttgatgacattttttgttagatttcatggtaattctcaagtgcttcaatgatgcagcatttcttgcactaaaaaaaaaaaaaaaaaaactagaaagttttgggacatggggttatattaaattattctttgtttttctttttcttttaataaagcctgcaagttactaaattgtagtttcataaattctgtagtaaagtatcatcttggcagtgtgccaaaggtgaaaatgatgctttctctaacagagaaattcttagtgactccagtcgtagaaaaacgtctttacaacctgaataagattgaagaattgtgaacataccatggcctattggatgaatcatttgccgtaggctaaatcagactgtagggtttgtgatggatttatggagtatgtgggtatagaaatcatgaatctagcatttgttttcagagattcaagcatagtcttaagggtagatcagaaatgacaaatgaattcaaaacctagcaggtgcattgtaaatgtgtgcccagttatgttttggaaatggcagttccttggggtcatgtttctactggcaaaatttgcaatagtgttctattgtatgtaattttaaaatttataagattatccacgttggccaagtaaactgtactgccaatagaattctggaattgtgagaaattgtatcattgaagttcagtaggatgtgtggcttaaaaatttatcaggaccacaaaaaagaaaacaaaaatatttggtactgaggttcattgccagggcaggaggtatttccagaaaatactcatgcctgtgttctgttccttgctttcccaaatactgcatgtgactttcctaagcggcagctgaaagactcgagcccgtgctgtctcctttggttattatgacatgaaagtgtatcaagaactcagcatttctttgcatccatggacttggtttggagacataaggaatattctgaccctttttaaaaaaggattttctcatgtttttatttaacataaataaaagaataacatttta

SEQ ID NO: 434144 - DNA, 2638 bp, Homo sapiens
gcgcaggcggggcgcaggcgcgggcgcgctctcccggcagcccgcgctccctgaccccgcgccgccgagcgccctgaggactcagcgaagggtgggcgccgccgaggcctcctgccgctggcgggtttccgcggagtgccgcccggctccgctctgccgccggcgcggctcatgggcagagtcggccgggcgggccggcattaaactgaagaaaagatgtccctgtacgatgacctaggagtggagaccagtgactcaaaaacagaaggctggtccaaaaacttcaaacttctgcagtctcagcttcaggtgaagaaggcagctctcactcaggcaaagagccaaaggacgaaacaaagtacagtcctcgccccagtcattgacctgaagcgaggtggctcctcagatgaccggcaaattgtggacactccaccgcatgtagcagctgggctgaaggatcctgttcccagtgggttttctgcaggggaagttctgattcccttagctgacgaatatgaccctatgtttcctaatgattatgagaaagtagtgaagcgccaaagagaggaacgacagagacagcgggagctggaaagacaaaaggaaatagaagaaagggaaaaaaggcgtaaagacagacatgaagcaagtgggtttgcaaggagaccagatccagattctgatgaagatgaagattatgagcgagagaggaggaaaagaataccccgagattttccttatgaagaggactcaagacctcgatcacagtcttccaaagcagccattcctcccccagtgtacgaggaacaagacagaccgagatctccaaccggacctagcaactccttcctcgctaacatggggggcacggtggcgcacaagatcatgcagaagtacggcttccgggagggccagggtctggggaagcatgagcagggcctgagcactgccttgtcagtggagaagaccagcaagcgtggcggcaagatcatcgtgggcgacgccacagagaaagatgcatccaagaagtcagattcaaatccgctgactgaaatacttaagtgtcctactaaagtggtcttactaaggaacatggttggtgcgggagaggtggatgaagacttggaagttgaaaccaaggaagaatgtgaaaaatatggcaaagttggaaaatgtgtgatatttgaaattcctggtgcccctgatgatgaagcagtacggatatttttagaatttgagagagttgaatcagcaattaaagcggttgttgacttgaatgggaggtattttggtggacgggtggtaaaagcatgtttctacaatttggacaaattcagggtcttggatttggcagaacaagtttgattttaagaactagagcacgagtcatctccggtgatccttaaatgaactgcaggctgagaaaagaaggaaaaaggtcacagcctccatggctgttgcataccaagactcttggaaggacttctaagatatatgttgattgatcccttttttattttgtggttttttaatatagtataaaaatccttttaaaaaaacaacaatctgtgtgcctctctggttgtttctcttttttattattactcctgagttgatgacattttttgttagatttcatggtaattctcaagtgcttcaatgatgcagcatttcttgcactaaaaaaaaaaaaaaaaaaactagaaagttttgggacatggggttatattaaattattctttgtttttctttttcttttaataaagcctgcaagttactaaattgtagtttcataaattctgtagtaaagtatcatcttggcagtgtgccaaaggtgaaaatgatgctttctctaacagagaaattcttagtgactccagtcgtagaaaaacgtctttacaacctgaataagattgaagaattgtgaacataccatggcctattggatgaatcatttgccgtaggctaaatcagactgtagggtttgtgatggatttatggagtatgtgggtatagaaatcatgaatctagcatttgttttcagagattcaagcatagtcttaagggtagatcagaaatgacaaatgaattcaaaacctagcaggtgcattgtaaatgtgtgcccagttatgttttggaaatggcagttccttggggtcatgtttctactggcaaaatttgcaatagtgttctattgtatgtaattttaaaatttataagattatccacgttggccaagtaaactgtactgccaatagaattctggaattgtgagaaattgtatcattgaagttcagtaggatgtgtggcttaaaaatttatcaggaccacaaaaaagaaaacaaaaatatttggtactgaggttcattgccagggcaggaggtatttccagaaaatactcatgcctgtgttctgttccttgctttcccaaatactgcatgtgactttcctaagcggcagctgaaagactcgagcccgtgctgtctcctttggttattatgacatgaaagtgtatcaagaactcagcatttctttgcatccatggacttggtttggagacataaggaatattctgaccctttttaaaaaaggattttctcatgtttttatttaacataaataaaagaataacatttta

SEQ ID NO: 434145 - DNA, 1556 bp, Homo sapiens
gcgcaggcggggcgcaggcgcgggcgcgctctcccggcagcccgcgctccctgaccccgcgccgccgagcgccctgaggactcagcgaagggtgggcgccgccgaggcctcctgccgctggcgggtttccgcggagtgccgcccggctccgctctgccgccggcgcggctcatgggcagagtcggccgggcgggccggcattaaactgaagaaaagatgtccctgtacgatgacctaggagtggagaccagtgactcaaaaacagaaggctggtccaaaaacttcaaacttctgcagtctcagcttcaggtgaagaaggcagctctcactcaggcaaagagccaaaggacgaaacaaagtacagtcctcgccccagtcattgacctgaagcgaggtggctcctcagatgaccggcaaattgtggacactccaccgcatgtagcagctgggctgaaggatcctgttcccagtgggttttctgcaggggaagttctgattcccttagctgacgaatatgaccctatgtttcctaatgattatgagaaagtagtgaagcgccaaagagaggaacgacagagacagcgggagctggaaagacaaaaggaaatagaagaaagggaaaaaaggcgtaaagacagacatgaagcaagtgggtttgcaaggagaccagatccagattctgatgaagatgaagattatgagcgagagaggaggaaaagaagtatgggcggagctgccattgccccacccacttctctggtagagaaagacaaagagttaccccgagattttccttatgaagaggactcaagacctcgatcacagtcttccaaagcagccattcctcccccagtgtacgaggaacaagacagaccgagatctccaaccggacctagcaactccttcctcgctaacatggggggcacggtggcgcacaagatcatgcagaagtacggcttccgggagggccagggtctggggaagcatgagcagggcctgagcactgccttgtcagtggagaagaccagcaagcgtggcggcaagatcatcgtgggcgacgccacagagaaagatgcatccaagaagtcagattcaaatccgctgactgaaatacttaagtgtcctactaaagtggtcttactaaggaacatggttggtgcgggagaggtggatgaagacttggaagttgaaaccaaggaagaatgtgaaaaatatggcaaagttggaaaatgtgtgatatttgaaattcctggtgcccctgatgatgaagcagtacggatatttttagaatttgagagagttgaatcagcaattaaagcggttgttgacttgaatgggaggtattttggtggacgggtggtaaaagcatgtttctacaatttggacaaattcagggtcttggatttggcagaacaagtttgattttaagaactagagcacgagtcatctccggtgatccttaaatgaactgcaggctgagaaaagaaggaaagatatatgttgattgatcccttttttattttgtggttttttaatatagtataaaaatcctttta

SEQ ID NO: 434146 - DNA, 2311 bp, Homo sapiens
ctctagcggatccttacctaaatggctgtcaggttactgcaggagtcaaaagatggccagattgtatctccttagaacatacagaacatctttccggcaagaatattcattcaagaagattttaaagggtgaataacatttcagtaagatataaaaaagacgtttgaggagatagaaatagcaaaaggaaagttagaatcaggaaagtagcgtcctccctctgtggttttaaaaaaagtcgtataaaggctgtaaaattgatttggtgtttttctctccttgtggtaaaccaaaaagtaggttaaatttgttcaagataaataattgatacaagtgaggtttcagagtgttttctatagtattttggtgagcctactttatttttctccaatagtaccccgagattttccttatgaagaggactcaagacctcgatcacagtcttccaaagcagccattcctcccccagtgtacgaggaacaagacagaccgagatctccaaccggacctagcaactccttcctcgctaacatggggggcacggtggcgcacaagatcatgcagaagtacggcttccgggagggccagggtctggggaagcatgagcagggcctgagcactgccttgtcagtggagaagaccagcaagcgtggcggcaagatcatcgtgggcgacgccacagagaaagatgcatccaagaagtcagattcaaatccgctgactgaaatacttaagtgtcctactaaagtggtcttactaaggaacatggttggtgcgggagaggtggatgaagacttggaagttgaaaccaaggaagaatgtgaaaaatatggcaaagttggaaaatgtgtgatatttgaaattcctggtgcccctgatgatgaagcagtacggatatttttagaatttgagagagttgaatcagcaattaaagcggttgttgacttgaatgggaggtattttggtggacgggtggtaaaagcatgtttctacaatttggacaaattcagggtcttggatttggcagaacaagtttgattttaagaactagagcacgagtcatctccggtgatccttaaatgaactgcaggctgagaaaagaaggaaaaaggtcacagcctccatggctgttgcataccaagactcttggaaggacttctaagatatatgttgattgatcccttttttattttgtggttttttaatatagtataaaaatccttttaaaaaaacaacaatctgtgtgcctctctggttgtttctcttttttattattactcctgagttgatgacattttttgttagatttcatggtaattctcaagtgcttcaatgatgcagcatttcttgcactaaaaaaaaaaaaaaaaaaactagaaagttttgggacatggggttatattaaattattctttgtttttctttttcttttaataaagcctgcaagttactaaattgtagtttcataaattctgtagtaaagtatcatcttggcagtgtgccaaaggtgaaaatgatgctttctctaacagagaaattcttagtgactccagtcgtagaaaaacgtctttacaacctgaataagattgaagaattgtgaacataccatggcctattggatgaatcatttgccgtaggctaaatcagactgtagggtttgtgatggatttatggagtatgtgggtatagaaatcatgaatctagcatttgttttcagagattcaagcatagtcttaagggtagatcagaaatgacaaatgaattcaaaacctagcaggtgcattgtaaatgtgtgcccagttatgttttggaaatggcagttccttggggtcatgtttctactggcaaaatttgcaatagtgttctattgtatgtaattttaaaatttataagattatccacgttggccaagtaaactgtactgccaatagaattctggaattgtgagaaattgtatcattgaagttcagtaggatgtgtggcttaaaaatttatcaggaccacaaaaaagaaaacaaaaatatttggtactgaggttcattgccagggcaggaggtatttccagaaaatactcatgcctgtgttctgttccttgctttcccaaatactgcatgtgactttcctaagcggcagctgaaagactcgagcccgtgctgtctcctttggttattatgacatgaaagtgtatcaagaactcagcatttctttgcatccatggacttggtttggagacataaggaatattctgaccctttttaaaaaaggattttctcatgtttttatttaacataaataaaagaataacatttta

SEQ ID NO: 434147 - DNA, 1751 bp, Homo sapiens
gcgcaggcggggcgcaggcgcgggcgcgctctcccggcagcccgcgctccctgaccccgcgccgccgagcgccctgaggactcagcgaagggtgggcgccgccgaggcctcctgccgctggcgggtttccgcggagtgccgcccggctccgctctgccgccggcgcggctcatgggcagagtcggccgggcgggccggcattaaactgaagaaaagatgtccctgtacgatgacctaggagtggagaccagtgactcaaaaacagaaggctggtccaaaaacttcaaacttctgcagtctcagcttcaggtgaagaaggcagctctcactcaggcaaagagccaaaggacgaaacaaagtacagtcctcgccccagtcattgacctgaagcgaggtggctcctcagatgaccggcaaattgtggacactccaccgcatgtagcagctgggctgaaggatcctgttcccagtgggttttctgcaggggaagttctgattcccttagctgacgaatatgaccctatgtttcctaatgattatgagaaagtagtgaagcgccaaagagaggaacgacagagacagcgggagctggaaagacaaaaggaaatagaagaaagggaaaaaaggcgtaaagacagacatgaagcaagtgggtttgcaaggagaccagatccagattctgatgaagatgaagattatgagcgagagaggaggaaaagaagtatgggcggagctgccattgccccacccacttctctggtagagaaagacaaagagttaccccgagattttccttatgaagaggactcaagacctcgatcacagtcttccaaagcagccattcctcccccagtgtacgaggaacaagacagaccgagatctccaaccggacctagcaactccttcctcgctaacatggggggcacggtggcgcacaagatcatgcagaagtacggcttccgggagggccagggtctggggaagcatgagcagggcctgagcactgccttgtcagtggagaagaccagcaagcgtggcggcaagatcatcgtgggcgacgccacagagaaagatgcatccaagaagtcagattcaaatccgctgactgaaatacttaagtgtcctactaaagtggtcttactaaggaacatggttggtgcgggagaggtggatgaagacttggaagttgaaaccaaggaagaatgtgaaaaatatggcaaagttggaaaatgtgtgatatttgaaattcctggtgcccctgatgatgaagcagtacggatatttttagaatttgagagagttgaatcagcaattaaaggttagtggtacagctaaatattaaagaataaaaaagttgaatttacagccttaatctttacaagtaaagttactgtttaattaaagttaaacctttatcttataggatacctgtattaactgtcttttgtttgcctttcagcggttgttgacttgaatgggaggtattttggtggacgggtggtaaaagcatgtttctacaatttggacaaattcagggtcttggatttggcagaacaagtttgattttaagaactagagcacgagtcatctccggtgatccttaaatgaactgcaggctgagaaaagaaggaaaaaggtcacagcctccatggctgttgcataccaagactcttggaaggacttctaagatatatgttgattgatcccttttttattttgtggttttttaatatagtataaaaatcctttta

SEQ ID NO: 434148 - DNA, 1270 bp, Homo sapiens
gcgcaggcggggcgcaggcgcgggcgcgctctcccggcagcccgcgctccctgaccccgcgccgccgagcgccctgaggactcagcgaagggtgggcgccgccgaggcctcctgccgctggcgggtttccgcggagtgccgcccggctccgctctgccgccggcgcggctcatgggcagagtcggccgggcgggccggcattaaactgaagaaaagatgtccctgtacgatgacctaggagtggagaccagtgactcaaaaacagaaggctggtccaaaaacttcaaacttctgcagtctcagcttcaggtgaagaaggcagctctcactcaggcaaagagccaaaggacgaaacaaagtacagtcctcgccccagtcattgacctgaagcgaggtggctcctcagatgaccggcaaattgtggacactccaccgcatgtagcagctgggctgaaggatcctgttcccagtgggttttctgcaggggaagttctgattcccttagctgacgaatatgaccctatgtttcctaatgattatgagaaagtagtgaagcgccaaagagaggaacgacagagacagcgggagctggaaagacaaaaggaaatagaagaaagggaaaaaaggcgtaaagacagacatgaagcaagtgggtttgcaaggagaccagatccagattctgatgaagatgaagattatgagcgagagaggaggaaaagaagtatgggcggagctgccattgccccacccacttctctggtagagaaagacaaagagttaccccgagattttccttatgaagaggactcaagacctcgatcacagtcttccaaagcagccattcctcccccagtgtacgaggaacaagacagaccgagatctccaaccggacctagcaactccttcctcgctaacatggggggcacggtggcgcacaagatcatgcagaagtacggcttccgggagggccagggtctggggaagcatgagcagggcctgagcactgccttgtcagtggagaagaccagcaagcgtggcggcaagatcatcgtgggcgacgccacagagaaagatgcatccaagaagtcagattcaaatccgctgactgaaatacttaagtgtcctactaaagtggtcttactaaggaacatggttggtgcgggagaggtggatgaagacttggaagttgaaaccaaggaagaatgtgaacgtggatgaagtgactgcttggatacaacgactgcttgttaacaaggaggtccgagctcga

SEQ ID NO: 434149 - DNA, 2528 bp, Homo sapiens
tctttgatgtttataacacaagttgtaattggcacattacaaaacattttctacaaacaggacagggtatgctataagtaacattcttactgcagaagatgacaggcgttggttatttgtacttctcttgctcaattattacagttttaaacataaagacaatgatttcaagttttatttgatgaagaaacaggaatgcttcatgattgaggatcagtatgatgactgaagaccttgattctagcgtgctcagtagtttagttccttagacatgcctttggtttcagtcatttggtgagtatttagtgcctctcacatgcactgcactgtgcggagagcacttggattacaggaagcatgctctgtactctcagtggtgtgttcagttgaagaaacacataaaataactgaaagatattcagttactagactaggtagtattgactaagttcaggagttgagaaaaggattagatcagtgaaaaaatagactgccttgtgagcaatagcagatatgggctgcgctttgaaacgaacaggtgggatttgcagggaagggtattctgattgggataatggctcgtaggagacagtgaagatcaggactaccaaaatggaatggatgggcctgttggggattagcagaagtgcttaggtgggtggaattacagagggctaggaaagctagacagagctagtcaaaatgagacctgatgtgaaaggccactagggcaccagcctttttaatctgaaagctctgcttcctctgtttctttatcctgttgctgtttgttgaccacataattatttgtttacgtcatcagctggcacagggcctttatgaggtcagagactgcctagccctgtgttcctggcacctaacaatgcctgtcataaaaacaggcattcagtacgtttttgatgatgaacaaattatacttatttccttggtatttgacaactacttgactgtatatgatgataattagaatatccactctgagaaatcatttaaaagagaaaactcattcaatgcaatctcaaatgcctttactcatcacgctctcattttcttccagattcctggtgcccctgatgatgaagcagtacggatatttttagaatttgagagagttgaatcagcaattaaagcggttgttgacttgaatgggaggtattttggtggacgggtggtaaaagcatgtttctacaatttggacaaattcagggtcttggatttggcagaacaagtttgattttaagaactagagcacgagtcatctccggtgatccttaaatgaactgcaggctgagaaaagaaggaaaaaggtcacagcctccatggctgttgcataccaagactcttggaaggacttctaagatatatgttgattgatcccttttttattttgtggttttttaatatagtataaaaatccttttaaaaaaacaacaatctgtgtgcctctctggttgtttctcttttttattattactcctgagttgatgacattttttgttagatttcatggtaattctcaagtgcttcaatgatgcagcatttcttgcactaaaaaaaaaaaaaaaaaaactagaaagttttgggacatggggttatattaaattattctttgtttttctttttcttttaataaagcctgcaagttactaaattgtagtttcataaattctgtagtaaagtatcatcttggcagtgtgccaaaggtgaaaatgatgctttctctaacagagaaattcttagtgactccagtcgtagaaaaacgtctttacaacctgaataagattgaagaattgtgaacataccatggcctattggatgaatcatttgccgtaggctaaatcagactgtagggtttgtgatggatttatggagtatgtgggtatagaaatcatgaatctagcatttgttttcagagattcaagcatagtcttaagggtagatcagaaatgacaaatgaattcaaaacctagcaggtgcattgtaaatgtgtgcccagttatgttttggaaatggcagttccttggggtcatgtttctactggcaaaatttgcaatagtgttctattgtatgtaattttaaaatttataagattatccacgttggccaagtaaactgtactgccaatagaattctggaattgtgagaaattgtatcattgaagttcagtaggatgtgtggcttaaaaatttatcaggaccacaaaaaagaaaacaaaaatatttggtactgaggttcattgccagggcaggaggtatttccagaaaatactcatgcctgtgttctgttccttgctttcccaaatactgcatgtgactttcctaagcggcagctgaaagactcgagcccgtgctgtctcctttggttattatgacatgaaagtgtatcaagaactcagcatttctttgcatccatggacttggtttggagacataaggaatattctgaccctttttaaaaaaggattttctcatgtttttatttaacataaataaaagaataacatttta

SEQ ID NO: 434150 - DNA, 1990 bp, Homo sapiens
gcgcaggcggggcgcaggcgcgggcgcgctctcccggcagcccgcgctccctgaccccgcgccgccgagcgccctgaggactcagcgaagggtgggcgccgccgaggcctcctgccgctggcgggtttccgcggagtgccgcccggctccgctctgccgccggcgcggctcatgggcagagtcggccgggcgggccggcattaaactgaagaaaagatgtccctgtacgatgacctaggagtggagaccagtgactcaaaaacagaaggctggtccaaaaacttcaaacttctgcagtctcagcttcaggtgaagaaggcagctctcactcaggcaaagagccaaaggacgaaacaaagtacagtcctcgccccagtcattgacctgaagcgaggtggctcctcagatgaccggcaaattgtggacactccaccgcatgtagcagctgggctgaaggatcctgttcccagtgggttttctgcaggggaagttctgattcccttagctgacgaatatgaccctatgtttcctaatgattatgagaaagtagtgaagcgccaaagagaggaacgacagagacagcgggagctggaaagacaaaaggaaatagaagaaagggaaaaaaggcgtaaagacagacatgaagcaagtgggtttgcaaggagaccagatccagattctgatgaagatgaagattatgagcgagagaggaggaaaagaagtatgggcggagctgccattgccccacccacttctctggtagagaaagacaaagagttaccccgagattttccttatgaagaggactcaagacctcgatcacagtcttccaaagcagccattcctcccccagtgtacgaggaacaagacagaccgagatctccaaccggacctagcaactccttcctcgctaacatggggggcacggtggcgcacaagatcatgcagaagtacggcttccgggagggccagggtctggggaagcatgagcagggcctgagcactgccttgtcagtggagaagaccagcaagcgtggcggcaagatcatcgtgggcgacgccacagagaaaggtgtgtccccagggaagcgtgtgactagagggaaaggactggccccatccatatcagacatggccagtcttgatcctcatgtgtcagcagggggacaatgaggcgtgtggccagagggagagggctggccctgccatcactagaacacaggccgtcctgttcatatgatgcactgccacttccgttttgtgaaaccaggaatcctgaggctcatctttattttttcagaacagacgtagagagatgaaggcttgtggaggaaaagatggtgagagacttgggcagaaaatgagtagtcctcaggaagaaatcttggttatgtgtttagagcatgaaggacagagccatatagtgtggcagtgaatatacctgctatctccatctcagaggtcgtctctacttttcccttttgccctttcagtatagatgtgatttctgattctcttacagattgtttgctttgcgagatctgatgttatgttgcagtctcttggtaaatgatgcctagttggtgttttattttcatttaatttttacagtctgttctgtgttgagggaattcaggaaagagacaaacatatgttagcattttaatcagggaattaagtttgagtcagcctagctgaacttcctttgctaaagaaagaagaaaacttttctggcagccccgttcatgcacagcttaggatacatcacgagcctgacaggtgagtgccagaaaccaacagttgtcccgacttgtgaggttatctgaagtaaggcagccggtggctggattagtaactgcatattcccctgggcccgtgaccttgaacgtttgctccaagtcaactcacctataggaattatcactcacatgccctgtcagccctttgggaagtgagatgagcaaaaattgcaagtaatggtggaggctca

SEQ ID NO: 434151 - DNA, 2669 bp, Homo sapiens
tctttgatgtttataacacaagttgtaattggcacattacaaaacattttctacaaacaggacagggtatgctataagtaacattcttactgcagaagatgacaggcgttggttatttgtacttctcttgctcaattattacagttttaaacataaagacaatgatttcaagttttatttgatgaagaaacaggaatgcttcatgattgaggatcagtatgatgactgaagaccttgattctagcgtgctcagtagtttagttccttagacatgcctttggtttcagtcatttggtgagtatttagtgcctctcacatgcactgcactgtgcggagagcacttggattacaggaagcatgctctgtactctcagtggtgtgttcagttgaagaaacacataaaataactgaaagatattcagttactagactaggtagtattgactaagttcaggagttgagaaaaggattagatcagtgaaaaaatagactgccttgtgagcaatagcagatatgggctgcgctttgaaacgaacaggtgggatttgcagggaagggtattctgattgggataatggctcgtaggagacagtgaagatcaggactaccaaaatggaatggatgggcctgttggggattagcagaagtgcttaggtgggtggaattacagagggctaggaaagctagacagagctagtcaaaatgagacctgatgtgaaaggccactagggcaccagcctttttaatctgaaagctctgcttcctctgtttctttatcctgttgctgtttgttgaccacataattatttgtttacgtcatcagctggcacagggcctttatgaggtcagagactgcctagccctgtgttcctggcacctaacaatgcctgtcataaaaacaggcattcagtacgtttttgatgatgaacaaattatacttatttccttggtatttgacaactacttgactgtatatgatgataattagaatatccactctgagaaatcatttaaaagagaaaactcattcaatgcaatctcaaatgcctttactcatcacgctctcattttcttccagattcctggtgcccctgatgatgaagcagtacggatatttttagaatttgagagagttgaatcagcaattaaaggttagtggtacagctaaatattaaagaataaaaaagttgaatttacagccttaatctttacaagtaaagttactgtttaattaaagttaaacctttatcttataggatacctgtattaactgtcttttgtttgcctttcagcggttgttgacttgaatgggaggtattttggtggacgggtggtaaaagcatgtttctacaatttggacaaattcagggtcttggatttggcagaacaagtttgattttaagaactagagcacgagtcatctccggtgatccttaaatgaactgcaggctgagaaaagaaggaaaaaggtcacagcctccatggctgttgcataccaagactcttggaaggacttctaagatatatgttgattgatcccttttttattttgtggttttttaatatagtataaaaatccttttaaaaaaacaacaatctgtgtgcctctctggttgtttctcttttttattattactcctgagttgatgacattttttgttagatttcatggtaattctcaagtgcttcaatgatgcagcatttcttgcactaaaaaaaaaaaaaaaaaaactagaaagttttgggacatggggttatattaaattattctttgtttttctttttcttttaataaagcctgcaagttactaaattgtagtttcataaattctgtagtaaagtatcatcttggcagtgtgccaaaggtgaaaatgatgctttctctaacagagaaattcttagtgactccagtcgtagaaaaacgtctttacaacctgaataagattgaagaattgtgaacataccatggcctattggatgaatcatttgccgtaggctaaatcagactgtagggtttgtgatggatttatggagtatgtgggtatagaaatcatgaatctagcatttgttttcagagattcaagcatagtcttaagggtagatcagaaatgacaaatgaattcaaaacctagcaggtgcattgtaaatgtgtgcccagttatgttttggaaatggcagttccttggggtcatgtttctactggcaaaatttgcaatagtgttctattgtatgtaattttaaaatttataagattatccacgttggccaagtaaactgtactgccaatagaattctggaattgtgagaaattgtatcattgaagttcagtaggatgtgtggcttaaaaatttatcaggaccacaaaaaagaaaacaaaaatatttggtactgaggttcattgccagggcaggaggtatttccagaaaatactcatgcctgtgttctgttccttgctttcccaaatactgcatgtgactttcctaagcggcagctgaaagactcgagcccgtgctgtctcctttggttattatgacatgaaagtgtatcaagaactcagcatttctttgcatccatggacttggtttggagacataaggaatattctgaccctttttaaaaaaggattttctcatgtttttatttaacataaataaaagaataacatttta

SEQ ID NO: 434152 - DNA, 1836 bp, Homo sapiens
actcagttctgtaacacatctaatgatatgctgctcagttctgtaacacatctaatggtatgttttgatacaatgcatccaagaagtcagattcaaatccgctgactgaaatacttaagtgtcctactaaagtggtcttactaaggaacatggttggtgcgggagaggtggatgaagacttggaagttgaaaccaaggaagaatgtgaaaaatatggcaaagttggaaaatgtgtgatatttgaaattcctggtgcccctgatgatgaagcagtacggatatttttagaatttgagagagttgaatcagcaattaaaggttagtggtacagctaaatattaaagaataaaaaagttgaatttacagccttaatctttacaagtaaagttactgtttaattaaagttaaacctttatcttataggatacctgtattaactgtcttttgtttgcctttcagcggttgttgacttgaatgggaggtattttggtggacgggtggtaaaagcatgtttctacaatttggacaaattcagggtcttggatttggcagaacaagtttgattttaagaactagagcacgagtcatctccggtgatccttaaatgaactgcaggctgagaaaagaaggaaaaaggtcacagcctccatggctgttgcataccaagactcttggaaggacttctaagatatatgttgattgatcccttttttattttgtggttttttaatatagtataaaaatccttttaaaaaaacaacaatctgtgtgcctctctggttgtttctcttttttattattactcctgagttgatgacattttttgttagatttcatggtaattctcaagtgcttcaatgatgcagcatttcttgcactaaaaaaaaaaaaaaaaaaactagaaagttttgggacatggggttatattaaattattctttgtttttctttttcttttaataaagcctgcaagttactaaattgtagtttcataaattctgtagtaaagtatcatcttggcagtgtgccaaaggtgaaaatgatgctttctctaacagagaaattcttagtgactccagtcgtagaaaaacgtctttacaacctgaataagattgaagaattgtgaacataccatggcctattggatgaatcatttgccgtaggctaaatcagactgtagggtttgtgatggatttatggagtatgtgggtatagaaatcatgaatctagcatttgttttcagagattcaagcatagtcttaagggtagatcagaaatgacaaatgaattcaaaacctagcaggtgcattgtaaatgtgtgcccagttatgttttggaaatggcagttccttggggtcatgtttctactggcaaaatttgcaatagtgttctattgtatgtaattttaaaatttataagattatccacgttggccaagtaaactgtactgccaatagaattctggaattgtgagaaattgtatcattgaagttcagtaggatgtgtggcttaaaaatttatcaggaccacaaaaaagaaaacaaaaatatttggtactgaggttcattgccagggcaggaggtatttccagaaaatactcatgcctgtgttctgttccttgctttcccaaatactgcatgtgactttcctaagcggcagctgaaagactcgagcccgtgctgtctcctttggttattatgacatgaaagtgtatcaagaactcagcatttctttgcatccatggacttggtttggagacataaggaatattctgaccctttttaaaaaaggattttctcatgtttttatttaacataaataaaagaataacatttta

SEQ ID NO: 434153 - DNA, 1500 bp, Homo sapiens
gcgcaggcggggcgcaggcgcgggcgcgctctcccggcagcccgcgctccctgaccccgcgccgccgagcgccctgaggactcagcgaagggtgggcgccgccgaggcctcctgccgctggcgggtttccgcggagtgccgcccggctccgctctgccgccggcgcggctcatgggcagagtcggccgggcgggccggcattaaactgaagaaaagatgtccctgtacgatgacctaggagtggagaccagtgactcaaaaacagaaggctggtccaaaaacttcaaacttctgcagtctcagcttcaggtgaagaaggcagctctcactcaggcaaagagccaaaggacgaaacaaagtacagtcctcgccccagtcattgacctgaagcgaggtggctcctcagatgaccggcaaattgtggacactccaccgcatgtagcagctgggctgaaggatcctgttcccagtgggttttctgcaggggaagttctgattcccttagctgacgaatatgaccctatgtttcctaatgattatgagaaagtagtgaagcgccaaagagaggaacgacagagacagcgggagctggaaagacaaaaggaaatagaagaaagggaaaaaaggcgtaaagacagacatgaagcaagtgggtttgcaaggagaccagatccagattctgatgaagatgaagattatgagcgagagaggaggaaaagaagtaaggcatgaacaaatatgtcttaaacatatataaatactggaagtgcaattccactatgtgctttttcttttcagtttgataaatagttcatttgacattgatttgggtaattttctttctggaatcccagcaatacacatttgcgtcacagttttaatttatattgggttttcatatgtattttcctttgagcttcacaaccactttctaacatttatttattggatactttgggactagcttaaaatctattcctgcactgtctttacctgcagcacagtccagttggccgatgctgaatccactctgttgtttctcttaggggggaagcatagttaacattgagtgtgtctgttttgggcattgtgacacatttcatatccgctatcttagttaatccccaaatgtttggtttttattaacttcttttggaattcagtatataggttgaatatttgtaggtctcatttttccagcttataaattgactgccctttttaataaggaggcatgctttccatactaaggacatttgtttttttttcttaaacaccagcaggaactagatagctttgaatgagaagactttgtttgaccttgtagctcatgatagggaggtagtggcatgcccatcatatgtatagttgttgacagattgatgttcttattttaatgtgattagtagcagatttccagtaatcaccctgaatttttttaactgaacttattagagctaatctgcttttcagaatcagtaatcactctaggtcctagtg

SEQ ID NO: 434154 - DNA, 1835 bp, Homo sapiens
gcgcaggcggggcgcaggcgcgggcgcgctctcccggcagcccgcgctccctgaccccgcgccgccgagcgccctgaggactcagcgaagggtgggcgccgccgaggcctcctgccgctggcgggtttccgcggagtgccgcccggctccgctctgccgccggcgcggctcatgggcagagtcggccgggcgggccggcattaaactgaagaaaagatgtccctgtacgatgacctaggagtggagaccagtgactcaaaaacagaaggctggtccaaaaacttcaaacttctgcagtctcagcttcaggtgaagaaggcagctctcactcaggcaaagagccaaaggacgaaacaaagtacagtcctcgccccagtcattgacctgaagcgaggtggctcctcagatgaccggcaaattgtggacactccaccgcatgtagcagctgggctgaaggatcctgttcccagtgggttttctgcaggggaagttctgattcccttagctgacgaatatgaccctatgtttcctaatgattatgagaaagtagtgaagcgccaaagagaggaacgacagagacagcgggagctggaaagcacacacaggcaacatcagcacagcaacagggcaacacacacaggcgtcaacagcacagcaccatgcacagcacaagctgggagtattgcaaaggcagcaccgagcatccaagcattcatgcaatgcacaggcatgcaaagcatctcattgccagcgcagcagcagagagggcaacacagcaagtcatcggggcgcgcagcatgccacatttgcacccacacccacacattcctctgggttagccagccccaagcacaacaagcagcttcaccccccagcaggcattatttaccctctcatgcgcaaagccaggcacatcacaacgaacacttcgaatccacgagattcgtttcaccaaaccagcacagcccacgttaccaatcccccacaggatggtaccgaacggcacaccaaaggaccaacggaccccgcagcaatcgtccacacatcccggggaaccctacagcgccaaacacttccccctctccccgtacggccatacaaccaatgcgcggcgagacgcccacccgggagccgcgaccggccaccaacaggaactccaattggcgcacgaacacgatcaccaggggcactttcccccgcggacaggcggccaccaaaggggactccatcgcgaggaggacaccggcacatttggcacagcacaggcgggacagttgacaggacaacctctaggacctctggatcacaaagacaggggacacgcacacagaaccacaacgcagcagaccgttgcgcagggcagcaagaaacacaataaggccagcagggaccagaacacagaccacacacacgagaaacgaacaaaaaggacagggcaaaatcacccaacggaaaaggacgttacacagcacatccagaacgactacacgaagcgaacaatcgcagcaaaccgtcacggagtagcacccacaccgccaacgggtggcccaaccacaccacagcggacaacacgaggcagagacgcgcggacaccaaggtcgcaggtccacaacactcgggcagacgcggacacagcaggaaccgcaggcgagcccaccactcgcacaacagacgaacaacgcacgctgagaccatctcaagcagacgtgctggaagcacagccagcagagacgcaagcacaccaagcgcaccacctagacaccagacacgaccgtcaacacacagccaacaagccgagagaacaacacgagcgagccacaaacgaccgcacgaca

SEQ ID NO: 434155 - DNA, 419 bp, Homo sapiens
gtcaccccagcctaccctgctccccctaaaagttaaaactgaaaatgatacttttgcaaataatactttgggcagatcccacgtaaggctgattttagatttttcactaatgtgtaagtctctttgctaagtacagtgtttaagactgcagtgagtaattaaatatttgaaattgctagagcttcagatagtttatacattttggtgcttgcatagatgcttttgtaactctttacaggcttaatatatgttttagtgttttaagaaatactaacttttgggtactttggggatgaaatttttcattatgtcgtttgggattgagaacatttaccatcactaagtcatatttatatacctctgctaggtgtttgtaagttatacttggtacttgaatttgtttatttttgtgtttaaag

SEQ ID NO: 434156 - DNA, 1173 bp, Homo sapiens
  misc_feature (1)..(1): n is a, c, g, or t
  misc_feature (7)..(7): n is a, c, g, or t
ngacgangcccggaatcgacctatggccagcagtcgtccccgccctgcttcaaacatttgggtttcaggagccgggcggaggtgactgccgcgtgtttgcgttgcacgcccaccgcccgaaacacggcggcggcctcagggctgctgcggcctcggcgggggcaggccccggcgcccgcccgcctcccggcctccatcatcccagggtgcaccgcggcgggcgcgggcgcgcggccatgttgcggtagtttgttgttttcttcctgcggaggcgaagggccagctgtggaccgcgaagcgcccggcttcgcctctgcctcctgcagccccctcccttccctgtcctccgtcacccgtacccgggcccggaccaggcacgtcggcccaccagctggcttggtgggggaggctgaaggccgggccccgcgagtgccatggcggccgccctgggagcgagcggaggagcaggcgccggagatgatgactttgaccagtttgataagcctggcgcggaacggtcgtggagaagaagagctgctgatgaggactgggacagtgaacttgaagatgatttacttggagaagatttgctatctggcaaaaagaatcagtcggatttgtcagatgaagagctaaatgatgatcttttgcagagtgataatgaagatgaagaaaatttcagttctcagggtgttacaattagtctgaatgctacatctggcatggttacatcatttgaactctctgacaacactaacgaccaatctggagaacaggaatctgagtatgaacaagaacaaggagaggatgaactggtttatcacaaatctgatggatcagaattgtatactcaagagtacccagaagaaggacagtatgaaggccacgaagctgagttgacagaagaccaaatagaatatgtggaagagccagaggaggagcagctttacactgatgaagtgttagacatcgagatcaatgaacctttagatgaatttacagatgaagaatacttgcaggcttatggtgggcaacaagggctgcaagagcaggaagactgtgtggctgaagatgaattagatgagattactgatgcccaggttgctcctgcaactgaagagggaggtatggaaacattggaactttaaaaggaccctcgtgccgcctcgtgcc

SEQ ID NO: 434157 - DNA, 3622 bp, Homo sapiens
  misc_feature (1)..(1): n is a, c, g, or t
  misc_feature (7)..(7): n is a, c, g, or t
ngacgangcccggaatcgacctatggccagcagtcgtccccgccctgcttcaaacatttgggtttcaggagccgggcggaggtgactgccgcgtgtttgcgttgcacgcccaccgcccgaaacacggcggcggcctcagggctgctgcggcctcggcgggggcaggccccggcgcccgcccgcctcccggcctccatcatcccagggtgcaccgcggcgggcgcgggcgcgcggccatgttgcggtagtttgttgttttcttcctgcggaggcgaagggccagctgtggaccgcgaagcgcccggcttcgcctctgcctcctgcagccccctcccttccctgtcctccgtcacccgtacccgggcccggaccaggcacgtcggcccaccagctggcttggtgggggaggctgaaggccgggccccgcgagtgccatggcggccgccctgggagcgagcggaggagcaggcgccggagatgatgactttgaccagtttgataagcctggcgcggaacggtcgtggagaagaagagctgctgatgaggactgggacagtgaacttgaagatgatttacttggagaagatttgctatctggcaaaaagaatcagtcggatttgtcagatgaagagctaaatgatgatcttttgcagagtgataatgaagatgaagaaaatttcagttctcagggtgttacaattagtctgaatgctacatctggcatggttacatcatttgaactctctgacaacactaacgaccaatctggagaacaggaatctgagtatgaacaagaacaaggagaggatgaactggtttatcacaaatctgatggatcagaattgtatactcaagagtacccagaagaaggacagtatgaaggccacgaagctgagttgacagaagaccaaatagaatatgtggaagagccagaggaggagcagctttacactgatgaagtgttagacatcgagatcaatgaacctttagatgaatttacaggaggtatggaaacattggaacttcaaaaggacatcaaagaagaatcagatgaagaagaagaagatgatgaagaatctggacgattacgtttcaaaactgaaaggaaagaaggaacaattattaggctctcagatgtaactagagagagaaggaacattccagaaactttggagctttcagcagaggccaaggcagcattgcttgaatttgaagaaagggagcgacagcataaacaaggacgctacagctccaggcggggaggacggcgaggaggtccgctgatgtgtcgtggtgtgggggaccagaggagagagagcaccgagaggggcaggatgaaggaccacagacctgcgctgcttcctacacagcctcctgtcgtgatacttccagaggaggaattaatgagcgacctgatgccctaagatgacataagctgttggaccttgctacctaaagcctctagagagccccaggctccccctccaccgcctccgccgcctcagcagcagccgatcagaagcctgttccagccgcagccgctgcagccgctgcttccggtgcagcacccgcaccacccatccccgcctcagggaatgcacatgcctccccagctagagaccccaaggatgatgatgaccccgccacccgtgactccacagcagcccaagaacatacacatcaacccgcacttcaaagggacggtggtcacgcctgttcaagtgcccttgctaccagttccgagccagccgagacctgccgtgggaccccagagattcccaggccctccagaatttccacagcatacacctggacctgttcccaacagtttcagccagcccccacgactccctctccaggaccagtggagagccccacccccgcctcaggatcgagaccctttcttcttaggagtttcaggtgaaccaagattcccgagccatctttttctggaacagcgaagtccccctccaccaccaccgcctcctacccttcttaacagtagccatcctgttcctactcagagtcctctaccattcactcagccaggaccagcatttaatcagcaaggacagcagccagtgttcccaagagagcggcccgtacgaccagccttgcagcctccaggtccggtggggattctgcactttagccagcctgggtcggcaaccacacggcccttcattcctcctagacagccgttcctgccaggcccaggacagccgtttctgcccacacacacacagcccaacctgcaggggccgttgcatcctccattgccccctccgcatcagcctcagcctcagcaacctcagcaacagcccccgccacagcaccagcctccgcaccagcccccgcaccagcccccgccccagcaccagcccccaccccagcacccaccacagcacccgccgcagcaccagcaccaccaccaccaccaccacctgtccgtcccgccccctcctttgatgccgatgtctcagccacagttccggcctcacgtacagaccgctcagcctcaggccagcagcagccggatgcagtgcccccagcgccaggggctccggcataatacaacttctcagaatgtaagcaagcggcccatgcagcaaatgcagcccactgcgccaaggaacagcaatttgcgtgaattacccatagcgccgtcacacgtgatagaaatgagcagcagccgctgctctgccacgccctcagcacaagtgaaacctatcgtcagcgcgtcaccaccctcgcgggccgtggcgggttccagaagctcacagggaaagacggaagtgaaagtcaagccagctagccctgtggctcaacctaaagaagaggcaaaaacagaaacagagtttcctgatgaagatgaggaaacaaggttatatcgcttaaagatagaagaacagaaacgcctaagagaagaaatcctgaaacagaaggagttacggcggcagcagcaggctggtgccaggaagaaggagctgctggagagactcgcgcagcaacagcagcagctgtacgctcccccacccccagcagagcaggaagagcaggcactgtcaccatcacccaccaacggtaacccactgttgccctttccaggtgcacaggtcagacaaaatgtgaagaacagacttcttgttaaaaaccaggatgtcagtatttcaaacgttcagcccaaaacatccaattttgtaccatccagtgccaacatgcagtatcaaggacaacagatgaaagcactgaaacatttgagacagaccagaacagttcctcaaagtcagactcagccgctgcataaagtgctcccgatcaaacctgcagatgtggaggagccagctgtcccccagactcctcgagtggcgtccatccagggccggccccaggacacaaagcctggcgtgaaaaggactgtcacgcacaggacaaacagtggtggtggagacgggccccacatcagctccaaggtcagggtgattaagctgtcaggtggggtaagttgacaagttttatgagagcctctttgagtctgtgtatcacatagaatgtcctcatttgcagagaatgtttttgaagaaagaattaaaagttacctctgttatagtcttgtaaccaa

SEQ ID NO: 434158 - DNA, 1894 bp, Homo sapiens
tgtcagtcgctctgggaagcagccgagactgcgtgggaccccagagattcccaggccctccagaatttccacagcatacacctggacctgttcccaacagtttcagccagcccccacgactccctctccaggaccagtggagagccccacccccgcctcaggatcgagaccctttcttcttaggagtttcaggtgaaccaagattcccgagccatctttttctggaacagcgaagtccccctccaccaccaccgcctcctacccttcttaacagtagccatcctgttcctactcagagtcctctaccattcactcagccaggaccagcatttaatcagcaaggacagcagccagtgttcccaagagagcggcccgtacgaccagccttgcagcctccaggtccggtggggattctgcactttagccagcctgggtcggcaaccacacggcccttcattcctcctagacagccgttcctgccaggcccaggacagccgtttctgcccacacacacacagcccaacctgcaggggccgttgcatcctccattgccccctccgcatcagcctcagcctcagcaacctcagcaacagcccccgccacagcaccagcctccgcaccagcccccgcaccagcccccgccccagcaccagcccccaccccagcacccaccacagcacccgccgcagcaccagcaccaccaccaccaccaccacctgtccgtcccgccccctcctttgatgccgatgtctcagccacagttccggcctcacgtacagaccgctcagcctcaggccagcagcagccggatgcagtgcccccagcgccaggggctccggcataatacaacttctcagaatgtaagcaagcggcccatgcagcaaatgcagcccactgcgccaaggaacagcaatttgcgtgaattacccatagcgccgtcacacgtgatagaaatgagcagcagccgctgctctgccacgccctcagcacaagtgaaacctatcgtcagcgcgtcaccaccctcgcgggccgtggcgggttccagaagctcacagggaaagacggaagtgaaagtcaagccagctagccctgtggctcaacctaaagaagaggcaaaaacagaaacagagtttcctgatgaagatgaggaaacaaggttatatcgcttaaagatagaagaacagaaacgcctaagagaagaaatcctgaaacagaaggagttacggcggcagcagcaggctggtgccaggaagaaggagctgctggagagactcgcgcagcaacagcagcagctgtacgctcccccacccccagcagagcaggaagagcaggcactgtcaccatcacccaccaacggtaacccactgttgccctttccaggtgcacaggtcagacaaaatgtgaagaacagacttcttgttaaaaaccaggatgtcagtatttcaaacgttcagcccaaaacatccaattttgtaccatccagtgccaacatgcagtatcaaggacaacagatgaaagcactgaaacatttgagacagaccagaacagttcctcaaagtcagactcagccgctgcataaagtgctcccgatcaaacctgcagatgtggaggagccagctgtcccccagactcctcgagtggcgtccatccagggccggccccaggacacaaagcctggcgtgaaaaggactgtcacgcacaggacaaacagtggtggtggagacgggccccacatcagctccaaggtcagggtgattaagctgtcaggtggggtaagttgacaagttttatgagagcctctttgagtctgtgtatcacatagaatgtcctcatttgcagagaatgtttttgaagaaagaattaaaagttacctctgttatagtcttgtaaccaa

SEQ ID NO: 434159 - DNA, 967 bp, Homo sapiens
  misc_feature (1)..(1): n is a, c, g, or t
  misc_feature (7)..(7): n is a, c, g, or t
ngacgangcccggaatcgacctatggccagcagtcgtccccgccctgcttcaaacatttgggtttcaggagccgggcggaggtgactgccgcgtgtttgcgttgcacgcccaccgcccgaaacacggcggcggcctcagggctgctgcggcctcggcgggggcaggccccggcgcccgcccgcctcccggcctccatcatcccagggtgcaccgcggcgggcgcgggcgcgcggccatgttgcggtagtttgttgttttcttcctgcggaggcgaagggccagctgtggaccgcgaagcgcccggcttcgcctctgcctcctgcagccccctcccttccctgtcctccgtcacccgtacccgggcccggaccaggcacgtcggcccaccagctggcttggtgggggaggctgaaggccgggccccgcgagtgccatggcggccgccctgggagcgagcggaggagcaggcgccggagatgatgactttgaccagtttgataagcctggcgcggaacggtcgtggagaagaagagctgctgatgaggactgggacaggtacgtgcaccctgtgcttcacctaactgcctgtgccgatctctctcattctgacacttggctcctgagggatctttactgaacgcagcaccttgactacctggcgctctctcttgagtggggctgtccctcctgagctaaagtgaagcttctccatgcagaaggctgaggtgtgctcctgttccaggcctgtgttgtgtggagggctgccaatagatcataggtcttctgtcctttttctttgtttttgtacagtaatgatactgactttgtggacacccagaaccattactggagtggccttgtgccagagttctttaagctctactttgtactgaatatctggctacactttaacgttttttccattctaatatgtgtagatggtatttcactaattttaactttcat

SEQ ID NO: 434160 - DNA, 513 bp, Homo sapiens
agcggaggagcaggcgccggaggtacgtgaggcagccggactctgggggccaggaccgcgccgcggtgggcgggggtgtaggccggggggcctccccgcttaggagaggacgaggctctccccggctccgactctctttgtgttcggcctattccgttttctccctcgccttccctcgctattgtcattctccctttctcgctcctcctctccgctgtgcagatcgtacttacctgtgaacttctgtgtgtcctctactttgcaaggctgcctaagtgtcaggcccatctctggcgttggcgggcattaagtgccgaagccggcctggtgtcctatgggtaggagagcgccccccccaccccccgagacagtgtcacttagggagagcggggcaggtcgctgtagggtgggtgtttaagattgtggggccatcctgacagatttagattgatttgaagcccattacaaaaacataacgaaaagattcacctgtgtgaaggaatgtgcgacagt

SEQ ID NO: 434161 - DNA, 463 bp, Homo sapiens
ttgacatgtctcttttttttctcccaagtgaacttgaagatgatttacttggagaagatttgctatctggcaaaaaggtaagaagtttatgtccttctgagatgaaatactagtcatttaattatacttaacatacagcagtaatcacttatacatgggtttcattactggaaagttgggtatagattaaaattttgtaaactgaattattttttaagtgcgcagggaattgactgtttattagtaaattctctggtaattataactcaagaaataaatccttgaagattagttcctactttgtccaaggcactctggcagttactggattgtgacagcgttaacatagagttattccttgccataacagaaagtcacatttggaggtgaatattttgcatacttgttctggatttcactttttggaggcattcagagataagcttaaaggtaaacatactca

SEQ ID NO: 434162 - DNA, 414 bp, Homo sapiens
aaaattcacactgggtgctttggggctgttttccctcttgcgtggggattgactcaattgtgagactgtagccctcattgtgaagaagtagagaagcttctttatcctgctgttttgatacaagttgttactacagacttcttacattgtaacttaaaaaatgcaatcagtgtaaatttgtaacacatcagcattcttttaaatgttgatttcggtgaacttttgtttttttttttgtgatttgtagactcattctccaaggttaattcctccacagccccaggctccccctccaccgcctccgccgcctcagcagcagccgatcagaagcctgttccagccgcagccgctgcagccgctgcttccggtgcagcacccgcaccacccatccccgcctcagggaatgcacatgcc

SEQ ID NO: 434163 - DNA, 368 bp, Homo sapiens
tcaaataacctgcagctggtgataagtagaggggctatatgcattgccagtctgtggccggctccatatagcacagttagctctgctgtacgcattaagggtttagggcactggctctgtatagcattttgagtactgttggagttaatgtgcatttgtcagtaactggaataactttttatcagtcatggtttaaatctttgtaacagctatttatataatgatttagtttgagctcctctcttcattgggtgctttttttttttattttcgtcctctctagttctcagggtgttacaattagtctgaatgctacatctggcatggttacatcatttgaactctctgacaacactaacgaccaatct

SEQ ID NO: 434164 - DNA, 1404 bp, Homo sapiens
  misc_feature (1)..(1): n is a, c, g, or t
  misc_feature (7)..(7): n is a, c, g, or t
ngacgangcccggaatcgacctatggccagcagtcgtccccgccctgcttcaaacatttgggtttcaggagccgggcggaggtgactgccgcgtgtttgcgttgcacgcccaccgcccgaaacacggcggcggcctcagggctgctgcggcctcggcgggggcaggccccggcgcccgcccgcctcccggcctccatcatcccagggtgcaccgcggcgggcgcgggcgcgcggccatgttgcggtagtttgttgttttcttcctgcggaggcgaagggccagctgtggaccgcgaagcgcccggcttcgcctctgcctcctgcagccccctcccttccctgtcctccgtcacccgtacccgggcccggaccaggcacgtcggcccaccagctggcttggtgggggaggctgaaggccgggccccgcgagtgccatggcggccgccctgggagcgagcggaggagcaggcgccggagatgatgactttgaccagtttgataagcctggcgcggaacggtcgtggagaagaagagctgctgatgaggactgggacagtgaacttgaagatgatttacttggagaagatttgctatctggcaaaaagaatcagtcggatttgtcagatgaagagctaaatgatgatcttttgcagagtgataatgaagatgaagaaaatttcagttctcagggtgttacaattagtctgaatgctacatctggcatggttacatcatttgaactctctgacaacactaacgaccaatctggagaacaggaatctgagtatgaacaagaacaaggagaggatgaactggtttatcacaaatctgatggatcagaattgtatactcaagagtacccagaagaaggacagtatgaaggccacgaagctgagttgacagaagaccaaatagaatatgtggaagagccagaggaggagcagctttacactgatgaagtgttagacatcgagatcaatgaacctttagatgaatttacaggaggtatggaaacattggaacttcaaaaggacatcaaagaagaatcagatgaagaagaagaagatgatgaagaatctggacgattacgtttcaaaactgaaaggaaagaaggaacaattattaggctctcagatgtaactagagagagaaggaacattccagaaactttgggtaacttttttgcctgtctcccatcctcctttactctcatttcaacttcctccatagtattgctgtaattaatcaaagtaggcaaagaaggttgactaggtaattgcggctgccgtccggagagtggccggactttggagtgagtgctgtttatggtactgtaaaactcattctttaaaatcattgctgtttatggatttaaaatgcttgaataaaatgtttaagataatt

SEQ ID NO: 434165 - DNA, 4933 bp, Homo sapiens
  misc_feature (1)..(1): n is a, c, g, or t
  misc_feature (7)..(7): n is a, c, g, or t
ngacgangcccggaatcgacctatggccagcagtcgtccccgccctgcttcaaacatttgggtttcaggagccgggcggaggtgactgccgcgtgtttgcgttgcacgcccaccgcccgaaacacggcggcggcctcagggctgctgcggcctcggcgggggcaggccccggcgcccgcccgcctcccggcctccatcatcccagggtgcaccgcggcgggcgcgggcgcgcggccatgttgcggtagtttgttgttttcttcctgcggaggcgaagggccagctgtggaccgcgaagcgcccggcttcgcctctgcctcctgcagccccctcccttccctgtcctccgtcacccgtacccgggcccggaccaggcacgtcggcccaccagctggcttggtgggggaggctgaaggccgggccccgcgagtgccatggcggccgccctgggagcgagcggaggagcaggcgccggagatgatgactttgaccagtttgataagcctggcgcggaacggtcgtggagaagaagagctgctgatgaggactgggacagtgaacttgaagatgatttacttggagaagatttgctatctggcaaaaagaatcagtcggatttgtcagatgaagagctaaatgatgatcttttgcagagtgataatgaagatgaagaaaatttcagttctcagggtgttacaattagtctgaatgctacatctggcatggttacatcatttgaactctctgacaacactaacgaccaatctggagaacaggaatctgagtatgaacaagaacaaggagaggatgaactggtttatcacaaatctgatggatcagaattgtatactcaagagtacccagaagaaggacagtatgaaggccacgaagctgagttgacagaagaccaaatagaatatgtggaagagccagaggaggagcagctttacactgatgaagtgttagacatcgagatcaatgaacctttagatgaatttacaggaggtatggaaacattggaacttcaaaaggacatcaaagaagaatcagatgaagaagaagaagatgatgaagaatctggacgattacgtttcaaaactgaaaggaaagaaggaacaattattaggctctcagatgtaactagagagagaaggaacattccagaaactttggagctttcagcagaggccaaggcagcattgcttgaatttgaagaaagggagcgacagcataaacaaggacgctacagctccaggcggggaggacggcgaggaggtccgctgatgtgtcgtggtgtgggggaccagaggagagagagcaccgagaggggcaggatgaaggaccacagacctgcgctgcttcctacacagcctcctgtcgtgatacttccagaggaggaattaatgagcgacctgatgccctaagatgacataagctgttggaccttgctacctaaagcctctagagagccccaggctccccctccaccgcctccgccgcctcagcagcagccgatcagaagcctgttccagccgcagccgctgcagccgctgcttccggtgcagcacccgcaccacccatccccgcctcagggaatgcacatgcctccccagctagagaccccaaggatgatgatgaccccgccacccgtgactccacagcagcccaagaacatacacatcaacccgcacttcaaagggacggtggtcacgcctgttcaagtgcccttgctaccagttccgagccagccgagacctgccgtgggaccccagagattcccaggccctccagaatttccacagcatacacctggacctgttcccaacagtttcagccagcccccacgactccctctccaggaccagtggagagccccacccccgcctcaggatcgagaccctttcttcttaggagtttcaggtgaaccaagattcccgagccatctttttctggaacagcgaagtccccctccaccaccaccgcctcctacccttcttaacagtagccatcctgttcctactcagagtcctctaccattcactcagccaggaccagcatttaatcagcaaggacagcagccagtgttcccaagagagcggcccgtacgaccagccttgcagcctccaggtccggtggggattctgcactttagccagcctgggtcggcaaccacacggcccttcattcctcctagacagccgttcctgccaggcccaggacagccgtttctgcccacacacacacagcccaacctgcaggtaatgcatcctgagtgaacctccagggaaaaaatgtgtagcttcaaggctttgtgttccataaagtttcagatttttatttgagcctactaatttgtggttatttaaagaatagagtattagtctcaaatgtactgtttgttaaagacaacttttttcaacaatgttacttatctcaatacaagaaaaaaatgggaaaatgtcattttttgggaattgaaaaatgctacttattataattgtttaaagggtatactactaataaaattaggacatgttttgataatacatttgctcatctgtataaaatttcatgagaggtttaccagtggaaatactttgtcaaattatattcctgcagtagacagttttgaaaagagtctttgcatggagggaagaagatgttgctgttcactggttatttgaaggccttgagtgccctctgccgaccggcttctgcttcatgggttttcactggttatttgaaggccttgagtgccctctgcccatcggcttctgcttcatgggttgacatgcgtctgtaacatctttcttaccaagtgtatatttcttcttgtattgtagggttactattaaaatacatagcgatggtaaacttgaatcaactatttaaaaatacgtggaatacgtatctaagccaaaaacggaaaatgaatattatctagggtgttaaaggaagataaaatgtttttaagaatttttctttttattaaaaaaatgcaattaatacatccccattgcagaaattttcaagtatatataagaaaggaaattaaatactctcgttacctagaaacaattcaggagcttttttttttgtctttttttaaatgcacatcttctcgccacctgctttttccctccagtgtcacatatcatttgatcttttcatgtcagcgagttggttttgatgccatcgtttgagagtgctgtatgcggttccctttcatgctgtctgtgtggttgcatgtgtgtatactggtttcagtactttagtatcatagtgctacagggaacatgctttagagttatgagtttgtctgcatacctagttttccttaggacaattcaatcctagaattactggattaaatataaaatttaaggtaatagcttctggcttattactgcattttagatagtattaccttcatcagcaagtctaaaatgaagttttggtatcgctgaaagttcctttcttgtgttgaggttttttaggaaatgattgaagtgattatgcccggtgtaaccatttatgaactgttgtttctctttctttggaaatggaaggggccgttgcatcctccattgccccctccgcatcagcctcagcctcagcaacctcagcaacagcccccgccacagcaccagcctccgcaccagcccccgcaccagcccccgccccagcaccagcccccaccccagcacccaccacagcacccgccgcagcaccagcaccaccaccaccaccaccacctgtccgtcccgccccctcctttgatgccgatgtctcagccacagttccggcctcacgtacagaccgctcagcctcaggccagcagcagccggatgcagtgcccccagcgccaggggctccggcataatacaacttctcagaatgtaagcaagcggcccatgcagcaaatgcagcccactgcgccaaggaacagcaatttgcgtgaattacccatagcgccgtcacacgtgatagaaatgagcagcagccgctgctctgccacgccctcagcacaagtgaaacctatcgtcagcgcgtcaccaccctcgcgggccgtggcgggttccagaagctcacagggaaagacggaagtgaaagtcaagccagctagccctgtggctcaacctaaagaagaggcaaaaacagaaacagagtttcctgatgaagatgaggaaacaaggttatatcgcttaaagatagaagaacagaaacgcctaagagaagaaatcctgaaacagaaggagttacggcggcagcagcaggctggtgccaggaagaaggagctgctggagagactcgcgcagcaacagcagcagctgtacgctcccccacccccagcagagcaggaagagcaggcactgtcaccatcacccaccaacggtaacccactgttgccctttccaggtgcacaggtcagacaaaatgtgaagaacagacttcttgttaaaaaccaggatgtcagtatttcaaacgttcagcccaaaacatccaattttgtaccatccagtgccaacatgcagtatcaaggacaacagatgaaagcactgaaacatttgagacagaccagaacagttcctcaaagtcagactcagccgctgcataaagtgctcccgatcaaacctgcagatgtggaggagccagctgtcccccagactcctcgagtggcgtccatccagggccggccccaggacacaaagcctggcgtgaaaaggactgtcacgcacaggacaaacagtggtggtggagacgggccccacatcagctccaaggtcagggtgattaagctgtcaggtggggtaagttgacaagttttatgagagcctctttgagtctgtgtatcacatagaatgtcctcatttgcagagaatgtttttgaagaaagaattaaaagttacctctgttatagtcttgtaaccaa

SEQ ID NO: 434166 - DNA, 3535 bp, Homo sapiens
  misc_feature (1)..(1): n is a, c, g, or t
  misc_feature (7)..(7): n is a, c, g, or t
ngacgangcccggaatcgacctatggccagcagtcgtccccgccctgcttcaaacatttgggtttcaggagccgggcggaggtgactgccgcgtgtttgcgttgcacgcccaccgcccgaaacacggcggcggcctcagggctgctgcggcctcggcgggggcaggccccggcgcccgcccgcctcccggcctccatcatcccagggtgcaccgcggcgggcgcgggcgcgcggccatgttgcggtagtttgttgttttcttcctgcggaggcgaagggccagctgtggaccgcgaagcgcccggcttcgcctctgcctcctgcagccccctcccttccctgtcctccgtcacccgtacccgggcccggaccaggcacgtcggcccaccagctggcttggtgggggaggctgaaggccgggccccgcgagtgccatggcggccgccctgggagcgagcggaggagcaggcgccggagatgatgactttgaccagtttgataagcctggcgcggaacggtcgtggagaagaagagctgctgatgaggactgggacagtgaacttgaagatgatttacttggagaagatttgctatctggcaaaaagaatcagtcggatttgtcagatgaagagctaaatgatgatcttttgcagagtgataatgaagatgaagaaaatttcagttctcagggtgttacaattagtctgaatgctacatctggcatggttacatcatttgaactctctgacaacactaacgaccaatctggagaacaggaatctgagtatgaacaagaacaaggagaggatgaactggtttatcacaaatctgatggatcagaattgtatactcaagagtacccagaagaaggacagtatgaaggccacgaagctgagttgacagaagaccaaatagaatatgtggaagagccagaggaggagcagctttacactgatgaagtgttagacatcgagatcaatgaacctttagatgaatttacaggaggtatggaaacattggaacttcaaaaggacatcaaagaagaatcagatgaagaagaagaagatgatgaagaatctggacgattacgtttcaaaactgaaaggaaagaaggaacaattattaggctctcagatgtaactagagagagaaggaacattccagaaactttggagctttcagcagaggccaaggcagcattgcttgaatttgaagaaagggagcgacagcataaacaaggacgctacagctccaggcggggaggacggcgaggaggtccgctgatgtgtcgtggtgtgggggaccagaggagagagagcaccgagaggggcaggatgaaggaccacagacctgcgctgcttcctacacagcctcctgtcgtgccccaggctccccctccaccgcctccgccgcctcagcagcagccgatcagaagcctgttccagccgcagccgctgcagccgctgcttccggtgcagcacccgcaccacccatccccgcctcagggaatgcacatgcctccccagctagagaccccaaggatgatgatgaccccgccacccgtgactccacagcagcccaagaacatacacatcaacccgcacttcaaagggacggtggtcacgcctgttcaagtgcccttgctaccagttccgagccagccgagacctgccgtgggaccccagagattcccaggccctccagaatttccacagcatacacctggacctgttcccaacagtttcagccagcccccacgactccctctccaggaccagtggagagccccacccccgcctcaggatcgagaccctttcttcttaggagtttcaggtgaaccaagattcccgagccatctttttctggaacagcgaagtccccctccaccaccaccgcctcctacccttcttaacagtagccatcctgttcctactcagagtcctctaccattcactcagccaggaccagcatttaatcagcaaggacagcagccagtgttcccaagagagcggcccgtacgaccagccttgcagcctccaggtccggtggggattctgcactttagccagcctgggtcggcaaccacacggcccttcattcctcctagacagccgttcctgccaggcccaggacagccgtttctgcccacacacacacagcccaacctgcaggggccgttgcatcctccattgccccctccgcatcagcctcagcctcagcaacctcagcaacagcccccgccacagcaccagcctccgcaccagcccccgcaccagcccccgccccagcaccagcccccaccccagcacccaccacagcacccgccgcagcaccagcaccaccaccaccaccaccacctgtccgtcccgccccctcctttgatgccgatgtctcagccacagttccggcctcacgtacagaccgctcagcctcaggccagcagcagccggatgcagtgcccccagcgccaggggctccggcataatacaacttctcagaatgtaagcaagcggcccatgcagcaaatgcagcccactgcgccaaggaacagcaatttgcgtgaattacccatagcgccgtcacacgtgatagaaatgagcagcagccgctgctctgccacgccctcagcacaagtgaaacctatcgtcagcgcgtcaccaccctcgcgggccgtggcgggttccagaagctcacagggaaagacggaagtgaaagtcaagccagctagccctgtggctcaacctaaagaagaggcaaaaacagaaacagagtttcctgatgaagatgaggaaacaaggttatatcgcttaaagatagaagaacagaaacgcctaagagaagaaatcctgaaacagaaggagttacggcggcagcagcaggctggtgccaggaagaaggagctgctggagagactcgcgcagcaacagcagcagctgtacgctcccccacccccagcagagcaggaagagcaggcactgtcaccatcacccaccaacggtaacccactgttgccctttccaggtgcacaggtcagacaaaatgtgaagaacagacttcttgttaaaaaccaggatgtcagtatttcaaacgttcagcccaaaacatccaattttgtaccatccagtgccaacatgcagtatcaaggacaacagatgaaagcactgaaacatttgagacagaccagaacagttcctcaaagtcagactcagccgctgcataaagtgctcccgatcaaacctgcagatgtggaggagccagctgtcccccagactcctcgagtggcgtccatccagggccggccccaggacacaaagcctggcgtgaaaaggactgtcacgcacaggacaaacagtggtggtggagacgggccccacatcagctccaaggtcagggtgattaagctgtcaggtggggtaagttgacaagttttatgagagcctctttgagtctgtgtatcacatagaatgtcctcatttgcagagaatgtttttgaagaaagaattaaaagttacctctgttatagtcttgtaaccaa

SEQ ID NO: 434167 - DNA, 948 bp, Homo sapiens
tttagaatgagtgagcacacttttctagtcccatgtcatgcctataaaattacactgcctcgaattatgaaattcagggatcttgtacataattctaagtttgggacagaaatttacaagcatttctcatatatacatacatttatatatgtacatgttacatatatttagatgtattctcatatacatatgaaaatatttatgatgaatagaattataagatatgtatgtatcttgcactgaatcataatttgaaatatttcatgaattcatttacttctattgactcccaaaattctaactgcaagctagcttcagaacctgtgagaaccccaccccacccaagcagctgcctagatttgtctactgctatcattttgtgtaaagcagttgttctaacttgaatgagtctagaattcatcattaagattgtgatatttatagagcatccaatgtggagatcatgatactttaaatataaaaaggaaaatatgatagaactgttattgacaaatgcttataatgattgaagggaaagtatctcaacattgtatcagtcacatatatttctgttgctttcaccattttctattcctgttgtaagtttggtggtagatttagttttgtttggtttatctgttttgtttgtgttttgtctcctggcaattgattagtgttaatcattaaatctattttgacacaaggttttatatataattagatcagttttccactttattacaattaagaaatgagtaaaatatggatataaaaggagaattggattgaaaagacaaatacacatttacaaggtcatacctttggtaggacagacaattctatatagaatattctcttttgataatgaaaaaaattaaagagagcacaaactttgactatgtcaaagtatttttatttttaattttttgagacaaggtcttgctctgc

SEQ ID NO: 434168 - DNA, 740 bp, Homo sapiens
tttagaatgagtgagcacacttttctagtcccatgtcatgcctataaaattacactgcctcgaattatgaaattcagggatcttgtacataattctaagtttgggacagaaatttacaagcatttctcatatatacatacatttatatatgtacatgttacatatatttagatgtattctcatatacatatgaaaatatttatgatgaatagaattataagatatgtatgtatcttgcactgaatcataatttgaaatatttcatgaattcatttacttctattgactcccaaaattctaactgcaagctagcttcagaacctgtgagaaccccaccccacccaagcagctgcctagatttgtctactgctatcattttgtgtaaagcagttgttctaacttgaatgagtctagaattcatcattaagattgtgatatttattagattctgcctgtgtggtcattttaaaacatgtgtgacatatatcagtaccttcattcttctatattttgtgtctcctccaacctccaactttttttgttttttgaaaaatgtttctctaacacctcaacagtttaaggtaatttagtacacatatatcagtatttttgtgatctgaaaaagcaacccattttctaaattcatatttttcctaaaactttactatgtttttattttaagaggtttcctgttatatacactttttacacatgcaaataaactttataccaagtgagta

SEQ ID NO: 434169 - DNA, 2526 bp, Homo sapiens
gcagaagctggggcggctgagagcgcagcgcgggctcccgggagacgccggcccactgcccgcccgctcgccgcaggtaggcccggcccccgggaggtggggcgcggccaggtgtccccaggtagccgcctcctcccgtcctccgtcggccgcctccccggaccgaggcaggacctcaccccgcgcgtgttccccgggcgcccctctgcgaaccccaggcccttcccaggtttgcgcgcgggggccatccagaccctgcggagagcgaggcccggagcgtcgccgaggtttgagggcgccggagaccgagggcctggcggccgaaggaaccgccccaagaagagcctctggcccgggggctgctggaacatgtgcggggggacacagtttgtttgacagttgccagactatgtttacgcttctggttctactcagccaactgcccacagttaccctggggtttcctcattgcgcaagaggtccaaaggcttctaagcatgcgggagaagaagtgtttacatcaaaagaagaagcaaactttttcatacatagacgccttctgtataatagatttgatctggagctcttcactcccggcaacctagaaagagagtgcaatgaagaactttgcaattatgaggaagccagagagatttttgtggatgaagataaaacgattgcattttggcaggaatattcagctaaaggaccaaccacaaaatcagatggcaacagagagaaaatagatgttatgggccttctgactggattaattgctgctggagtatttttggttatttttggattacttggctactatctttgtatcactaagtgtaataggctacaacatccatgctcttcagccgtctatgaaagggggaggcacactccctccatcattttcagaagacctgaggaggctgccttgtctccattgccgccttctgtggaggatgcaggattaccttcttatgaacaggcagtggcgctgaccagaaaacacagtgtttcaccaccaccaccatatcctgggcacacaaaaggatttagggtatttaaaaaatctatgtctctcccatctcactgactaccttgtcattttggtataagaaatttgtgttatttgataggccgggcatggtggctcatgcctgtaatcccagcactttgggaggccaggagttcgagaccagcctggccaacatggtgaaacccggtctctactaaaaattcaaaaattacctaggcgtcatggggcatgcctgtagtcccacctacttgggaggctgaagcaggagaattgctcgaacctgggaggcagaggttgcagtaagctgagatcacgccactgcattccagcctgggcgacagagcaagactccatctcaaaaataaaataaaaaaagaaagaaagaaaagaagaagaaaagagaagaaggagaaggagatgaaggaggaggaggaggagaaggagaagaagaagaagaagaagaccacaaaagacatgactatccaactttttatgacaaactgcaaggaataaaggaagaataagtccatgtactgtaccacagaagttctgtctgcatcttggacctgaacttgatcattatcagcttgataagagactttttgactctatatccttgcagttaagaagaaagcacttttttgtaatgtttgttttaatggttcaaaaaaaatctttcttataaagagcataggtagaattagtgaactctttggatcctttgtacagataaaggttatagatttcttgtgttgaatattaaaaaagcaaggatgtctaaccattaagattatccaaagtcagtccactgtgcctggccccaagttttgcatcttttaatgccctctgaacaaatacatagagaaaactctcagaacaattaaaacctgcagagcaacagtgtcctccatgtcttaggtttcaagtttgcctctaaaattctaatccatatttttctacttctcagataatttatgtgtgtgtactcttcctagacgtacaagagactttttaatgctaaatatttgtcagtgcttaacaaaaactcaatttcacattactcatattgtttttgttttaattgaatgtgaattaaatttttattagttatttgatttggaatgttatgtatgccattaacactattaggggaatctctagcatttctgtatttttaaagaatttgattcttttgtagattctgcctgtgtggtcattttaaaacatgtgtgacatatatcagtaccttcattcttctatattttgtgtctcctccaacctccaactttttttgttttttgaaaaatgtttctctaacacctcaacagtttaaggtaatttagtacacatatatcagtatttttgtgatctgaaaaagcaacccattttctaaattcatatttttcctaaaactttactatgtttttattttaagaggtttcctgttatatacactttttacacatgcaaataaactttataccaagtgagta

SEQ ID NO: 434170 - DNA, 2363 bp, Homo sapiens
gcagaagctggggcggctgagagcgcagcgcgggctcccgggagacgccggcccactgcccgcccgctcgccgcaggtaggcccggcccccgggaggtggggcgcggccaggtgtccccaggtagccgcctcctcccgtcctccgtcggccgcctccccggaccgaggcaggacctcaccccgcgcgtgttccccgggcgcccctctgcgaaccccaggcccttcccaggtttgcgcgcgggggccatccagaccctgcggagagcgaggcccggagcgtcgccgaggtttgagggcgccggagaccgagggcctggcggccgaaggaaccgccccaagaagagcctctggcccgggggctgctggaacatgtgcggggggacacagtttgtttgacagttgccagactatgtttacgcttctggttctactcagccaactgcccacagttaccctggggtttcctcattgcgcaagaggtccaaaggcttctaagcatgcgggagaagaagtgtttacatcaaaagaagaagcaaactttttcatacatagacgccttctgtataatagatttgatctggagctcttcactcccggcaacctagaaagagagtgcaatgaagaactttgcaattatgaggaagccagagagatttttgtggatgaagataaaacgattgcattttggcaggaatattcagctaaaggaccaaccacaaaatcagatggcaacagagagaaaatagatgttatgggccttctgactggattaattgctgctggagtatttttggttatttttggattacttggctactatctttgtatcactaagtgtaataggctacaacatccatgctcttcagccgtctatgaaagggggaggcacactccctccatcattttcagaagacctgaggaggctgccttgtctccattgccgccttctgtggaggatgcaggattaccttcttatgaacaggcagtggcgctgaccagaaaacacagtgtttcaccaccaccaccatatcctgggcacacaaaaggatttagggtatttaaaaaatctatgtctctcccatctcactgactaccttgtcattttggtataagaaatttgtgttatttgataggccgggcatggtggctcatgcctgtaatcccagcactttgggaggccaggagttcgagaccagcctggccaacatggtgaaacccggtctctactaaaaattcaaaaattacctaggcgtcatggggcatgcctgtagtcccacctacttgggaggctgaagcaggagaattgctcgaacctgggaggcagaggttgcagtaagctgagatcacgccactgcattccagcctgggcgacagagcaagactccatctcaaaaataaaataaaaaaagaaagaaagaaaagaagaagaaaagagaagaaggagaaggagatgaaggaggaggaggaggagaaggagaagaagaagaagaagaagaccacaaaagacatgactatccaactttttatgacaaactgcaaggaataaaggaagaataagtccatgtactgtaccacagaagttctgtctgcatcttggacctgaacttgatcattatcagcttgataagagactttttgactctatatccttgcagttaagaagaaagcacttttttgtaatgtttgttttaatggttcaaaaaaaatctttcttataaagagcataggtagaattagtgaactctttggatcctttgtacagataaaggttatagatttcttgtgttgaatattaaaaaagcaaggatgtctaaccattaagattatccaaagtcaggctgggcgcagtggctcacgcctgtaatcccagcactttgggagggataggtgggcggatcacctgaggtcaggagtttgagaccagcctggccaacatggcaaaaccccgtctctacaaaaatacaaaagaaattagccagacatgatggcgggtgcctctaatcccagctactggggaggctgaggtgggagaatcgcttgaactcgggaggtggaggttgtagtgaggcgagattgtgccattgcactccaacctgggcgacagagtgagactccatctcaaaaaaaaaaaaaaaaaaaaagattatccaaaaagatattggacctactctttcttaggatttttttggcggggggttagaaatacttcacagaatttgacatttcagtataaatctgtgaccttaatataatcacttggttttatatgttaaattattgcacagcagtcatcatattttgcagagtttagttcttaactcttgctgtcagtcatgttttattataggtagtggggtcagtag

SEQ ID NO: 434171 - DNA, 894 bp, Homo sapiens
tttagaatgagtgagcacacttttctagtcccatgtcatgcctataaaattacactgcctcgaattatgaaattcagggatcttgtacataattctaagtttgggacagaaatttacaagcatttctcatatatacatacatttatatatgtacatgttacatatatttagatgtattctcatatacatatgaaaatatttatgatgaatagaattataagatatgtatgtatcttgcactgaatcataatttgaaatatttcatgaattcatttacttctattgactcccacagctgcctagatttgtctactgctatcattttgtgtaaagcagttgttctaacttgaatgagtctagaattcatcattaagattgtgatatttatagagcatccaatgtggagatcatgatactttaaatataaaaaggaaaatatgatagaactgttattgacaaatgcttataatgattgaagggaaagtatctcaacattgtatcagtcacatatatttctgttgctttcaccattttctattcctgttgtaagtttggtggtagatttagttttgtttggtttatctgttttgtttgtgttttgtctcctggcaattgattagtgttaatcattaaatctattttgacacaaggttttatatataattagatcagttttccactttattacaattaagaaatgagtaaaatatggatataaaaggagaattggattgaaaagacaaatacacatttacaaggtcatacctttggtaggacagacaattctatatagaatattctcttttgataatgaaaaaaattaaagagagcacaaactttgactatgtcaaagtatttttatttttaattttttgagacaaggtcttgctctgc

SEQ ID NO: 434172 - DNA, 2479 bp, Homo sapiens
cagtccgggttggcgcttgggtactggctgggtccgatgctgggtacgctgcgcgccatggagggcgaggacgtggaagacgaccagctgctgcagaagctcagggccagtcgccgccgcttccagaggcgcatgcagcggctgatagagaagtacaaccagcccttcgaggacaccccggtggtgcaaatggccacgctgacctacgagacgccacagggattgagaatttggggtggaagactaataaaggaaagaaacaaaggagagatccaggactcctccatgaagcccgcggacaggacagatggctccgtgcaagctgcagcctggggtcctgagcttccctcgcaccgcacagtcctgggagccgattcaaaaagcggtgaggtcgatgccacgtcagaccaggaagagtcagttgcttgggccttagcacctgcagtgcctcaaagccctttgaaaaatgaattaagaaggaaatacttgacccaagtggatatactgctacaaggtgcagagtattttgagtgtgcaggtaacagagctggaagggatgtacgtgtgactccgctgccttcactggcctcacctgccgtgcctgcccccggatactgcagtcgtatctccggaaagagtcctggtgacccagcgaaaccagcttcatctcccagagaatgggatcctttgcatccttcctccacagacatggccttagtacctagaaatgacagcctctccctacaagagaccagtagcagcagcttcttaagcagccagccctttgaagatgatgacatttgcaatgtgaccatcagtgacctgtacgcagggatgctgcactccatgagccggctgttgagcacaaagccatcaagcatcatctccaccaaaacgttcatcatgcaaaactggaactccaggaggaggcacagatataagagcaggatgaacaaaacatattgcaaaggagccagacgttctcagaggagctccaaggagaacttcataccctgctctgagcctgtgaaagggacaggggcattaagagattgcaagaacgtattagatgtttcttgccgtaagacaggtttaaaattggaaaaagcttttcttgaagtcaacagaccccaaatccataagttagatccaagttggaaggagcgcaaagtgacaccctcgaagtattcttccttgatttacttcgactccagtgcaacatataatcttgatgaggaaaatagatttaggacattaaaatggttaatttctcctgtaaaaatagtttccagaccaacaatacgacagggccatggagagaaccgtcagagggagattgaaatccgatttgatcagcttcatcgggaatattgcctgagtcccaggaaccagcctcgccggatgtgcctcccggactcctgggccatgaacatgtacagagggggtcctgcgagtcctggtggccttcagggcttagaaacccgcaggctgagtttaccttccagcaaagcaaaagcaaaaagtttaagtgaggcttttgaaaacctaggcaaaagatctctggaagcaggtaggtgcctgcccaagagcgattcatcttcatcacttccaaagaccaaccccacacacagcgcaactcgcccgcagcagacatctgaccttcacgttcagggaaatagttctggaatatttagaaagtcagtgtcacccagcaaaactctttcagtcccagataaagaagtgccaggccacggaaggaatcgttacgatgaaattaaagaagaatttgacaagcttcatcaaaagtattgcctcaaatctcctgggcagatgacagtgcctttatgtattggagtgtctacagataaagcaagtatggaagttcgatatcaaacagaaggcttcttaggaaaattaaatccagaccctcacttccagggtttccagaagttgccatcatcacccctggggtgcagaaaaagtctactgggctcaactgcaattgaggctccttcatctacatgtgttgctcgtgccatcacgagggatggcacgagggaccatcagttccctgcaaaaagacccaggctatcagaaccccagggctccggacgccagggcaattccctgggtgcctcagatggggtggacaacaccgtcagaccgggagaccagggcagctcttcacagcccaactcagaagagagaggagagaacacgtcttacaggatggaagagaaaagtgatttcatgctagaaaaattggaaactaaaagtgtgtagctaggttatttcggagtgttatttatcttcccacttgctctctgtttgtatttttgttttgtttttgattcttgagactgtgaggacttggttgacttctctgcccttaaagtaaatattagtgaaattggttccatcagagataacctcgagttcttggtgtagaaattatgtgaataaagttgctcaattagaa

SEQ ID NO: 434173 - DNA, 2382 bp, Homo sapiens
cagtccgggttggcgcttgggtactggctgggtccgatgctgggtacgctgcgcgccatggagggcgaggacgtggaagacgaccagctgctgcagaagctcagggccagtcgccgccgcttccagaggcgcatgcagcggctgatagagaagtacaaccagcccttcgaggacaccccggtggtgcaaatggccacgctgacctacgagacgccacagggattgagaatttggggtggaagactaataaaggaaagaaacaaaggagagatccagattcaaaaagcggtgaggtcgatgccacgtcagaccaggaagagtcagttgcttgggccttagcacctgcagtgcctcaaagccctttgaaaaatgaattaagaaggaaatacttgacccaagtggatatactgctacaaggtgcagagtattttgagtgtgcaggtaacagagctggaagggatgtacgtgtgactccgctgccttcactggcctcacctgccgtgcctgcccccggatactgcagtcgtatctccggaaagagtcctggtgacccagcgaaaccagcttcatctcccagagaatgggatcctttgcatccttcctccacagacatggccttagtacctagaaatgacagcctctccctacaagagaccagtagcagcagcttcttaagcagccagccctttgaagatgatgacatttgcaatgtgaccatcagtgacctgtacgcagggatgctgcactccatgagccggctgttgagcacaaagccatcaagcatcatctccaccaaaacgttcatcatgcaaaactggaactccaggaggaggcacagatataagagcaggatgaacaaaacatattgcaaaggagccagacgttctcagaggagctccaaggagaacttcataccctgctctgagcctgtgaaagggacaggggcattaagagattgcaagaacgtattagatgtttcttgccgtaagacaggtttaaaattggaaaaagcttttcttgaagtcaacagaccccaaatccataagttagatccaagttggaaggagcgcaaagtgacaccctcgaagtattcttccttgatttacttcgactccagtgcaacatataatcttgatgaggaaaatagatttaggacattaaaatggttaatttctcctgtaaaaatagtttccagaccaacaatacgacagggccatggagagaaccgtcagagggagattgaaatccgatttgatcagcttcatcgggaatattgcctgagtcccaggaaccagcctcgccggatgtgcctcccggactcctgggccatgaacatgtacagagggggtcctgcgagtcctggtggccttcagggcttagaaacccgcaggctgagtttaccttccagcaaagcaaaagcaaaaagtttaagtgaggcttttgaaaacctaggcaaaagatctctggaagcaggtaggtgcctgcccaagagcgattcatcttcatcacttccaaagaccaaccccacacacagcgcaactcgcccgcagcagacatctgaccttcacgttcagggaaatagttctggaatatttagaaagtcagtgtcacccagcaaaactctttcagtcccagataaagaagtgccaggccacggaaggaatcgttacgatgaaattaaagaagaatttgacaagcttcatcaaaagtattgcctcaaatctcctgggcagatgacagtgcctttatgtattggagtgtctacagataaagcaagtatggaagttcgatatcaaacagaaggcttcttaggaaaattaaatccagaccctcacttccagggtttccagaagttgccatcatcacccctggggtgcagaaaaagtctactgggctcaactgcaattgaggctccttcatctacatgtgttgctcgtgccatcacgagggatggcacgagggaccatcagttccctgcaaaaagacccaggctatcagaaccccagggctccggacgccagggcaattccctgggtgcctcagatggggtggacaacaccgtcagaccgggagaccagggcagctcttcacagcccaactcagaagagagaggagagaacacgtcttacaggatggaagagaaaagtgatttcatgctagaaaaattggaaactaaaagtgtgtagctaggttatttcggagtgttatttatcttcccacttgctctctgtttgtatttttgttttgtttttgattcttgagactgtgaggacttggttgacttctctgcccttaaagtaaatattagtgaaattggttccatcagagataacctcgagttcttggtgtagaaattatgtgaataaagttgctcaattagaa

SEQ ID NO: 434174 - DNA, 2356 bp, Homo sapiens
aagttattaccagtagttgagtcctgaactcacctatgaatattcagattttttttttcctggtctagcaatgctgtcataaacttctctagacatggtttttttgtgtgtgtgtgtctttttacattcttttggattattaacatagcaggaagtgaaaaagtgactttgaataacatcatggaggtgaaagtgactttgagtaggatcatgtaaagatttgtacattaatgagcttgccagtttgttccagaagccaaaaggtcagctatactcagaagctcttaaaaattctgacttctcttttttgatcagcctgcagtgcctcaaagccctttgaaaaatgaattaagaaggaaatacttgacccaagtggatatactgctacaaggtgcagagtattttgagtgtgcaggtaacagagctggaagggatgtacgtgtgactccgctgccttcactggcctcacctgccgtgcctgcccccggatactgcagtcgtatctccggaaagagtcctggtgacccagcgaaaccagcttcatctcccagagaatgggatcctttgcatccttcctccacagacatggccttagtacctagaaatgacagcctctccctacaagagaccagtagcagcagcttcttaagcagccagccctttgaagatgatgacatttgcaatgtgaccatcagtgacctgtacgcagggatgctgcactccatgagccggctgttgagcacaaagccatcaagcatcatctccaccaaaacgttcatcatgcaaaactggaactccaggaggaggcacagatataagagcaggatgaacaaaacatattgcaaaggagccagacgttctcagaggagctccaaggagaacttcataccctgctctgagcctgtgaaagggacaggggcattaagagattgcaagaacgtattagatgtttcttgccgtaagacaggtttaaaattggaaaaagcttttcttgaagtcaacagaccccaaatccataagttagatccaagttggaaggagcgcaaagtgacaccctcgaagtattcttccttgatttacttcgactccagtgcaacatataatcttgatgaggaaaatagatttaggacattaaaatggttaatttctcctgtaaaaatagtttccagaccaacaatacgacagggccatggagagaaccgtcagagggagattgaaatccgatttgatcagcttcatcgggaatattgcctgagtcccaggaaccagcctcgccggatgtgcctcccggactcctgggccatgaacatgtacagagggggtcctgcgagtcctggtggccttcagggcttagaaacccgcaggctgagtttaccttccagcaaagcaaaagcaaaaagtttaagtgaggcttttgaaaacctaggcaaaagatctctggaagcaggtaggtgcctgcccaagagcgattcatcttcatcacttccaaagaccaaccccacacacagcgcaactcgcccgcagcagacatctgaccttcacgttcagggaaatagttctggaatatttagaaagtcagtgtcacccagcaaaactctttcagtcccagataaagaagtgccaggccacggaaggaatcgttacgatgaaattaaagaagaatttgacaagcttcatcaaaagtattgcctcaaatctcctgggcagatgacagtgcctttatgtattggagtgtctacagataaagcaagtatggaagttcgatatcaaacagaaggcttcttaggaaaattaaatccagaccctcacttccagggtttccagaagttgccatcatcacccctggggtgcagaaaaagtctactgggctcaactgcaattgaggctccttcatctacatgtgttgctcgtgccatcacgagggatggcacgagggaccatcagttccctgcaaaaagacccaggctatcagaaccccagggctccggacgccagggcaattccctgggtgcctcagatggggtggacaacaccgtcagaccgggagaccagggcagctcttcacagcccaactcagaagagagaggagagaacacgtcttacaggatggaagagaaaagtgatttcatgctagaaaaattggaaactaaaagtgtgtagctaggttatttcggagtgttatttatcttcccacttgctctctgtttgtatttttgttttgtttttgattcttgagactgtgaggacttggttgacttctctgcccttaaagtaaatattagtgaaattggttccatcagagataacctcgagttcttggtgtagaaattatgtgaataaagttgctcaattagaa

SEQ ID NO: 434175 - DNA, 3091 bp, Homo sapiens
cagtccgggttggcgcttgggtactggctgggtccgatgctgggtacgctgcgcgccatggagggcgaggacgtggaagacgaccagctgctgcagaagctcagggccagtcgccgccgcttccagaggcgcatgcagcggctgatagagaagtacaaccagcccttcgaggacaccccggtggtgcaaatggccacgctgacctacgagacgccacagggattgagaatttggggtggaagactaataaaggaaagaaacaaaggagagatccaggactcctccatgaagcccgcggacaggacagatggctccgtgcaagctgcagcctggggtcctgagcttccctcgcaccgcacagtcctgggagccgattcaaaaagcggtgaggtcgatgccacgtcagaccaggaagagtcagttgcttgggccttagcacctgcagtgcctcaaagccctttgaaaaatgaattaagaaggaaatacttgacccaagtggatatactgctacaaggtgcagagtattttgagtgtgcaggtaacagagctggaagggatgtacgtgtgactccgctgccttcactggcctcacctgccgtgcctgcccccggatactgcagtcgtatctccggaaagagtcctggtgacccagcgaaaccagcttcatctcccagagaatgggatcctttgcatccttcctccacagacatggccttagtacctagaaatgacagcctctccctacaagagaccagtagcagcagcttcttaagcagccagccctttgaagatgatgacatttgcaatgtgaccatcagtgacctgtacgcagggatgctgcactccatgagccggctgttgagcacaaagccatcaagcatcatctccaccaaaacgttcatcatgcaaaactggaactccaggaggaggcacagatataagagcaggatgaacaaaacatattgcaaaggagccagacgttctcagaggagctccaaggagaacttcataccctgctctgagcctgtgaaagggacaggggcattaagagattgcaagaacgtattagatgtttcttgccgtaagacaggtttaaaattggaaaaagcttttcttgaagtcaacagaccccaaatccataagttagatccaagttggaaggagcgcaaagtgacaccctcgaagtattcttccttgatttacttcgactccagtgcaacatataatcttgatgaggaaaatagatttaggacattaaaatggttaatttctcctgtaaaaatagtttccagaccaacaatacgacagggccatggagagaaccgtcagagggagattgaaatccgatttgatcagcttcatcgggaatattgcctgagtcccaggaaccagcctcgccggatgtgcctcccggactcctgggccatgaacatgtacagagggggtcctgcgagtcctggtggccttcagggcttagaaacccgcaggctgagtttaccttccagcaaagcaaaagcaaaaagtttaagtgaggcttttgaaaacctaggcaaaagatctctggaagcaggtaggtgcctgcccaagagcgattcatcttcatcacttccaaagaccaaccccacacacagcgcaactcgcccgcagcagacatctgaccttcacgttcagggaaatagttctggaatatttagaaagtcagtgtcacccagcaaaactctttcagtcccagataaagaagtgccaggccacggaaggaatcgttacgatgaaattaaagaagaatttgacaagcttcatcaaaagtattgcctcaaatctcctgggcagatgacagtgcctttatgtattggagtgtctacagataaagcaagtatggaagttcgatatcaaacagaaggcttcttaggaaaattaaatccagaccctcacttccagggtttccagaagttgccatcatcacccctggggtgcagaaaaagtctactgggctcaactgcaattgaggctccttcatctacatgtgttgctcgtgccatcacgagggatggcacgagggaccatcagttccctgcaaaaagacccaggctatcagaaccccagggctccggacgccagggcaattccctgggtgcctcagatggggtggacaacaccgtcagaccgggagaccagggcagctcttcacagcccaactcagaagagagaggagagaacacgtcttacaggatggaagagaaaagtgatttcatgctagaaaaattggaaactaaaagtgtgtagctaggttatttcggagtgttatttatcttcccacttgctctctgtttgtatttttgttttgtttttgattcttgagactgtgaggacttggttgacttctctgcccttaaagtaaatattagtgaaattggttccatcagagataacctcgagttcttggtgtagaaattatgtgaataaagttgctcaattagaatttttagggttctctttgataggcctgtttttctgatatgtgtgttttatggggggggggttatttgtttgtttgttagttggtttgtttttcagacagtctctctctatcgcccaggctggagtgcggtggcacaatcttggctcactgcaacttccgcctcccgggttcaagcgattcttctgcctcagcctcccgagtagctgggattacaggcgcgcgccaccacgcccggctaatttttgtagttttagtagagacggggtttcaccatattgaccaggctggtctcgagctcctggcctcgtgatccatctgcctcggcctcccaaagtgctgggattataggcgtgagccactgctcccagccgtgtgttcttttttaaatttagatatgtccagagaatcctctctcctgtttcccatttcattcgagaatattgtttgcttgtgagacgtaagttcgagccctgcatgcaatgacccttgaaggaaaataaacagtcctggtggtcccagacgctcctgcagccacagcgcctgtgactcctcatgattcttactgaagctgttgatgacaggatatcatggtgacgtttttgtaatgaaata

SEQ ID NO: 434176 - DNA, 3227 bp, Homo sapiens
cagtccgggttggcgcttgggtactggctgggtccgatgctgggtacgctgcgcgccatggagggcgaggacgtggaagacgaccagctgctgcagaagctcagggccagtcgccgccgcttccagaggcgcatgcagcggctgatagagaagtacaaccagcccttcgaggacaccccggtggtgcaaatggccacgctgacctacgagacgccacagggattgagaatttggggtggaagactaataaaggaaagaaacaaaggagagatccaggactcctccatgaagcccgcggacaggacagatggctccgtgcaagctgcagcctggggtcctgagcttccctcgcaccgcacagtcctgggagccgattcaaaaagcggtgaggtcgatgccacgtcagaccaggaagagtcagttgcttgggccttagcacctgcagtgcctcaaagccctttgaaaaatgaattaagaaggaaatacttgacccaagtggatatactgctacaaggtgcagagtattttgagtgtgcaggtaacagagctggaagggatgtacgtgtgactccgctgccttcactggcctcacctgccgtgcctgcccccggatactgcagtcgtatctccggaaagagtcctggtgacccagcgaaaccagcttcatctcccagagaatgggatcctttgcatccttcctccacagacatggccttagtacctagaaatgacagcctctccctacaagagaccagtagcagcagcttcttaagcagccagccctttgaagatgatgacatttgcaatgtgaccatcagtgacctgtacgcagggatgctgcactccatgagccggctgttgagcacaaagccatcaagcatcatctccaccaaaacgttcatcatgcaaaactggaactccaggaggaggcacagatataagagcaggatgaacaaaacatattgcaaaggagccagacgttctcagaggagctccaaggagaacttcataccctgctctgagcctgtgaaagggacaggggcattaagagattgcaagaacgtattagatgtttcttgccgtaagacaggtttaaaattggaaaaagcttttcttgaagtcaacagaccccaaatccataagttagatccaagttggaaggagcgcaaagtgacaccctcgaagtattcttccttgatttacttcgactccagtgcaacatataatcttgatgaggaaaatagatttaggacattaaaatggttaatttctcctgtaaaaatagtttccagaccaacaatacgacagggccatggagagaaccgtcagagggagattgaaatccgatttgatcagcttcatcgggaatattgcctgagtcccaggaaccagcctcgccggatgtgcctcccggactcctgggccatgaacatgtacagagggggtcctgcgagtcctggtggccttcagggcttagaaacccgcaggctgagtttaccttccagcaaagcaaaagcaaaaagtttaagtgaggcttttgaaaacctaggcaaaagatctctggaagcaggtaggtgcctgcccaagagcgattcatcttcatcacttccaaagaccaaccccacacacagcgcaactcgcccgcagcagacatctgaccttcacgttcagggaaatagttctggaatatttagaaagtcagtgtcacccagcaaaactctttcagtcccagataaagaagtgccaggccacggaaggaatcgttacgatgaaattaaagaagaatttgacaagcttcatcaaaagtattgcctcaaatctcctgggcagatgacagtgcctttatgtattggagtgtctacagataaagcaagtatggaagttcgatatcaaacagaaggcttcttaggaaaattaaatccagaccctcacttccagggtttccagaagttgccatcatcacccctggggtgcagaaaaagtctactgggctcaactgcaattgaggctccttcatctacatgtgttgctcgtgccatcacgagggatggcacgagggaccatcagttccctgcaaaaagacccaggctatcagaaccccagggctccggacgccagggcaattccctgggtgcctcagatggggtggacaacaccgtcagaccgggagaccagggcagctcttcacagcccaactcagaagagagaggagagaacacgtcttacaggatggaagagaaaagtgatttcatgctagaaaaattggaaactaaaagtgtgtagctaggttatttcggagtgttatttatcttcccacttgctctctgtttgtatttttgttttgtttttgattcttgagactgtgaggacttggttgacttctctgcccttaaagtaaatattagtgaaattggttccatcagagataacctcgagttcttggtgtagaaattatgtgaataaagttgctcaattagaaacaaaaaaaaaaaaaaaaaaaaaaaaaaaaaccccggggcgctcttctttgtgtgcgggtgtgcgcgggaaaaggagggttatggaaaggggccccgtgtgggccctagcggtgttttcccgtgaaccccagtctttctctgtgttcacacaggggggctaaatatctctgccgcggttcccctcttagagggggagtcgcgttataatattggcgatataaagcccggggtttaacccctggtctttaattggaattcgcgggaagaaagcgcacacagaacagcgcaacacaagacacaacgggcggagcacccgcccccagcaaaacaagcaagccgacagcggggggctccaaccacaacagtgtcgggcccaccaacacagacgccggagagcaacaggcgaaaaagagacaaaaacacaaaccgtcgccccaacaacataaacaaacgcagaaaaaatgggagggagggaggcaacgaaggggcagggggggggaagaggggaaggacaagagctatagaaaaagagattgatggagagaggtaggggcagtagacgggagccgactgacgatagaccgaaggatggagcgaggcgaagaactaaatgcaagtgaagagaaaaagagagaaggagcgggagaggaggcgggtggtaggacggcaccgaataggcgaagcgaggggacggaagaggatgagagagagtggggacactagaaggaagcagtgaggcgagagaga

SEQ ID NO: 434177 - DNA, 1531 bp, Homo sapiens
cagtccgggttggcgcttgggtactggctgggtccgatgctgggtacgctgcgcgccatggagggcgaggacgtggaagacgaccagctgctgcagaagctcagggccagtcgccgccgcttccagaggcgcatgcagcggctgatagagaagtacaaccagcccttcgaggacaccccggtggtgcaaatggccacgctgacctacgagacgccacagggattgagaatttggggtggaagactaataaaggaaagaaacaaaggagagatccaggactcctccatgaagcccgcggacaggacagatggctccgtgcaagctgcagcctggggtcctgagcttccctcgcaccgcacagtcctgggagccgattcaaaaagcggtgaggtcgatgccacgtcagaccaggaagagtcagttgcttgggccttagcacctgcagtgcctcaaagccctttgaaaaatgaattaagaaggaaatacttgacccaagtggatatactgctacaaggtgcagagtattttgagtgtgcaggtaacagagctggaagggatgtacgtgtgactccgctgccttcactggcctcacctgccgtgcctgcccccggatactgcagtcgtatctccggaaagagtcctggtgacccagcgaaaccagcttcatctcccagagaatgggatcctttgcatccttcctccacagacatggccttagtacctagaaatagttctggaatatttagaaagtcagtgtcacccagcaaaactctttcagtcccagataaagaagtgccaggccacggaaggaatcgttacgatgaaattaaagaagaatttgacaagcttcatcaaaagtattgcctcaaatctcctgggcagatgacagtgcctttatgtattggagtgtctacagataaagcaagtatggaagttcgatatcaaacagaaggcttcttaggaaaattaaatccagaccctcacttccagggtttccagaagttgccatcatcacccctggggtgcagaaaaagtctactgggctcaactgcaattgaggctccttcatctacatgtgttgctcgtgccatcacgagggatggcacgagggaccatcagttccctgcaaaaagacccaggctatcagaaccccagggctccggacgccagggcaattccctgggtgcctcagatggggtggacaacaccgtcagaccgggagaccagggcagctcttcacagcccaactcagaagagagaggagagaacacgtcttacaggatggaagagaaaagtgatttcatgctagaaaaattggaaactaaaagtgtgtagctaggttatttcggagtgttatttatcttcccacttgctctctgtttgtatttttgttttgtttttgattcttgagactgtgaggacttggttgacttctctgcccttaaagtaaatattagtgaaattggttccatcagagataacctcgagttcttggtgtagaaattatgtgaataaagttgctcaattagaa

SEQ ID NO: 434178 - DNA, 1989 bp, Homo sapiens
caggcaacagctggaatgggctttcctccactaggaaccctgaaattgagtaatctagggtgaattaatactgctgtcttcccttcctccctttggatctaatatcataaacgtttttaaagaactggaagagggtgagtgtgtagagaaaaggccaagtaggaaagttacaggtgagattaatgaattcatactgttactgtataaatacacaatttttttaaacagcaccatttccaagttatacacaatatgattatgacttggcacaacttttaaaggtggaaaaggctagttgctagttcagtaataaaatacctggtacatagaacgataaggagctgtattctacctgctacacattgtgcattttacacctccagctaggacagaaacaagccacaagcggggaatacccgcccaaattaatactggaaagtttacaaaaccttcacttctcataagggtgatgctaccagcggcttgcttcacctggaattagagtaactgatttttaaagacaactgagaatattaactcgcttcaaacaataaaatagtcattttgccgacatttcataaaatcgccagttttaagctcagttcagaggcttttaaaaaaatattctagacctagtaaagtgcctccattcataaaatgaaacatccaagattgagacaatttcatactgatgcgcatctaaaataggtcgacgtatacagtaaataaacagcgcctctaagttgccatatttcagttagtggaatacacacccagccttcgccgttctggatgtgcaaactagaaactgaagacaaatggggatttcagcgtctagtcccaatcgttcagcacggaagtactccacacggtcggctgcttttcaaaaaccaccaggacgacgtcccatgtcgagccgaccgctgagccgcacgcctccccacggcgggggcgagatggtgcgcagacctagcggtgcgaggggcggcggcgaccctgggcggccgggagcccgggccttcagcgcagcttcttgccaggcgggccgtccctggcgctgcggggcggcgggcgggcgggcggcggcggcactttggagagcgggcagtacttgatggtgtgcgcgttgtcgccgctggcgccgcacaggggacacgtgtagcggcgcagcacgggacacagcactcgcccgtcggggcccttgaggatatgggtggtgtagagcgccatcgcctccttgttgttccggcagaacacgcacacctgcagctcgggcttcagcagccgggcggccgccgccccggaggccgcgtgcagccggggctcggccgcccacgccggggcccgctcctcgcgcggcgtcgcctcgctggtggtggtggcggcggcggcggcggcgggcgcgcagcccagcagcacggcggcggcacgacccgcgaacgggctcagctcggcgaagcgctcctccagcagcccggcctcggcggggcccgcgcacagctccagcgcgcgcaattccagcgcgctccccaggtagcggccccgggaccccggctcgtcgctgtcgtcgtcgtcgtcctcgtcgtagtcgggcggccccagcgccggccccagcgccccaggcccggcccccgtgtggggggagcagcaggacgacgaggaggaggagggcggggagccgccgccgccgttcccaccgcgggcgcagccgaagcgcggctcgccgtccaccgctttggtgatgagcgtggcgagccccaggtagtcgttccaggagctgaagggctgcgggtgcgccgggcccggggcgctcacgtagcgggcgctgggcacgagcgccatgggcgggggggcgcggccgcggcggggcgagcggggcgcccaggggaaagcctccatgggcgggctgcgggccgcgcgccgcctccccgccgccggcgcgggccggacggaagggacacgccgagcctgcccgccggcctgccgcgg

SEQ ID NO: 434179 - DNA, 2244 bp, Homo sapiens
  misc_feature (307)..(307): n is a, c, g, or t
tttacaaaaattattaacgccggccatttttcccattggccccccaaggggggggcacctgtttttggaaaggggacacctgggggggcgcctcttttgcattattaccccacgcgggataaaggggaattttttccaaaagcgcttttaattgggggaaccccgaggtttttccgagtccgcgttttttaaaaccggccccctttttgttaaaacccccccttaaagggggatttgcccaaaagacgttaaatatgggccccagagaaaaaagtttaagggtataaaaaatttggggaaaaagggnaaaaaaatattttttttttttttttttttttttttttttttttttttttttttttttttttttttttttttttttttttttttttttttttttttttttttttttttttttttttttttttttttttttttttttttttttttgttactgtataaatacacaatttttttaaacagcaccatttccaagttatacacaatatgattatgacttggcacaacttttaaaggtggaaaaggctagttgctagttcagtaataaaatacctggtacatagaacgataaggagctgtattctacctgctacacattgtgcattttacacctccagctaggacagaaacaagccacaagcggggaatacccgcccaaattaatactggaaagtttacaaaaccttcacttctcataagggtgatgctaccagcggcttgcttcacctggaattagagtaactgatttttaaagacaactgagaatattaactcgcttcaaacaataaaatagtcattttgccgacatttcataaaatcgccagttttaagctcagttcagaggcttttaaaaaaatattctagacctagtaaagtgcctccattcataaaatgaaacatccaagattgagacaatttcatactgatgcgcatctaaaataggtcgacgtatacagtaaataaacagcgcctctaagttgccatatttcagttagtggaatacacacccagccttcgccgttctggatgtgcaaactagaaactgaagacaaatggggatttcagcgtctagtcccaatcgttcagcacggaagtactccacacggtcggctgcttttcaaaaaccaccaggacgacgtcccatgtcgagccgaccgctgagccgcacgcctccccacggcgggggcgagatggtgcgcagacctagcggtgcgaggggcggcggcgaccctgggcggccgggagcccgggccttcagcgcagcttcttgccaggcgggccgtccctggcgctgcggggcggcgggcgggcgggcggcggcggcactttggagagcgggcagtacttgatggtgtgcgcgttgtcgccgctggcgccgcacaggggacacgtgtagcggcgcagcacgggacacagcactcgcccgtcggggcccttgaggatatgggtggtgtagagcgccatcgcctccttgttgttccggcagaacacgcacacctgcagctcgggcttcagcagccgggcggccgccgccccggaggccgcgtgcagccggggctcggccgcccacgccggggcccgctcctcgcgcggcgtcgcctcgctggtggtggtggcggcggcggcggcggcgggcgcgcagcccagcagcacggcggcggcacgacccgcgaacgggctcagctcggcgaagcgctcctccagcagcccggcctcggcggggcccgcgcacagctccagcgcgcgcaattccagcgcgctccccaggtagcggccccgggaccccggctcgtcgctgtcgtcgtcgtcgtcctcgtcgtagtcgggcggccccagcgccggccccagcgccccaggcccggcccccgtgtggggggagcagcaggacgacgaggaggaggagggcggggagccgccgccgccgttcccaccgcgggcgcagccgaagcgcggctcgccgtccaccgctttggtgatgagcgtggcgagccccaggtagtcgttccaggagctgaagggctgcgggtgcgccgggcccggggcgctcacgtagcgggcgctgggcacgagcgccatgggcgggggggcgcggccgcggcggggcgagcggggcgcccaggggaaagcctccatgggcgggctgcgggccgcgcgccgcctccccgccgccggcgcgggccggacggaagggacacgccgagcctgcccgccggcctgccgcgg

SEQ ID NO: 434180 - DNA, 1297 bp, Homo sapiens
caggcaacagctggaatgggctttcctccactaggaaccctgaaattgagtaatctagggtgaattaatactgctgtcttcccttcctccctttggatctaatatcataaacgtttttaaagaactggaagagggtgagtgtgtagagaaaaggccaagtaggaaagttacaggtgagattaatgaattcatactgttactgtataaatacacaatttttttaaacagcaccatttccaagttatacacaatatgattatgacttggcacaacttttaaaggtggaaaaggctagttgctagttcagtaataaaatacctggtacatagaacgataaggagctgtattctacctgctacacattgtgcattttacacctccagctaggacagaaacaagccacaagcggggaatacccgcccaaattaatactggaaagtttacaaaaccttcacttctcataagggtgatgctaccagcggcttgcttcacctggaattagagtaactgatttttaaagacaactgagaatattaactcgcttcaaacaataaaatagtcattttgccgacatttcataaaatcgccagttttaagctcagttcagaggcttttaaaaaaatattctagacctagtaaagtgcctccattcataaaatgaaacatccaagattgagacaatttcatactgatgcgcatctaaaataggtcgacgtatacagtaaataaacagcgcctctaagttgccatatttcagttagtggaatacacacccagccttcgccgttctggatgtgcaaactagaaactgaagacaaatggggatttcagcgtctagtcccaatcgttcagcacggaagtactccacacggtcggctgcttttcaaaaaccaccaggacgacgtcccatgtcgagccgaccgctgagccgcacgcctccccacggcggggagcagcaggacgacgaggaggaggagggcggggagccgccgccgccgttcccaccgcgggcgcagccgaagcgcggctcgccgtccaccgctttggtgatgagcgtggcgagccccaggtagtcgttccaggagctgaagggctgcgggtgcgccgggcccggggcgctcacgtagcgggcgctgggcacgagcgccatgggcgggggggcgcggccgcggcggggcgagcggggcgcccaggggaaagcctccatgggcgggctgcgggccgcgcgccgcctccccgccgccggcgcgggccggacggaagggacacgccgagcctgcccgccggcctgccgcgg

SEQ ID NO: 434181 - DNA, 1893 bp, Homo sapiens
caggcaacagctggaatgggctttcctccactaggaaccctgaaattgagtaatctagggtgaattaatactgctgtcttcccttcctccctttggatctaatatcataaacgtttttaaagaactggaagagggtgagtgtgtagagaaaaggccaagtaggaaagttacaggtgagattaatgaattcatactgttactgtataaatacacaatttttttaaacagcaccatttccaagttatacacaatatgattatgacttggcacaacttttaaaggtggaaaaggctagttgctagttcagtaataaaatacctggtacatagaacgataaggagctgtattctacctgctacacattgtgcattttacacctccagctaggacagaaacaagccacaagcggggaatacccgcccaaattaatactggaaagtttacaaaaccttcacttctcataagggtgatgctaccagcggcttgcttcacctggaattagagtaactgatttttaaagacaactgagaatattaactcgcttcaaacaataaaatagtcattttgccgacatttcataaaatcgccagttttaagctcagttcagaggcttttaaaaaaatattctagacctagtaaagtgcctccattcataaaatgaaacatccaagattgagacaatttcatactgatgcgcatctaaaataggtcgacgtatacagtaaataaacagcgcctctaagttgccatatttcagttagtggaatacacacccagccttcgccgttctggatgtgcaaactagaaactgaagacaaatggggatttcagcgtctagtcccaatcgttcagcacggaagtactccacacggtcggctgcttttcaaaaaccaccaggacgacgtcccatgtcgagccgaccgctgagccgcacgcctccccacggcgggggcgagatggtgcgcagacctagcggtgcgaggggcggcggcgacctttggagagcgggcagtacttgatggtgtgcgcgttgtcgccgctggcgccgcacaggggacacgtgtagcggcgcagcacgggacacagcactcgcccgtcggggcccttgaggatatgggtggtgtagagcgccatcgcctccttgttgttccggcagaacacgcacacctgcagctcgggcttcagcagccgggcggccgccgccccggaggccgcgtgcagccggggctcggccgcccacgccggggcccgctcctcgcgcggcgtcgcctcgctggtggtggtggcggcggcggcggcggcgggcgcgcagcccagcagcacggcggcggcacgacccgcgaacgggctcagctcggcgaagcgctcctccagcagcccggcctcggcggggcccgcgcacagctccagcgcgcgcaattccagcgcgctccccaggtagcggccccgggaccccggctcgtcgctgtcgtcgtcgtcgtcctcgtcgtagtcgggcggccccagcgccggccccagcgccccaggcccggcccccgtgtggggggagcagcaggacgacgaggaggaggagggcggggagccgccgccgccgttcccaccgcgggcgcagccgaagcgcggctcgccgtccaccgctttggtgatgagcgtggcgagccccaggtagtcgttccaggagctgaagggctgcgggtgcgccgggcccggggcgctcacgtagcgggcgctgggcacgagcgccatgggcgggggggcgcggccgcggcggggcgagcggggcgcccaggggaaagcctccatgggcgggctgcgggccgcgcgccgcctccccgccgccggcgcgggccggacggaagggacacgccgagcctgcccgccggcctgccgcgg

SEQ ID NO: 434182 - DNA, 4071 bp, Homo sapiens
  misc_feature (222)..(222): n is a, c, g, or t
  misc_feature (296)..(296): n is a, c, g, or t
  misc_feature (434)..(434): n is a, c, g, or t
  misc_feature (532)..(532): n is a, c, g, or t
gccagctgctgcgcatgcgccggccggggccccgcccccatgcgccgcgcggctccagggccacgttccagggtcgggtttggtggattcctcagtccctgccgccgcggggcgccctgggatagcggcggggcctcctggtgagcgcgcgccggggcggcctccgggaagtgggagacgctgcgggtcctgggcccaggccttgggatgggcgggaaggcntggccgcgccgggctgtgggcactgcaggaggcccctgtgcaggtggagatcgccgcggccctggcgggactcnttgctggctcttgggcgcgctgatgcccatcatctccctgagtttctgagccctatctctcatgtgtcagtggtcaccgccgaatccagacactccggccctgttccggaagagccctgatatccgtggctccatggngctgtctgtcgataccatgcactctagctctcaaggaggaaaggttttgtggaagggaatagagacttggaataacagacctgtgctaattagagacnggaaagatggaacaaggggagtgacccttctccacccccatatcctaatgtgctctctctctatccagaacagatctcggcccctttccaaacactcctgatgcctcatttgcctctcgcctcttttcgaccaccattttgggggctgaggcactcacggggcctccccaggtttcactccgtttctacacagtcggagccccatggatctcccatctcccggaggaaccgtgaagccaaacagaagcgcctgcgagagaagcaggcgactctggaggctgagatagcaggggagagcaagtcacctgcagaatccattaaggcctggaggcctaaggagttagtattgtatgaaatccctacgaaacccggtgaaaagaaagatgtctctgggcccctgcctcctgcatacagcccccgatatgttgaggctgcctggtacccgtggtgggtacgagagggcttcttcaaaccagaatatcaggcccggctgccccaagctacaggggagaccttttccatgtgtatcccacctcccaatgtcactggctccctgcacattggccacgcactcacggtggccatacaggatgccctcgtgcgctggcaccggatgcgtggggatcaagtgctgtgggtccctggttcagatcatgcaggaattgctacacaagctgtggtggagaaacaactgtggaaggaacggggagtgaggagacatgagctgagccgggaggccttccttagggaggtgtggcagtggaaggaggcgaaaggtggagagatctgtgagcagctgcgagctctgggtgcctccctggactgggatcgagagtgttttaccatggatgttggctcctcagtggctgtgactgaagcttttgtgcggctctacaaggcggggttgctgtaccggaaccatcagcttgtcaactggtcatgtgctttaagatcagccatctcggacattgaggtggagaaccggcccctgcctggccacacacagcttcgactgcctggctgccccacccccgtgtcttttggcctcctattttctgttgccttccccgtggatggagagcctgatgcagaggttgtggtaggaaccacaaggccagagacgctgcctggagatgtggctgtggccgttcatccagacgactcgcgatacacacatctacacgggcgacagcttcgtcaccccttgatggggcagcctcttcccctcatcacagactatgctgttcagccacatgtgggcacgggggcagtgaaggtgactccagctcacagtcctgccgatgctgagatgggggcccgacatggcttgagccccttgaatgtcattgcggaggatgggaccatgacctccctctgcggggactggttgcagggtcttcaccggtttgtggcccgggaaaagataatgtctgtgctgagtgaacggggcctgttccggggcctccagaaccaccccatggtactgcccatctgcagccgttctggggatgtgatagaatacctgctgaagaaccagtggtttgtccgctgccaggaaatgggggcccgagctgccaaggctgtggagtcgggggccctggagctcagtccctccttccaccagaagaactggcagcactggttttcccatattggggactggtgtgtctcccggcagctgtggtggggccatcagattccagcctacctggttgtagaggaccatgcgcagggagaagaggactgttgggtggttgggcggtcagaggctgaggccagagaggtagcagcggaactgacagggaggccaggggcagagctgaccctggagagggatcctgatgtcctagacacatggttttcttctgccctgttccccttttctgccctgggctggccccaagagaccccagaccttgctcgtttctaccccctgtcacttttggaaacgggcagcgaccttctgctgttctgggtgggccgcatggtcatgttggggacccagctcacagggcagctgcccttcagcaaggtgcttcttcatcccatggttcgggacaggcagggccggaagatgagcaagtccctggggaatgtgctggacccaagagacatcatcagtggggtggagatgcagttgctgcaggaaaagctgagaagcggaaatttggaccctgcagagctggccattgtggctgcagcacagaaaaaggactttcctcacgggatccctgagtgtgggacagatgccctgagattcacactctgctcccatggagttcaggcgggcgacttgcacctgtcagtctctgaggtccagagctgccgacatttctgcaacaagatctggaatgctcttcgctttatcctcaatgctttaggggagaaatttgtgccacagcctgctgaggagctgtctccctcctccccgatggatgcctggatcctgagccgccttgccctggctgcccaggagtgtgagcggggcttcctcacccgagagctctcgctcgtcactcatgccctgcaccacttctggcttcacaacctctgtgacgtctacctggaggctgtgaagcccgtgctgtggcactcgccccgccccctggggccccctcaggtcctgttctcctgcgctgacctcggcctccgcctcctggccccactgatgcccttcctggctgaagagctctggcagaggctgccccccaggcctggttgcccccctgcccccagcatctcggttgccccctaccccagcgcctgcagcttggagcactggcgccagccagagctggagcggcgcttctcccgggtccaagaggtcgtgcaggtgctaagggctctccgagccacgtaccagctcaccaaagcccggccccgagtgctgctgcagagctcagagcctggggaccagggcctcttcgaggccttcttggagcccctgggcaccctgggctactgtggggctgtgggcctgttacccccaggcgcagcagctccctccggctgggcccaggctccactcagtgacacggctcaagtctacatggagctgcagggcctggtggacccgcagatccagctacctctgttagccgcccgaaggtacaagttgcagaagcagcttgatagcctcacagccaggaccccatcagaaggggaggcagggactcagaggcaacaaaagctttcttccctccagctggaattgtcaaaactggacaaggcagcctctcacctccggcagctgatggatgagcctccagccccagggagcccggagctctaactcatcatccccatcagttttcctccctctcagacctgtctttgaggacaaacagatttgtcagctgtcagggtgcagtgggacgtcagagactatgtggtccatcgccttcattgtgtaaatgaggacacagactggcttggtcgcagtgactgtggtgtccttgagatgctcacattactgcccggcctgcctcccacctggaagtctgggaatgaggagattgagataaacttttgaaatccca

SEQ ID NO: 434183 - DNA, 3400 bp, Homo sapiens
gccagctgctgcgcatgcgccggccggggccccgcccccatgcgccgcgcggctccagggccacgttccagggtcgggtttggtggattcctcagtccctgccgccgcggggcgccctgggatagcggcggggcctcctgaacagatctcggcccctttccaaacactcctgatgcctcatttgcctctcgcctcttttcgaccaccattttgggggctgaggcactcacggggcctccccaggtttcactccgtttctacacagtcggagccccatggatctcccatctcccggaggaaccgtgaagccaaacagaagcgcctgcgagagaagcaggcgactctggaggctgagatagcaggggagagcaagtcacctgcagaatccattaaggcctggaggcctaaggagttagtattgtatgaaatccctacgaaacccggtgaaaagaaagatgtctctgggcccctgcctcctgcatacagcccccgatatgttgaggctgcctggtacccgtggtgggtacgagagggcttcttcaaaccagaatatcaggcccggctgccccaagctacaggggagaccttttccatgtgtatcccacctcccaatgtcactggctccctgcacattggccacgcactcacggtggccatacaggatgccctcgtgcgctggcaccggatgcgtggggatcaagtgctgtgggtccctggttcagatcatgcaggaattgctacacaagctgtggtggagaaacaactgtggaaggaacggggagtgaggagacatgagctgagccgggaggccttccttagggaggtgtggcagtggaaggaggcgaaaggtggagagatctgtgagcagctgcgagctctgggtgcctccctggactgggatcgagagtgttttaccatggatgttggctcctcagtggctgtgactgaagcttttgtgcggctctacaaggcggggttgctgtaccggaaccatcagcttgtcaactggtcatgtgctttaagatcagccatctcggacattgaggtggagaaccggcccctgcctggccacacacacctcttcccctcatcacagactatgctgttcagccacatgtgggcacgggggcagtgaaggtgactccagctcacagtcctgccgatgctgagatgggggcccgacatggcttgagccccttgaatgtcattgcggaggatgggaccatgacctccctctgcggggactggttgcagggtcttcaccggtttgtggcccgggaaaagataatgtctgtgctgagtgaacggggcctgttccggggcctccagaaccaccccatggtactgcccatctgcagccgttctggggatgtgatagaatacctgctgaagaaccagtggtttgtccgctgccaggaaatgggggcccgagctgccaaggctgtggagtcgggggccctggagctcagtccctccttccaccagaagaactggcagcactggttttcccatattggggactggtgtgtctcccggcagctgtggtggggccatcagattccagcctacctggttgtagaggaccatgcgcagggagaagaggactgttgggtggttgggcggtcagaggctgaggccagagaggtagcagcggaactgacagggaggccaggggcagagctgaccctggagagggatcctgatgtcctagacacatggttttcttctgccctgttccccttttctgccctgggctggccccaagagaccccagaccttgctcgtttctaccccctgtcacttttggaaacgggcagcgaccttctgctgttctgggtgggccgcatggtcatgttggggacccagctcacagggcagctgcccttcagcaaggtgcttcttcatcccatggttcgggacaggcagggccggaagatgagcaagtccctggggaatgtgctggacccaagagacatcatcagtggggtggagatgcagttgctgcaggaaaagctgagaagcggaaatttggaccctgcagagctggccattgtggctgcagcacagaaaaaggactttcctcacgggatccctgagtgtgggacagatgccctgagattcacactctgctcccatggagttcaggcgggcgacttgcacctgtcagtctctgaggtccagagctgccgacatttctgcaacaagatctggaatgctcttcgctttatcctcaatgctttaggggagaaatttgtgccacagcctgctgaggagctgtctccctcctccccgatggatgcctggatcctgagccgccttgccctggctgcccaggagtgtgagcggggcttcctcacccgagagctctcgctcgtcactcatgccctgcaccacttctggcttcacaacctctgtgacgtctacctggaggctgtgaagcccgtgctgtggcactcgccccgccccctggggccccctcaggtcctgttctcctgcgctgacctcggcctccgcctcctggccccactgatgcccttcctggctgaagagctctggcagaggctgccccccaggcctggttgcccccctgcccccagcatctcggttgccccctaccccagcgcctgcagcttggagcactggcgccagccagagctggagcggcgcttctcccgggtccaagaggtcgtgcaggtgctaagggctctccgagccacgtaccagctcaccaaagcccggccccgagtgctgctgcagagctcagagcctggggaccagggcctcttcgaggccttcttggagcccctgggcaccctgggctactgtggggctgtgggcctgttacccccaggcgcagcagctccctccggctgggcccaggctccactcagtgacacggctcaagtctacatggagctgcagggcctggtggacccgcagatccagctacctctgttagccgcccgaaggtacaagttgcagaagcagcttgatagcctcacagccaggaccccatcagaaggggaggcagggactcagaggcaacaaaagctttcttccctccagctggaattgtcaaaactggacaaggcagcctctcacctccggcagctgatggatgagcctccagccccagggagcccggagctctaactcatcatccccatcagttttcctccctctcagacctgtctttgaggacaaacagatttgtcagctgtcagggtgcagtgggacgtcagagactatgtggtccatcgccttcattgtgtaaatgaggacacagactggcttggtcgcagtgactgtggtgtccttgagatgctcacattactgcccggcctgcctcccacctggaagtctgggaatgaggagattgagataaacttttgaaatccca

SEQ ID NO: 434184 - DNA, 3611 bp, Homo sapiens
gccagctgctgcgcatgcgccggccggggccccgcccccatgcgccgcgcggctccagggccacgttccagggtcgggtttggtggattcctcagtccctgccgccgcggggcgccctgggatagcggcggggcctcctgaacagatctcggcccctttccaaacactcctgatgcctcatttgcctctcgcctcttttcgaccaccattttgggggctgaggcactcacggggcctccccaggtttcactccgtttctacacagtcggagccccatggatctcccatctcccggaggaaccgtgaagccaaacagaagcgcctgcgagagaagcaggcgactctggaggctgagatagcaggggagagcaagtcacctgcagaatccattaaggcctggaggcctaaggagttagtattgtatgaaatccctacgaaacccggtgaaaagaaagatgtctctgggcccctgcctcctgcatacagcccccgatatgttgaggctgcctggtacccgtggtgggtacgagagggcttcttcaaaccagaatatcaggcccggctgccccaagctacaggggagaccttttccatgtgtatcccacctcccaatgtcactggctccctgcacattggccacgcactcacggtggccatacaggatgccctcgtgcgctggcaccggatgcgtggggatcaagtgctgtgggtccctggttcagatcatgcaggaattgctacacaagctgtggtggagaaacaactgtggaaggaacggggagtgaggagacatgagctgagccgggaggccttccttagggaggtgtggcagtggaaggaggcgaaaggtggagagatctgtgagcagctgcgagctctgggtgcctccctggactgggatcgagagtgttttaccatggatgttggctcctcagtggctgtgactgaagcttttgtgcggctctacaaggcggggttgctgtaccggaaccatcagcttgtcaactggtcatgtgctttaagatcagccatctcggacattgaggtggagaaccggcccctgcctggccacacacagcttcgactgcctggctgccccacccccgtgtcttttggcctcctattttctgttgccttccccgtggatggagagcctgatgcagaggttgtggtaggaaccacaaggccagagacgctgcctggagatgtggctgtggccgttcatccagacgactcgcgatacacacatctacacgggcgacagcttcgtcaccccttgatggggcagcctcttcccctcatcacagactatgctgttcagccacatgtgggcacgggggcagtgaaggtgactccagctcacagtcctgccgatgctgagatgggggcccgacatggcttgagccccttgaatgtcattgcggaggatgggaccatgacctccctctgcggggactggttgcagggtcttcaccggtttgtggcccgggaaaagataatgtctgtgctgagtgaacggggcctgttccggggcctccagaaccaccccatggtactgcccatctgcagccgttctggggatgtgatagaatacctgctgaagaaccagtggtttgtccgctgccaggaaatgggggcccgagctgccaaggctgtggagtcgggggccctggagctcagtccctccttccaccagaagaactggcagcactggttttcccatattggggactggtgtgtctcccggcagctgtggtggggccatcagattccagcctacctggttgtagaggaccatgcgcagggagaagaggactgttgggtggttgggcggtcagaggctgaggccagagaggtagcagcggaactgacagggaggccaggggcagagctgaccctggagagggatcctgatgtcctagacacatggttttcttctgccctgttccccttttctgccctgggctggccccaagagaccccagaccttgctcgtttctaccccctgtcacttttggaaacgggcagcgaccttctgctgttctgggtgggccgcatggtcatgttggggacccagctcacagggcagctgcccttcagcaaggtgcttcttcatcccatggttcgggacaggcagggccggaagatgagcaagtccctggggaatgtgctggacccaagagacatcatcagtggggtggagatgcagttgctgcaggaaaagctgagaagcggaaatttggaccctgcagagctggccattgtggctgcagcacagaaaaaggactttcctcacgggatccctgagtgtgggacagatgccctgagattcacactctgctcccatggagttcaggcgggcgacttgcacctgtcagtctctgaggtccagagctgccgacatttctgcaacaagatctggaatgctcttcgctttatcctcaatgctttaggggagaaatttgtgccacagcctgctgaggagctgtctccctcctccccgatggatgcctggatcctgagccgccttgccctggctgcccaggagtgtgagcggggcttcctcacccgagagctctcgctcgtcactcatgccctgcaccacttctggcttcacaacctctgtgacgtctacctggaggctgtgaagcccgtgctgtggcactcgccccgccccctggggccccctcaggtcctgttctcctgcgctgacctcggcctccgcctcctggccccactgatgcccttcctggctgaagagctctggcagaggctgccccccaggcctggttgcccccctgcccccagcatctcggttgccccctaccccagcgcctgcagcttggagcactggcgccagccagagctggagcggcgcttctcccgggtccaagaggtcgtgcaggtgctaagggctctccgagccacgtaccagctcaccaaagcccggccccgagtgctgctgcagagctcagagcctggggaccagggcctcttcgaggccttcttggagcccctgggcaccctgggctactgtggggctgtgggcctgttacccccaggcgcagcagctccctccggctgggcccaggctccactcagtgacacggctcaagtctacatggagctgcagggcctggtggacccgcagatccagctacctctgttagccgcccgaaggtacaagttgcagaagcagcttgatagcctcacagccaggaccccatcagaaggggaggcagggactcagaggcaacaaaagctttcttccctccagctggaattgtcaaaactggacaaggcagcctctcacctccggcagctgatggatgagcctccagccccagggagcccggagctctaactcatcatccccatcagttttcctccctctcagacctgtctttgaggacaaacagatttgtcagctgtcagggtgcagtgggacgtcagagactatgtggtccatcgccttcattgtgtaaatgaggacacagactggcttggtcgcagtgactgtggtgtccttgagatgctcacattactgcccggcctgcctcccacctggaagtctgggaatgaggagattgagataaacttttgaaatccca

SEQ ID NO: 434185 - DNA, 3540 bp, Homo sapiens
gccagctgctgcgcatgcgccggccggggccccgcccccatgcgccgcgcggctccagggccacgttccagggtcgggtttggtggattcctcagtccctgccgccgcggggcgccctgggatagcggcggggcctcctgaacagatctcggcccctttccaaacactcctgatgcctcatttgcctctcgcctcttttcgaccaccattttgggggctgaggcactcacggggcctccccaggtttcactccgtttctacacagtcggagccccatggatctcccatctcccggaggaaccgtgaagccaaacagaagcgcctgcgagagaagcaggcgactctggaggctgagatagcaggggagagcaagtcacctgcagaatccattaaggcctggaggcctaaggagttagtattgtatgaaatccctacgaaacccggtgaaaagaaagatgtctctgggcccctgcctcctgcatacagcccccgatatgttgaggctgcctggtacccgtggtgggtacgagagggcttcttcaaaccagaatatcaggcccggctgccccaagctacaggggagaccttttccatgtgtatcccacctcccaatgtcactggctccctgcacattggccacgcactcacggtggccatacaggatgccctcgtgcgctggcaccggatgcgtggggatcaagtgctgtgggtccctggttcagatcatgcaggaattgctacacaagctgtggtggagaaacaactgtggaaggaacggggagtgaggagacatgagctgagccgggaggccttccttagggaggtgtggcagtggaaggaggcgaaaggtggagagatctgtgagcagctgcgagctctgggtgcctccctggactgggatcgagagtgttttaccatggatgttggctcctcagtggctgtgactgaagcttttgtgcggctctacaaggcggggttgctgtaccggaaccatcagcttgtcaactggtcatgtgctttaagatcagccatctcggacattgaggtggagaaccggcccctgcctggccacacacagcttcgactgcctggctgccccacccccgtgtcttttggcctcctattttctgttgccttccccgtggatggagagcctgatgcagaggttgtggtaggaaccacaaggccagagacgctgcctggagatgtggctgtggccgttcatccagacgactcgcgatacacacatctacacgggcgacagcttcgtcaccccttgatggggcagcctcttcccctcatcacagactatgctgttcagccacatgtgggcacgggggcagtgaaggtgactccagctcacagtcctgccgatgctgagatgggggcccgacatggcttgagccccttgaatgtcattgcggaggatgggaccatgacctccctctgcggggactggttgcagggtcttcaccggtttgtggcccgggaaaagataatgtctgtgctgagtgaacggggcctgttccggggcctccagaaccaccccatggtactgcccatctgcagccgttctggggatgtgatagaatacctgctgaagaaccagtggtttgtccgctgccaggaaatgggggcccgagctgccaaggctgtggagtcgggggccctggagctcagtccctccttccaccagaagaactggcagcactggttttcccatattggggactggtgtgtctcccggcagctgtggtggggccatcagattccagcctacctggttgtagaggaccatgcgcagggagaagaggactgttgggtggttgggcggtcagaggctgaggccagagaggtagcagcggaactgacagggaggccaggggcagagctgaccctggagagggaccccagaccttgctcgtttctaccccctgtcacttttggaaacgggcagcgaccttctgctgttctgggtgggccgcatggtcatgttggggacccagctcacagggcagctgcccttcagcaaggtgcttcttcatcccatggttcgggacaggcagggccggaagatgagcaagtccctggggaatgtgctggacccaagagacatcatcagtggggtggagatgcagttgctgcaggaaaagctgagaagcggaaatttggaccctgcagagctggccattgtggctgcagcacagaaaaaggactttcctcacgggatccctgagtgtgggacagatgccctgagattcacactctgctcccatggagttcaggcgggcgacttgcacctgtcagtctctgaggtccagagctgccgacatttctgcaacaagatctggaatgctcttcgctttatcctcaatgctttaggggagaaatttgtgccacagcctgctgaggagctgtctccctcctccccgatggatgcctggatcctgagccgccttgccctggctgcccaggagtgtgagcggggcttcctcacccgagagctctcgctcgtcactcatgccctgcaccacttctggcttcacaacctctgtgacgtctacctggaggctgtgaagcccgtgctgtggcactcgccccgccccctggggccccctcaggtcctgttctcctgcgctgacctcggcctccgcctcctggccccactgatgcccttcctggctgaagagctctggcagaggctgccccccaggcctggttgcccccctgcccccagcatctcggttgccccctaccccagcgcctgcagcttggagcactggcgccagccagagctggagcggcgcttctcccgggtccaagaggtcgtgcaggtgctaagggctctccgagccacgtaccagctcaccaaagcccggccccgagtgctgctgcagagctcagagcctggggaccagggcctcttcgaggccttcttggagcccctgggcaccctgggctactgtggggctgtgggcctgttacccccaggcgcagcagctccctccggctgggcccaggctccactcagtgacacggctcaagtctacatggagctgcagggcctggtggacccgcagatccagctacctctgttagccgcccgaaggtacaagttgcagaagcagcttgatagcctcacagccaggaccccatcagaaggggaggcagggactcagaggcaacaaaagctttcttccctccagctggaattgtcaaaactggacaaggcagcctctcacctccggcagctgatggatgagcctccagccccagggagcccggagctctaactcatcatccccatcagttttcctccctctcagacctgtctttgaggacaaacagatttgtcagctgtcagggtgcagtgggacgtcagagactatgtggtccatcgccttcattgtgtaaatgaggacacagactggcttggtcgcagtgactgtggtgtccttgagatgctcacattactgcccggcctgcctcccacctggaagtctgggaatgaggagattgagataaacttttgaaatccca

SEQ ID NO: 434186 - DNA, 3867 bp, Homo sapiens
gccagctgctgcgcatgcgccggccggggccccgcccccatgcgccgcgcggctccagggccacgttccagggtcgggtttggtggattcctcagtccctgccgccgcggggcgccctgggatagcggcggggcctcctgaacagatctcggcccctttccaaacactcctgatgcctcatttgcctctcgcctcttttcgaccaccattttgggggctgaggcactcacggggcctccccaggtttcactccgtttctacacagtcggagccccatggatctcccatctcccggaggaaccgtgaagccaaacagaagcgcctgcgagagaagcaggcgactctggaggctgagatagcaggggagagcaagtcacctgcagaatccattaaggcctggaggcctaaggagttagtattgtatgaaatccctacgaaacccggtgaaaagaaagatgtctctgggcccctgcctcctgcatacagcccccgatatgttgaggctgcctggtacccgtggtgggtacgagagggcttcttcaaaccagaatatcaggcccggctgccccaagctacaggggagaccttttccatgtgtatcccacctcccaatgtcactggctccctgcacattggccacgcactcacggtggccatacaggatgccctcgtgcgctggcaccggatgcgtggggatcaagtgctgtgggtccctggttcagatcatgcaggaattgctacacaagctgtggtggagaaacaactgtggaaggaacggggagtgaggagacatgagctgagccgggaggccttccttagggaggtgtggcagtggaaggaggcgaaaggtggagagatctgtgagcagctgcgagctctgggtgcctccctggactgggatcgagagtgttttaccatggatgttggctcctcagtggctgtgactgaagcttttgtgcggctctacaaggcggggttgctgtaccggaaccatcagcttgtcaactggtcatgtgctttaagatcagccatctcggacattgaggtggagaaccggcccctgcctggccacacacagcttcgactgcctggctgccccacccccgtgtcttttggcctcctattttctgttgccttccccgtggatggagagcctgatgcagaggttgtggtaggaaccacaaggccagagacgctgcctggagatgtggctgtggccgttcatccagacgactcgcgatacacacatctacacgggcgacagcttcgtcaccccttgatggggcagcctcttcccctcatcacagactatgctgttcagccacatgtgggcacgggggcagtgaaggtgactccagctcacagtcctgccgatgctgagatgggggcccgacatggcttgagccccttgaatgtcattgcggaggatgggaccatgacctccctctgcggggactggttgcagggtcttcaccggtttgtggcccgggaaaagataatgtctgtgctgagtgaacggggcctgttccggggcctccagaaccaccccatggtactgcccatctgcagccgttctggggatgtgatagaatacctgctgaagaaccagtggtttgtccgctgccaggaaatgggggcccgagctgccaaggctgtggagtcgggggccctggagctcagtccctccttccaccagaagaactggcagcactggttttcccatattggggactggtgtgtctcccggcagctgtggtggggccatcagattccagcctacctggttgtagaggaccatgcgcagggagaagaggactgttgggtggttgggcggtcagaggctgaggccagagaggtagcagcggaactgacagggaggccaggggcagagctgaccctggagagggatcctgatgtcctagacacatggttttcttctgccctgttccccttttctgccctgggctggccccaagagaccccagaccttgctcgtttctaccccctgtcacttttggaaacgggcagcgaccttctgctgttctgggtgggccgcatggtcatgttggggacccagctcacagggcagctgcccttcagcaaggtgcttcttcatcccatggttcgggacaggcagggccggaagatgagcaagtccctggggaatgtgctggacccaagagacatcatcagtggggtggagatgcagttgctgcaggaaaagctgagaagcggaaatttggaccctgcagagctggccattgtggctgcagcacagaaaaaggactttcctcacgggatccctgagtgtgggacagatgccctgagattcacactctgctcccatggagttcaggcgggcgacttgcacctgtcagtctctgaggtccagagctgccgacatttctgcaacaagatctggaatgctcttcgctttatcctcaatgctttaggggagaaatttgtgccacagcctgctgaggagctgtctccctcctccccgatggatgcctggatcctgagccgccttgccctggctgcccaggagtgtgagcggggcttcctcacccgagagctctcgctcgtcactcatgccctgcaccacttctggcttcacaacctctgtgacgtctacctggaggctgtgaagcccgtgctgtggcactcgccccgccccctggggccccctcaggtcctgttctcctgcgctgacctcggcctccgcctcctggccccactgatgcccttcctggctgaagagctctggcagaggctgccccccaggcctggttgcccccctgcccccagcatctcggttgccccctaccccagcgcctgcagcttggagcactggcgccagccagagctggagcggcgcttctcccgggtccaagaggtcgtgcaggtgctaagggctctccgagccacgtaccagctcaccaaagcccggccccgagtgctgctgcagagctcagagcctggggaccagggcctcttcgaggccttcttggagcccctgggcaccctgggctactgtggggctgtgggcctgttacccccaggcgcagcagctccctccggctgggcccaggctccactcagtgacacggctcaagtctacatggagctgcagggcctggtggacccgcagatccagctacctctgttagccgcccgaaggtacaagttgcagaagcagcttgatagcctcacagccaggaccccatcagaaggggaggcagggactcagaggcaacaaaagctttcttccctccagctggaattgtcaaaactggacaaggcagcctctcacctccggcagctgatggatgagcctccagccccagggagcccggagctctaactcatcatccccatcagttttcctccctctcagacctgtctttgaggacaaacagatttgtcagctgtcagggtgcagtgggacgtcagagactatgtggtccatcgccttcattgtgtaaatgaggacacagactggcttggtcgcagtgactgtggtgtccttgagatgctcacattactgcccggcctgcctcccacctggaagtctgggaatgaggagattgagataaacttttgaaatcccaaacatgtctgtttatggctctttggtcccctttgctcccagtggtgacttttgtgcttctgagttgtcccctgagagcttggtctgggaaaagaggaggaggggtcctcgctggaggaagaggaactttctagtcatgggtagggtatgggcacagtggttccggttctacctactttctggactaactgacagtgccctggcttttgcaggctctttctcctccacttctcactaaatggaagcttccccgctcc

SEQ ID NO: 434187 - DNA, 3272 bp, Homo sapiens
gccagctgctgcgcatgcgccggccggggccccgcccccatgcgccgcgcggctccagggccacgttccagggtcgggtttggtggattcctcagtccctgccgccgcggggcgccctgggatagcggcggggcctcctgaacagatctcggcccctttccaaacactcctgatgcctcatttgcctctcgcctcttttcgaccaccattttgggggctgaggcactcacggggcctccccaggtttcactccgtttctacacagtcggagccccatggatctcccatctcccggaggaaccgtgaagccaaacagaagcgcctgcgagagaagcaggcgactctggaggctgagatagcaggggagagcaagtcacctgcagaatccattaaggcctggaggcctaaggagttagtattgtatgaaatccctacgaaacccggtgaaaagaaagatgtctctgggcccctgcctcctgcatacagcccccgatatgttgaggctgcctggtacccgtggtgggtacgagagggcttcttcaaaccagaatatcaggcccggctgccccaagctacaggggagaccttttccatgtgtatcccacctcccaatgtcactggctccctgcacattggccacgcactcacggtggccatacaggatgccctcgtgcgctggcaccggatgcgtggggatcaagtgctgtgggtccctggttcagatcatgcaggaattgctacacaagctgtggtggagaaacaactgtggaaggaacggggagtgaggagacatgagctgagccgggaggccttccttagggaggtgtggcagtggaaggaggcgaaaggtggagagatctgtgagcagctgcgagctctgggtgcctccctggactgggatcgagagtgttttaccatggatgttggctcctcagtggctgtgactgaagcttttgtgcggctctacaaggcggggttgctgtaccggaaccatcagcttgtcaactggtcatgtgctttaagatcagccatctcggacattgaggtggagaaccggcccctgcctggccacacacagcttcgactgcctggctgccccacccccgtgtcttttggcctcctattttctgttgccttccccgtggatggagagcctgatgcagaggttgtggtaggaaccacaaggccagagacgctgcctggagatgtggctgtggccgttcatccagacgactcgcgatacacacatctacacgggcgacagcttcgtcaccccttgatggggcagcctcttcccctcatcacagactatgctgttcagccacatgtgggcacgggggcagtgaaggtgactccagctcacagtcctgccgatgctgagatgggggcccgacatggcttgagccccttgaatgtcattgcggaggatgggaccatgacctccctctgcggggactggttgcagggtcttcaccggtttgtggcccgggaaaagataatgtctgtgctgagtgaacggggcctgttccggggcctccagaaccaccccatggtactgcccatctgcagccgttctggggatgtgatagaatacctgctgaagaaccagtggtttgtccgctgccaggaaatgggggcccgagctgccaaggctgtggagtcgggggccctggagctcagtccctccttccaccagaagaactggcagcactggttttcccatattggggactggtgtgtctcccggcagctgtggtggggccatcagattccagcctacctggttgtagaggaccatgcgcagggagaagaggactgttgggtggttgggcggtcagaggctgaggccagagaggtagcagcggaactgacagggaggccaggggcagagctgaccctggagagggatcctgatgtcctagacacatggttttcttctgccctgttccccttttctgccctgggctggccccaagagaccccagaccttgctcgtttctaccccctgtcacttttggaaacgggcagcgaccttctgctgttctgggtgggccgcatggtcatgttggggacccagctcacagggcagctgcccttcagcaaggtgcttcttcatcccatggttcgggacaggcagggccggaagatgagcaagtccctggggaatgtgctggacccaagagacatcatcagtggggtggagatgcagttgctgcaggaaaagctgagaagcggaaatttggaccctgcagagctggccattgtggctgcagcacagaaaaaggactttcctcacgggatccctgagtgtgggacagatgccctgagattcacactctgctcccatggagttcaggcgggcgacttgcacctgtcagtctctgaggtccagagctgccgacatttctgcaacaagatctggaatgctcttcgctttatcctcaatgctttaggggagaaatttgtgccacagcctgctgaggagctgtctccctcctccccgatggatgcctggatcctgagccgccttgccctggctgcccaggagtgtgagcggggcttcctcacccgagagctctcgctcgtcactcatgccctgcaccacttctggcttcacaacctctgtgacgtctacctggaggctgtgaagcccgtgctgtggcactcgccccgccccctggggccccctcaggtcctgttctcctgcgctgacctcggcctccgcctcctggccccactgatgcccttcctggctgaagagctctggcagaggctgccccccaggcctggttgcccccctgcccccagcatctcggttgccccctaccccagcgcctgcagcttggagcactggcgccagccagagctggagcggcgcttctcccgggtccaagaggtcgtgcaggtgctaagggctctccgagccacgtaccagctcaccaaagcccggccccgagtgctgctgcagagctcagagcctggggaccagggcctcttcgaggccttcttggacccggagctctaactcatcatccccatcagttttcctccctctcagacctgtctttgaggacaaacagatttgtcagctgtcagggtgcagtgggacgtcagagactatgtggtccatcgccttcattgtgtaaatgaggacacagactggcttggtcgcagtgactgtggtgtccttgagatgctcacattactgcccggcctgcctcccacctggaagtctgggaatgaggagattgagataaacttttgaaatccca

SEQ ID NO: 434188 - DNA, 2693 bp, Homo sapiens
gccagctgctgcgcatgcgccggccggggccccgcccccatgcgccgcgcggctccagggccacgttccagggtcgggtttggtggattcctcagtccctgccgccgcggggcgccctgggatagcggcggggcctcctgaacagatctcggcccctttccaaacactcctgatgcctcatttgcctctcgcctcttttcgaccaccattttgggggctgaggcactcacggggcctccccaggtttcactccgtttctacacagtcggagccccatggatctcccatctcccggaggaaccgtgaagccaaacagaagcgcctgcgagagaagcaggcgactctggaggctgagatagcaggggagagcaagtcacctgcagaatccattaaggcctggaggcctaaggagttagtattgtatgaaatccctacgaaacccggtgaaaagaaagatgtctctgggcccctgcctcctgcatacagcccccgatatgttgaggctgcctggtacccgtggtgggtacgagagggcttcttcaaaccagaatatcaggcccggctgccccaagctacaggggagaccttttccatgtgtatcccacctcccaatgtcactggctccctgcacattggccacgcactcacggtggccatacaggatgccctcgtgcgctggcaccggatgcgtggggatcaagtgctgtgggtccctggttcagatcatgcaggaattgctacacaagctgtggtggagaaacaactgtggaaggaacggggagtgaggagacatgagctgagccgggaggccttccttagggaggtgtggcagtggaaggaggcgaaaggtggagagatctgtgagcagctgcgagctctgggtgcctccctggactgggatcgagagtgttttaccatggatgttggctcctcagtggctgtgactgaagcttttgtgcggctctacaaggcggggttgctgtaccggaaccatcagcttgtcaactggtcatgtgctttaagatcagccatctcggacattgaggtggagaaccggcccctgcctggccacacacagcttcgactgcctggctgccccacccccgtgtcttttggcctcctattttctgttgccttccccgtggatggagagcctgatgcagaggttgtggtaggaaccacaaggccagagacgctgcctggagatgtggctgtggccgttcatccagacgactcgcgatacacacatctacacgggcgacagcttcgtcaccccttgatggggcagcctcttcccctcatcacagactatgctgttcagccacatgtgggcacgggggcagtgaaggtgactccagctcacagtcctgccgatgctgagatgggggcccgacatggcttgagccccttgaatgtcattgcggaggatgggaccatgacctccctctgcggggactggttgcagggtcttcaccggtttgtggcccgggaaaagataatgtctgtgctgagtgaacggggcctgttccggggcctccagaaccaccccatggtactgcccatctgcagccgttctggggatgtgatagaatacctgctgaagaaccagtggtttgtccgctgccaggaaatgggggcccgagctgccaaggctgtggagtcgggggccctggagctcagtccctccttccaccagaagaactggcagcactggttttcccatattggggactggtgtgtctcccggcagctgtggtggggccatcagattccagcctacctggttgtagaggaccatgcgcagggagaagaggactgttgggtggttgggcggtcagaggctgaggccagagaggtagcagcggaactgacagggaggccaggggcagagctgaccctggagagggaccccagaccttgctcgtttctaccccctgtcacttttggaaacgggcagcgaccttctgctgttctgggtgggccgcatggtcatgttggggacccagctcacagggcagctgcccttcagcaaggtgcttcttcatcccatggttcgggacaggcagggccggaagatgagcaagtccctggggaatgtgctggacccaagagacatcatcagtggggtggagatgcagttgctgcaggaaaagctgagaagcggaaatttggaccctgcagagctggccattgtggctgcagcacagttttcctccctctcagacctgtctttgaggacaaacagatttgtcagctgtcagggtgcagtgggacgtcagagactatgtggtccatcgccttcattgtgtaaatgaggacacagactggcttggtcgcagtgactgtggtgtccttgagatgctcacattactgcccggcctgcctcccacctggaagtctgggaatgaggagattgagataaacttttgaaatcccaaacatgtctgtttatggctctttggtcccctttgctcccagtggtgacttttgtgcttctgagttgtcccctgagagcttggtctgggaaaagaggaggaggggtcctcgctggaggaagaggaactttctagtcatgggtagggtatgggcacagtggttccggttctacctactttctggactaactgacagtgccctggcttttgcaggctctttctcctccacttctcactaaatggaagcttccccgctcc

SEQ ID NO: 434189 - DNA, 1121 bp, Homo sapiens
ctggactcaggagctcgccgcgatgccccgccccactctccacccgctgaatgcagggcgcatgctgctacttggcggctcaagccccgcccgcaccgtccccattctctgaccgcccctctcccggtacactgcgcaggcacaacagagccgctcccctctcctcgccccgccaccgggacggagagcgcccgccgctgcatttccggcgacacctcgcagtcattcctgcggcttgcgcgcccttgtagacagccggggccttcgtgagaccggtgcaggcctggggtagtctcctgtctggacagagaagagaaaaatgcaggacactggctcagtagtgcctttgcattggtttggctttggctacgcagcactggttgcttctggtgggatcattggctatgtaaaagcaggcagcgtgccgtccctggctgcagggctgctctttggcagtctagccggcctgggtgcttaccagctgtctcaggatccaaggaacgtttgggttttcctagctacatctggtaccttggctggcattatgggaatgaggttctaccactctggaaaattcatgcctgcaggtttaattgcaggtgccagtttgctgatggtcgccaaagttggagttagtatgttcaacagaccccattagcagaagtcatgttccagcttagactgatgaagaattaaaaatctgcatcttccactattttcaatatattaagagaaataagtgcagcatttttgcatctgacattttacctaaaaaaaaagacaccaaacttggcagagaggtggaaaatcagtcatgattacaaacctacagaggtggcgagtatgtaacacaagagcttaataagaccctcatagagcttgattcttgtatattgatgttgtcttttctttctgtatctgtaggtaaatctcaagggtaaaatgttaggtgtcagctttcagggctctgaaaccctattccctgctctgaggaacagtgtgaaaaaaagtcttttaggagatttacaatatctgttcttttgctcatcttagaccacagactgactttgaaattatgttaagtgaaatatcaatgaaaataaagtttactataaataata

SEQ ID NO: 434190 - DNA, 1033 bp, Homo sapiens
ctggactcaggagctcgccgcgatgccccgccccactctccacccgctgaatgcagggcgcatgctgctacttggcggctcaagccccgcccgcaccgtccccattctctgaccgcccctctcccggtacactgcgcaggcacaacagagccgctcccctctcctcgccccgccaccgggacggagagcgcccgccgctgcatttccggcgacacctcgcagtcattcctgcggcttgcgcgcccttgtagacagccggggccttcgtgagaccggtgcaggcctggggtagtctcctgtctggacagagaagagaaaaatgcaggacactggctcagtagtgcctttgcattggtttggctttggctacgcagcactggttgcttctggtgggatcattggctatgtaaaagcaggcagcgtgccgtccctggctgcagggctgctctttggcagtctagccggcctgggtgcttaccagctgtctcaggatccaaggaacgtttgggttttcctagtttgctgatggtcgccaaagttggagttagtatgttcaacagaccccattagcagaagtcatgttccagcttagactgatgaagaattaaaaatctgcatcttccactattttcaatatattaagagaaataagtgcagcatttttgcatctgacattttacctaaaaaaaaagacaccaaacttggcagagaggtggaaaatcagtcatgattacaaacctacagaggtggcgagtatgtaacacaagagcttaataagaccctcatagagcttgattcttgtatattgatgttgtcttttctttctgtatctgtaggtaaatctcaagggtaaaatgttaggtgtcagctttcagggctctgaaaccctattccctgctctgaggaacagtgtgaaaaaaagtcttttaggagatttacaatatctgttcttttgctcatcttagaccacagactgactttgaaattatgttaagtgaaatatcaatgaaaataaagtttactataaataata

SEQ ID NO: 434191 - DNA, 1137 bp, Homo sapiens
gacactgagtcaggaaaatctcttgaacctgggagacggaggttgcagtgagccgaaattgtgctgctgaactccagcctgggcaacagaggtgagtgagactccatctgaaaaaataaaaataaaaaaccttctcaaaaacaaaaaatttagttaagtatcataaagacatcctgaaggtaggggaatttttaaaaatctgttttggagaaagattacatactctgatcatagttgtgatgctaccagtataatgttttatacctgaagcaaggaagtcagtgtggagcaaggtctagagcagtaaactgagacgctggagagtctaccattaatcagatctgtgatggtggggaggccttgctctctcttgcctccatttcttcatctcttcaaattattggcagttgggttaggatccagctcatgtgtgctattttaagactcccttggcttgctttttctctggttcctccagggatggaaatttacccctgaccactcttgccttagtacctcctcccccacgcagttgtgaggaaccagcagtttagttccttaaaaacatagttgcctgttctgtcctttacctgacattttctatcttgtttcttttaaacagtttgctgatggtcgccaaagttggagttagtatgttcaacagaccccattagcagaagtcatgttccagcttagactgatgaagaattaaaaatctgcatcttccactattttcaatatattaagagaaataagtgcagcatttttgcatctgacattttacctaaaaaaaaagacaccaaacttggcagagaggtggaaaatcagtcatgattacaaacctacagaggtggcgagtatgtaacacaagagcttaataagaccctcatagagcttgattcttgtatattgatgttgtcttttctttctgtatctgtaggtaaatctcaagggtaaaatgttaggtgtcagctttcagggctctgaaaccctattccctgctctgaggaacagtgtgaaaaaaagtcttttaggagatttacaatatctgttcttttgctcatcttagaccacagactgactttgaaattatgttaagtgaaatatcaatgaaaataaagtttactataaataata

SEQ ID NO: 434192 - DNA, 870 bp, Homo sapiens
acctccgatataacggagctggaagtgcaggcctggggtagtctcctgtctggacagagaagagaaaaatgcaggacactggctcagtagtgcctttgcattggtttggctttggctacgcagcactggttgcttctggtgggatcattggctatgtaaaagcaggcagcgtgccgtccctggctgcagggctgctctttggcagtctagccggcctgggtgcttaccagctgtctcaggatccaaggaacgtttgggttttcctagctacatctggtaccttggctggcattatgggaatgaggttctaccactctggaaaattcatgcctgcaggtttaattgcaggtgccagtttgctgatggtcgccaaagttggagttagtatgttcaacagaccccattagcagaagtcatgttccagcttagactgatgaagaattaaaaatctgcatcttccactattttcaatatattaagagaaataagtgcagcatttttgcatctgacattttacctaaaaaaaaagacaccaaacttggcagagaggtggaaaatcagtcatgattacaaacctacagaggtggcgagtatgtaacacaagagcttaataagaccctcatagagcttgattcttgtatattgatgttgtcttttctttctgtatctgtaggtaaatctcaagggtaaaatgttaggtgtcagctttcagggctctgaaaccctattccctgctctgaggaacagtgtgaaaaaaagtcttttaggagatttacaatatctgttcttttgctcatcttagaccacagactgactttgaaattatgttaagtgaaatatcaatgaaaataaagtttactataaataata

SEQ ID NO: 434193 - DNA, 1269 bp, Homo sapiens
ctggactcaggagctcgccgcgatgccccgccccactctccacccgctgaatgcagggcgcatgctgctacttggcggctcaagccccgcccgcaccgtccccattctctgaccgcccctctcccggtacactgcgcaggcacaacagagccgctcccctctcctcgccccgccaccgggacggagagcgcccgccgctgcatttccggcgacacctcgcagtcattcctgcggcttgcgcgcccttgtagacagccggggccttcgtgagaccgccccaggaaatcggtaccagtgttatcctcatggtacagtgaagaatactgagacttaggttgcgtagcttgcaggttggacacacttctttctgactgctggagagctgtgcttttaactacctctgatccagcttgttttctgcaggtgcaggcctggggtagtctcctgtctggacagagaagagaaaaatgcaggacactggctcagtagtgcctttgcattggtttggctttggctacgcagcactggttgcttctggtgggatcattggctatgtaaaagcaggcagcgtgccgtccctggctgcagggctgctctttggcagtctagccggcctgggtgcttaccagctgtctcaggatccaaggaacgtttgggttttcctagctacatctggtaccttggctggcattatgggaatgaggttctaccactctggaaaattcatgcctgcaggtttaattgcaggtgccagtttgctgatggtcgccaaagttggagttagtatgttcaacagaccccattagcagaagtcatgttccagcttagactgatgaagaattaaaaatctgcatcttccactattttcaatatattaagagaaataagtgcagcatttttgcatctgacattttacctaaaaaaaaagacaccaaacttggcagagaggtggaaaatcagtcatgattacaaacctacagaggtggcgagtatgtaacacaagagcttaataagaccctcatagagcttgattcttgtatattgatgttgtcttttctttctgtatctgtaggtaaatctcaagggtaaaatgttaggtgtcagctttcagggctctgaaaccctattccctgctctgaggaacagtgtgaaaaaaagtcttttaggagatttacaatatctgttcttttgctcatcttagaccacagactgactttgaaattatgttaagtgaaatatcaatgaaaataaagtttactataaataata

SEQ ID NO: 434194 - DNA, 1018 bp, Homo sapiens
acatccattgaatgctcactacagccccaggaaatcggtaccagtgttatcctcatggtacagtgaagaatactgagacttaggttgcgtagcttgcaggttggacacacttctttctgactgctggagagctgtgcttttaactacctctgatccagcttgttttctgcaggtgcaggcctggggtagtctcctgtctggacagagaagagaaaaatgcaggacactggctcagtagtgcctttgcattggtttggctttggctacgcagcactggttgcttctggtgggatcattggctatgtaaaagcaggcagcgtgccgtccctggctgcagggctgctctttggcagtctagccggcctgggtgcttaccagctgtctcaggatccaaggaacgtttgggttttcctagctacatctggtaccttggctggcattatgggaatgaggttctaccactctggaaaattcatgcctgcaggtttaattgcaggtgccagtttgctgatggtcgccaaagttggagttagtatgttcaacagaccccattagcagaagtcatgttccagcttagactgatgaagaattaaaaatctgcatcttccactattttcaatatattaagagaaataagtgcagcatttttgcatctgacattttacctaaaaaaaaagacaccaaacttggcagagaggtggaaaatcagtcatgattacaaacctacagaggtggcgagtatgtaacacaagagcttaataagaccctcatagagcttgattcttgtatattgatgttgtcttttctttctgtatctgtaggtaaatctcaagggtaaaatgttaggtgtcagctttcagggctctgaaaccctattccctgctctgaggaacagtgtgaaaaaaagtcttttaggagatttacaatatctgttcttttgctcatcttagaccacagactgactttgaaattatgttaagtgaaatatcaatgaaaataaagtttactataaataata

SEQ ID NO: 434195 - DNA, 1057 bp, Homo sapiens
ctggactcaggagctcgccgcgatgccccgccccactctccacccgctgaatgcagggcgcatgctgctacttggcggctcaagccccgcccgcaccgtccccattctctgaccgcccctctcccggtacactgcgcaggcacaacagagccgctcccctctcctcgccccgccaccgggacggagagcgcccgccgctgcatttccggcgacacctcgcagtcattcctgcggcttgcgcgcccttgtagacagccggggccttcgtgagaccgagtgcctttgcattggtttggctttggctacgcagcactggttgcttctggtgggatcattggctatgtaaaagcaggcagcgtgccgtccctggctgcagggctgctctttggcagtctagccggcctgggtgcttaccagctgtctcaggatccaaggaacgtttgggttttcctagctacatctggtaccttggctggcattatgggaatgaggttctaccactctggaaaattcatgcctgcaggtttaattgcaggtgccagtttgctgatggtcgccaaagttggagttagtatgttcaacagaccccattagcagaagtcatgttccagcttagactgatgaagaattaaaaatctgcatcttccactattttcaatatattaagagaaataagtgcagcatttttgcatctgacattttacctaaaaaaaaagacaccaaacttggcagagaggtggaaaatcagtcatgattacaaacctacagaggtggcgagtatgtaacacaagagcttaataagaccctcatagagcttgattcttgtatattgatgttgtcttttctttctgtatctgtaggtaaatctcaagggtaaaatgttaggtgtcagctttcagggctctgaaaccctattccctgctctgaggaacagtgtgaaaaaaagtcttttaggagatttacaatatctgttcttttgctcatcttagaccacagactgactttgaaattatgttaagtgaaatatcaatgaaaataaagtttactataaataata

SEQ ID NO: 434196 - DNA, 980 bp, Homo sapiens
ctggactcaggagctcgccgcgatgccccgccccactctccacccgctgaatgcagggcgcatgctgctacttggcggctcaagccccgcccgcaccgtccccattctctgaccgcccctctcccggtacactgcgcaggcacaacagagccgctcccctctcctcgccccgccaccgggacggagagcgcccgccgctgcatttccggcgacacctcgcagtcattcctgcggcttgcgcgcccttgtagacagccggggccttcgtgagaccggcagcgtgccgtccctggctgcagggctgctctttggcagtctagccggcctgggtgcttaccagctgtctcaggatccaaggaacgtttgggttttcctagctacatctggtaccttggctggcattatgggaatgaggttctaccactctggaaaattcatgcctgcaggtttaattgcaggtgccagtttgctgatggtcgccaaagttggagttagtatgttcaacagaccccattagcagaagtcatgttccagcttagactgatgaagaattaaaaatctgcatcttccactattttcaatatattaagagaaataagtgcagcatttttgcatctgacattttacctaaaaaaaaagacaccaaacttggcagagaggtggaaaatcagtcatgattacaaacctacagaggtggcgagtatgtaacacaagagcttaataagaccctcatagagcttgattcttgtatattgatgttgtcttttctttctgtatctgtaggtaaatctcaagggtaaaatgttaggtgtcagctttcagggctctgaaaccctattccctgctctgaggaacagtgtgaaaaaaagtcttttaggagatttacaatatctgttcttttgctcatcttagaccacagactgactttgaaattatgttaagtgaaatatcaatgaaaataaagtttactataaataata

SEQ ID NO: 434197 - DNA, 1854 bp, Homo sapiens
ctggactcaggagctcgccgcgatgccccgccccactctccacccgctgaatgcagggcgcatgctgctacttggcggctcaagccccgcccgcaccgtccccattctctgaccgcccctctcccggtacactgcgcaggcacaacagagccgctcccctctcctcgccccgccaccgggacggagagcgcccgccgctgcatttccggcgacacctcgcagtcattcctgcggcttgcgcgcccttgtagacagccggggccttcgtgagaccggtgcaggcctggggtagtctcctgtctggacagagaagagaaaaatgcaggacactggctcagtagtgcctttgcattggtttggctttggctacgcagcactggttgcttctggtgggatcattggctatgtaaaagcaggcagcgtgccgtccctggctgcagggctgctctttggcagtctagccggcctgggtgcttaccagctgtctcaggatccaaggaacgtttgggttttcctagctacatctggtaccttggctggcattatgggaatgaggttctaccactctggaaaattcatgcctgcaggtttaattgcaggtgccagtttgctgatggtcgccaaagttggagttagtatgttcaacagaccccattagcagaagtcatgttccagcttagactgatgaagaattaaaaatctgcatcttccactattttcaatatattaagagaaataagtgcagcatttttgcatctgacattttacctaaaaaaaaagacaccaaacttggcagagaggtggaaaatcagtcatgattacaaacctacagaggtggcgagtatgtaacacaagagcttaataagaccctcatagagcttgattcttgtatattgatgttgtcttttctttctgtatctgtaggtaaatctcaagggtaaaatgttaggtgtcagctttcagggctctgaaaccctattccctgctctgaggaacagtgtgaaaaaaagtcttttaggagatttacaatatctgttcttttgctcatcttagaccacagactgactttgaaattatgttaagtgaaatatcaatgaaaataaagtttactataaataataaaaaaaaaaaaaaaaaaaaaaaaaaaaaaaaaaaaaaaaaaaaaaaaaaaaaaaaaaaaaaaaaaaaaaaaaaaaaaggggggcccgcccgcagcaaaataaaaacgcgggcttcttcacccccagccacgcggtgggagtagaaaagaccgcgcgccccctttaggaaagagcagcttcttccaccacaaagaataatactgggcgccctcagaatgataaaaagcatttctcttacaggaggggcaccaacaaacactgctccctgagtgaaagaacacttaaacaaaacgacccccggcgtgagtaagagcaaaaagggggcgccatataaaatgtaacaccaccgcggtggttaatgagcaacaacagaaaatgaccacaaagataaaatcggtgtgagcgagaaaagagtgtacgccgcgcagccgtgtgggagaacaacaaaaggagaacgacacaccccaaacacagaccggggtgaattaataggtgcgacccccccacatgggagggaaagtgtaggtcaaccgaaggaggggaagaacaaagccccccgcctatcacccaaattatgcgccgaacggggagaggtgaacataaacccccacgagggctgaacaattaagggcggaccgccgcaagaacattatctggaaagatcatcagaaaacaacaacattaaagcggggaagattgttgcgagaaaaaactgacaacgaaagatgacagg

SEQ ID NO: 434198 - DNA, 1300 bp, Homo sapiens
ctggactcaggagctcgccgcgatgccccgccccactctccacccgctgaatgcagggcgcatgctgctacttggcggctcaagccccgcccgcaccgtccccattctctgaccgcccctctcccggtacactgcgcaggcacaacagagccgctcccctctcctcgccccgccaccgggacggagagcgcccgccgctgcatttccggcgacacctcgcagtcattcctgcggcttgcgcgcccttgtagacagccggggccttcgtgagaccggtgcaggcctggggtagtctcctgtctggacagagaagagaaaaatgcaggacactggctcagtagtgcctttgcattggtttggctttggctacgcagcactggttgcttctggtgggatcattggctatgtaaaagcaggcagcgtgccgtccctggctgcagggctgctctttggcagtctagccggcctgggtgcttaccagctgtctcaggatccaaggaacgtttgggttttcctagctacatctggtaccttggctggcattatgggaatgaggttctaccactctggaaaattcatgcctgcaggtttaattgcaggtgccagtttgctgatggtcgccaaagttggagttagtatgttcaacagaccccattagcagaagtcatgttccagcttagactgatgaagaattaaaaatctgcatcttccactattttcaatatattaagagaaataagtgcagcatttttgcatctgacattttacctaaaaaaaaagacaccaaacttggcagagaggtggaaaatcagtcatgattacaaacctacagaggtggcgagtatgtaacacaagagcttaataagaccctcatagagcttgattcttgtatattgatgttgtcttttctttctgtatctgtaggtaaatctcaagggtaaaatgttaggtgtcagctttcagggctctgaaaccctattccctgctctgaggaacagtgtgaaaaaaagtcttttaggagatttacaatatctgttcttttgctcatcttagaccacagactgactttgaaattatgttaagtgaaatatcaatgaaaataaagtttactataaataatataaaaaaaacagggggcggttcaagttcctaggggccagtaggtaccagtttggtcaagggccataggatagataaatagaggcggttaagttgaggggaacgatgggttgaagactttgggggaaaggacaggatagaggtaatggtagtgacggtgtgggagaggaaataagagaaa

SEQ ID NO: 434199 - DNA, 1076 bp, Homo sapiens
ctggactcaggagctcgccgcgatgccccgccccactctccacccgctgaatgcagggcgcatgctgctacttggcggctcaagccccgcccgcaccgtccccattctctgaccgcccctctcccggtacactgcgcaggcacaacagagccgctcccctctcctcgccccgccaccgggacggagagcgcccgccgctgcatttccggcgacacctcgcagtcattcctgcggcttgcgcgcccttgtagacagccggggccttcgtgagaccggtgcaggcctggggtagtctcctgtctggacagagaagagaaaaatgcaggacactggctcagtagtgcctttgcattggtttggctttggctacgcagcactggttgcttctggtgggatcattggctatgtaaaagcagccggcctgggtgcttaccagctgtctcaggatccaaggaacgtttgggttttcctagctacatctggtaccttggctggcattatgggaatgaggttctaccactctggaaaattcatgcctgcaggtttaattgcaggtgccagtttgctgatggtcgccaaagttggagttagtatgttcaacagaccccattagcagaagtcatgttccagcttagactgatgaagaattaaaaatctgcatcttccactattttcaatatattaagagaaataagtgcagcatttttgcatctgacattttacctaaaaaaaaagacaccaaacttggcagagaggtggaaaatcagtcatgattacaaacctacagaggtggcgagtatgtaacacaagagcttaataagaccctcatagagcttgattcttgtatattgatgttgtcttttctttctgtatctgtaggtaaatctcaagggtaaaatgttaggtgtcagctttcagggctctgaaaccctattccctgctctgaggaacagtgtgaaaaaaagtcttttaggagatttacaatatctgttcttttgctcatcttagaccacagactgactttgaaattatgttaagtgaaatatcaatgaaaataaagtttactataaataata

SEQ ID NO: 434200 - DNA, 1181 bp, Homo sapiens
  misc_feature (1127)..(1127): n is a, c, g, or t
ctggactcaggagctcgccgcgatgccccgccccactctccacccgctgaatgcagggcgcatgctgctacttggcggctcaagccccgcccgcaccgtccccattctctgaccgcccctctcccggtacactgcgcaggcacaacagagccgctcccctctcctcgccccgccaccgggacggagagcgcccgccgctgcatttccggcgacacctcgcagtcattcctgcggcttgcgcgcccttgtagacagccggggccttcgtgagaccggtgcaggcctggggtagtctcctgtctggacagagaagagaaaaatgcaggacactggctcagtagtgcctttgcattggtttggctttggctacgcagcactggttgcttctggtgggatcattggctatgtaaaagcaggcagcgtgccgtccctggctgcagggctgctctttggcagtctagccggcctgggtgcttaccagctgtctcaggatccaaggaacgtttgggttttcctagctacatctggtaccttggctggcattatgggaatgaggttctaccactctggaaaattcatgcctgcaggtttaattgcaggtgccagtttgctgatggtcgccaaagttggagttagtatgttcaacagaccccattagcagaagtcatgttccagcttagactgatgaagaattaaaaatctgcatcttccactattttcaatatattaagagaaataagtgcagcatttttgcatctgacattttacctaaaaaaaaagacaccaaacttggcagagaggtggaaaatcagtcatgattacaaacctacagaggtggcgagtatgtaacacaagagcttaataagaccctcatagagcttgattcttgtatattgatgttgtcttttctttctgtatctgtaggtaaatctcaagggtaaaatgttaggtgtcagctttcagggctctgaaaccctattccctgctctgaggaacagtgtgaaaaaaagtcttttaggagatttacaatatctgttcttttgctcatcttagaccacagactgactttgaaattatgttaagtgaaatatcaatgaaaataaagtttactataaataataaaactngtgccgaattcggcagagcttcaatcagaggtaattattaagccagcttgccct

SEQ ID NO: 434201 - DNA, 1123 bp, Homo sapiens
  misc_feature (532)..(532): n is a, c, g, or t
  misc_feature (535)..(535): n is a, c, g, or t
  misc_feature (537)..(537): n is a, c, g, or t
  misc_feature (588)..(588): n is a, c, g, or t
  misc_feature (600)..(600): n is a, c, g, or t
  misc_feature (604)..(604): n is a, c, g, or t
  misc_feature (607)..(607): n is a, c, g, or t
  misc_feature (622)..(622): n is a, c, g, or t
  misc_feature (633)..(633): n is a, c, g, or t
  misc_feature (647)..(647): n is a, c, g, or t
  misc_feature (656)..(656): n is a, c, g, or t
  misc_feature (664)..(664): n is a, c, g, or t
  misc_feature (681)..(681): n is a, c, g, or t
ctggactcaggagctcgccgcgatgccccgccccactctccacccgctgaatgcagggcgcatgctgctacttggcggctcaagccccgcccgcaccgtccccattctctgaccgcccctctcccggtacactgcgcaggcacaacagagccgctcccctctcctcgccccgccaccgggacggagagcgcccgccgctgcatttccggcgacacctcgcagtcattcctgcggcttgcgcgcccttgtagacagccggggccttcgtgagaccggtgcaggcctggggtagtctcctgtctggacagagaagagaaaaatgcaggacactggctcagtagtgcctttgcattggtttggctttggctacgcagcactggttgcttctggtgggatcattggctatgtaaaagcaggcagcgtgccgtccctggctgcagggctgctctttggcagtctagccggcctgggtgcttaccagctgtctcaggatccaaggaacgtttgggttttcctagcgctccatccggtnccncngctggcattaggggaaggcggccccaccaccccggaaaacccacgcccgcnggctcaatcgcnggcnccngttcgccgacggccnccaaagtgggngtccgcacgccccnccgcccccncccgccgnagccacgcccccgcccngactgatgaagaattaaaaatctgcatcttccactattttcaatatattaagagaaataagtgcagcatttttgcatctgacattttacctaaaaaaaaagacaccaaacttggcagagaggtggaaaatcagtcatgattacaaacctacagaggtggcgagtatgtaacacaagagcttaataagaccctcatagagcttgattcttgtatattgatgttgtcttttctttctgtatctgtaggtaaatctcaagggtaaaatgttaggtgtcagctttcagggctctgaaaccctattccctgctctgaggaacagtgtgaaaaaaagtcttttaggagatttacaatatctgttcttttgctcatcttagaccacagactgactttgaaattatgttaagtgaaatatcaatgaaaataaagtttactataaataata

SEQ ID NO: 434202 - DNA, 1459 bp, Homo sapiens
ctggactcaggagctcgccgcgatgccccgccccactctccacccgctgaatgcagggcgcatgctgctacttggcggctcaagccccgcccgcaccgtccccattctctgaccgcccctctcccggtacactgcgcaggcacaacagagccgctcccctctcctcgccccgccaccgggacggagagcgcccgccgctgcatttccggcgacacctcgcagtcattcctgcggcttgcgcgcccttgtagacagccggggccttcgtgagaccggtgcaggcctggggtagtctcctgtctggacagagaagagaaaaatgcaggacactggctcagtagtgcctttgcattggtttggctttggctacgcagcactggttgcttctggtgggatcattggctatgtaaaagcaggcagcgtgccgtccctggctgcagggctgctctttggcagtctagccggcctgggtgcttaccagctgtctcaggatccaaggaacgtttgggttttcctagctacatctggtaccttggctggcattatgggaatgaggttctaccactctggaaaattcatgcctgcaggtttaattgcaggtgccagtttgctgatggtcgccaaagttggagttagtatgttcaacagaccccattagcagaagtcatgttccagcttagactgatgaagaattaaaaatctgcatcttccactattttcaatatattaagagaaataagtgcagcatttttgcatctgacattttacctaaaaaaaaagacaccaaacttggcagagaggtggaaaatcagtcatgattacaaacctacagaggtggcgagtatgtaacacaagagcttaataagaccctcatagagcttgattcttgtatattgatgttgtctttacatttttaagaataaatttgaaatagagtaaaaaaaaaaaaaaaaaaaaaaaaaaaaaaaaaaaaaaaaaaaaaaaaaaaaaaaaaaaaaaaaaaaaaaaaaaaaaaacaaaaaaaaaaaaagaaaaacataacaaaaagaaacgaaaaaacagagacgaacacaaaaagcaacagataagacaactcaaaacaccagcaaacaccgagaggacacgacaacaaagccggaggcaggcgacgaagaacagccacccacgccgcacaacacgacaaaagagaaccgcagcccagcgctcgggagacccagacaacgcagatacgacgagacgcagcgcagacgaggacagagcatcccccacgaccaccctcggagagacgaggcacggggcacacagccgcacaccgcccactagagcacgccggagagcacgcaactagagactcggacgaaacacagccacacgaagcagcacaacagtgcacgcaaacaacccagcagaccagctgcaaagacaggacagagggagcgaggagacacgaggccaaaag

SEQ ID NO: 434203 - DNA, 1063 bp, Homo sapiens
ctggactcaggagctcgccgcgatgccccgccccactctccacccgctgaatgcagggcgcatgctgctacttggcggctcaagccccgcccgcaccgtccccattctctgaccgcccctctcccggtacactgcgcaggcacaacagagccgctcccctctcctcgccccgccaccgggacggagagcgcccgccgctgcatttccggcgacacctcgcagtcattcctgcggcttgcgcgcccttgtagacagccggggccttcgtgagaccggtgcaggcctggggtagtctcctgtctggacagagaagagaaaaatgcaggacactggctcagtagtgcctttgcattggtttggctttggctacgcagcactggttgcttctggtgggatcattggctatgtaaaagcaggcagcgtgccgtccctggctgcagggctgctctttggcagtctagccggcctgggtgcttaccagctgtctcaggatccaaggaacgtttgggttttcctagctacatctggtaccttggctggcattatgggaatgaggttctaccactctggaaaattcatgcctgcaggtttaattgcaggtgccagtttgctgatggtcgccaaagttggagttagtatgttcaacagaccccattagcagaagtcatgttccagcttagactgatgaagaattaaaaatctgcatcttccactattttcaatatattaagagaaataagtgcagcatttttgcatctgacattttacctacagaggtggcgagtatgtaacacaagagcttaataagaccctcatagagcttgattcttgtatattgatgttgtcttttctttctgtatctgtaggtaaatctcaagggtaaaatgttaggtgtcagctttcagggctctgaaaccctattccctgctctgaggaacagtgtgaaaaaaagtcttttaggagatttacaatatctgttcttttgctcatcttagaccacagactgactttgaaattatgttaagtgaaatatcaatgaaaataaagtttactataaataata

SEQ ID NO: 434204 - DNA, 1237 bp, Homo sapiens
ctggactcaggagctcgccgcgatgccccgccccactctccacccgctgaatgcagggcgcatgctgctacttggcggctcaagccccgcccgcaccgtccccattctctgaccgcccctctcccggtacactgcgcaggcacaacagagccgctcccctctcctcgccccgccaccgggacggagagcgcccgccgctgcatttccggcgacacctcgcagtcattcctgcggcttgcgcgcccttgtagacagccggggccttcgtgagaccgccccaggaaatcggtaccagtgttatcctcatggtacagtgaagaatactgagacttaggttgcgtagcttgcaggttggacacacttctttctgactgctggagagctgtgcttttaactacctctgatccagcttgttttctgcaggtgcaggcctggggtagtctcctgtctggacagagaagagaaaaatgcaggacactggctcagtagtgcctttgcattggtttggctttggctacgcagcactggttgcttctggtgggatcattggctatgtaaaagcaggcagcgtgccgtccctggctgcagggctgctctttggcagtctagccggcctgggtgcttaccagctgtctcaggatccaaggaacgtttgggttttcctagctacatctggtaccttggctggcattatgggaatgaggttctaccactctggaaaattcatgcctgcaggtttaattgcaggtgccagtttgctgatggtcgccaaagttggagttagtatgttcaacagaccccattagcagaagtcatgttccagcttagactgatgaagaattaaaaatctgcatcttccactattttcaatatattaagagaaataagtgcagcatttttgcatctgacattttacctaaaaaaaaagacaccaaacttggcagagaggtggaaaatcagtcatgattacaaacctacagaggtggcgagtatgtaacacaagagcttaataagaccctcatagagcttgattcttgtatattgatgttgtctttggcttcttcggatctgtggtaacttcaggtaaatgtaggggtagttaggttgaaactattctgtttggaacggggacaagttttgggatacaaatcgttggctttagacgaggttgatggtacggattcagaaagtcttttcaaaaaaaaaaattggcggcgaattaattgggggcatagtg

SEQ ID NO: 434205 - DNA, 3729 bp, Homo sapiens
ccacgcgtccgccggatcagagagtgctccgagctgggttgccccactgtgcttgtatctgcactctccaacactaggcatcattgacatgttaaagcttagccaaatagaattgttctttgtcattctttttttaacttttacttattcattaggatgatttcataatatatttcctggtttagaggaaacaggaacaatggctaccgagagtactccctcagagatcatagaaagagaaagaaaaaagttgcttgaaatccttcaacatgatcctgattctatcttagacacgttaacttctcggaggctgatttctgaggaagagtatgagactctggagaatgttacagatctcctgaagaaaagtcggaagctgttaattttggtacagaaaaagggagaggcgacctgtcagcattttctcaagtgtttatttagtacttttccacagttagctgccatttgcggcttaaggcatgaagttttaaaacatgagaatacagtacctcctcaatctatgggggcaagcagtaattcagaagatgctttttctcctggaataaaacagcctgaagcccctgagatcacagtgttcttcagtgagaaggaacacttggatttggaaacctctgagtttttcagggacaagaaaactagttatagggaaacagctttgtctgccaggaagaatgagaaggaatatgacacaccagaagtcacattatcatattcagttgagaaagttggatgtgaagttccagcaactattacatatataaaagatggacagagatatgaggagctagatgattctttatacttaggaaaagaggaatatctaggatctgttgacacccctgaagatgcagaagccactgtggaagaggaggtttatgatgacccagagcacgttggatatgatggtgaagaggacttcgagaattcagaaaccacagagttctctggtgaagaaccaagttatgagggatcagaaaccagcctttcattggaggaggaacaggagaaaagtatagaagaaagaaaaaaggtgtttaaagatgtcctgttatgtttgaacatggatagaagcagaaaggttctgccagattttgttaaacaattctccttagatcgaggatgtaagtggacccctgagagtccaggagacttagcctggaatttcctgatgaaagttcaagcacgagatgtgacggctagggattcaatcctcagtcacaaggttctggatgaagatagcaaggaggatttgctggctggagtggagaatttggaaattcgagacatacaaaccattaatccccttgacgtgctttgtgccaccatgctgtgttcagatagctctttgcaacgccaagtcatgtcaaacatgtatcagtgccagtttgctcttcccctgctactgccagatgcagaaaacaacaaaagcatcttaatgctgggggccatgaaagacattgtgaagaagcagtcaacacagttttcaggggggcctacagaggatacagaaaagtttctgactctcatgaagatgcctgtcatctcttttgtgcgtctaggatactgtagcttctctaagtccagaatcctcaacacacttctcagccctgcccagttgaaattacacaaaatctttcttcatcaagatttgcctcttttggtgcttccccggcaaatctctgatggcctggttgagataacatggtgttttcctgatagcgatgatagaaaggaaaacccctttttccaaaagcctgttgctctggctaatctccgtggaaatctagaaagcttttggactcagtttggttttttgatggaagtttcttcagctgtgttttttttcactgactgtttaggtgagaaggaatgggacttgctaatgtttttaggagaggctgccattgaaagatgctactttgttctcagttcccaagccagggagagtgaagaggctcaaatttttcagaggatactgaacttgaagccagcacagctactgttttgggagaggggagatgctggggatagaaggaagaacatggagggccttcaagctgccctccaggaagtgatgttctcttcttgcctcagatgtgtgtctgtggaggatatggccgccctggccagggagctggggattcaggtagatgaagactttgaaaacactcagagaattcaagtttcctctggagaaaacatggctgggacagctgaaggtgagggtcagcaaagacacagtcagctaaaaagctcatctaaaagccaggctctaatgccaattcaagagcctgggactcaatgtgagctcagccagaatcttcagaatctctatggtaccccagtattcaggcctgttctagagaactcctggctctttccaaccagaattggaggtaactttaaccatgtttccttgaaagcctcctgggttatgggccgcccctttgggtcagagcagaggcctaagtggttccatcctttgccttttcagaatgcaggggcccagggccgaggtaaaagttttggtattcaatccttccatccccagatattttattcaggtgaaagattcatgaaattttccagagttgctcggggatgtcactcgaatggaacatttgggagactgccaagacccatttgtcagcatgtacaggcctgccctgagagaccacaaatgatgggaactcttgaaaggtctagggcagtagcctccaagataggtcactcctattccctggattcacagccagcaagagcagtagggaagccatggcctcagcaagcttgcaccagggtaacagagttaactgaagcaactggaaaactgataagaacatcccatattggaaagcctcaccctcagtcctttcaaccagcagcagccacacaaaaactaagacctgcttctcagcaaggagtccagatgaagacacaaggtggggcttcaaatccagctctccaaatagggtcccatcccatgtgcaagagctctcagttcaaatccgatcagtccaacccatccacagtcaaacactcccagcctaaacccttccattctgtgccctctcaacctaaatcctctcagacaaaatcctgtcagtcccagccctcccaaactaaaccttggtttctccatgttggtcaggctggtcttgaactcccgacctcaggtgatccgcccacctaggcctctcaaagtgttgggattacgtgtgtaagccacagtgcccagcccgaattggatatctttaagatatctgtaagtgttatatccctaaccaagaagaaaaatatgaaaataattaagactagaatcaagcagtagataattgaatccaatcttgggtattattagataatgtataacttgcacccagggaatgggggtctatgagacaaccccacttggagaagaatggggttagggtctctaattgcaaagtgactgtacaataggacgaaagttgcctctgtgtctgagaaagtatcttagttgttggctgctccagaggtatctttgtcaaaagcttctggttcaatatcagccactgagcagataaccctgcttatttggtgtggttaaatcaactagcttctgctaatagccccaatttgcttgaatgggaaaactctctcatttgacccttataggtagaaataatgaattaacaaccaataaaattaatcatttggcattaactt

SEQ ID NO: 434206 - DNA, 3028 bp, Homo sapiens
ccacgcgtccgccggatcagagagtgctccgagctgggttgccccactgtgcttgtatctgcactctccaacactaggcatcattgacatgttaaagcttagccaaatagaattgttctttgtcattctttttttaacttttacttattcattaggatgatttcataatatatttcctggtttagaggaaacaggaacaatggctaccgagagtactccctcagagatcatagaaagagaaagaaaaaagttgcttgaaatccttcaacatgatcctgattctatcttagacacgttaacttctcggaggctgatttctgaggaagagtatgagactctggagaatgttacagatctcctgaagaaaagtcggaagctgttaattttggtacagaaaaagggagaggcgacctgtcagcattttctcaagtgtttatttagtacttttccacagttagctgccatttgcggcttaaggcatgaagttttaaaacatgagaatacagtacctcctcaatctatgggggcaagcagtaattcagaagatgctttttctcctggaataaaacagcctgaagcccctgagatcacagtgttcttcagtgagaaggaacacttggatttggaaacctctgagtttttcagggacaagaaaactagttatagggaaacagctttgtctgccaggaagaatgagaaggaatatgacacaccagaagtcacattatcatattcagttgagaaagttggatgtgaagttccagcaactattacatatataaaagatggacagagatatgaggagctagatgattctttatacttaggaaaagaggaatatctaggatctgttgacacccctgaagatgcagaagccactgtggaagaggaggtttatgatgacccagagcacgttggatatgatggtgaagaggacttcgagaattcagaaaccacagagttctctggtgaagaaccaagttatgagggatcagaaaccagcctttcattggaggaggaacaggagaaaagtatagaagaaagaaaaaaggtgtttaaagatgtcctgttatgtttgaacatggatagaagcagaaaggttctgccagattttgttaaacaattctccttagatcgaggatgtaagtggacccctgagagtccaggagacttagcctggaatttcctgatgaaagttcaagcacgagatgtgacggctagggattcaatcctcagtcacaaggttctggatgaagatagcaaggaggatttgctggctggagtggagaatttggaaattcgagacatacaaaccattaatccccttgacgtgctttgtgccaccatgctgtgttcagatagctctttgcaacgccaagtcatgtcaaacatgtatcagtgccagtttgctcttcccctgctactgccagatgcagaaaacaacaaaagcatcttaatgctgggggccatgaaagacattgtgaagaagcagtcaacacagttttcaggggggcctacagaggatacagaaaagtttctgactctcatgaagatgcctgtcatctcttttgtgcgtctaggatactgtagcttctctaagtccagaatcctcaacacacttctcagccctgcccagttgaaattacacaaaatctttcttcatcaagatttgcctcttttggtgcttccccggcaaatctctgatggcctggttgagataacatggtgttttcctgatagcgatgatagaaaggaaaacccctttttccaaaagcctgttgctctggctaatctccgtggaaatctagaaagcttttggactcagtttggttttttgatggaagtttcttcagctgtgttttttttcactgactgtttaggtgagaaggaatgggacttgctaatgtttttaggagaggctgccattgaaagatgctactttgttctcagttcccaagccagggagagtgaagaggctcaaatttttcagaggatactgaacttgaagccagcacagctactgttttgggagaggggagatgctggggatagaaggaagaacatggagggccttcaagctgccctccaggaagtgatgttctcttcttgcctcagatgtgtgtctgtggaggatatggccgccctggccagggagctggggattcaggtagatgaagactttgaaaacactcagagaattcaagtttcctctggagaaaacatggctgggacagctgaaggtgagggtcagcaaagacacagtcagctaaaaagctcatctaaaagccaggctctaatgccaattcaagagcctgggactcaatgtgagctcagccagaatcttcagaatctctatggtaccccagtattcaggcctgttctagagaactcctggctctttccaaccagaattggaggtaactttaaccatgtttccttgaaagcctcctgggttatgggccgcccctttgggtcagagcagaggcctaagtggttccatcctttgccttttcagaatgcaggggcccagggccgaggtaaaagttttggtattcaatccttccatccccagatattttattcaggtgaaagattcatgaaattttccagagttgctcggggatgtcactcgaatggaacatttgggagactgccaagacccatttgtcagcatgtacaggcctgccctgagagaccacaaatgatgggaactcttgaaaggtctagggcagtagcctccaagataggtcactcctattccctggattcacagccagcaagagcagtagggaagccatggcctcagcaagcttgcaccagggtaacagagttaactgaagcaactggaaaactgataagaacatcccatattggaaagcctcaccctcagtcctttcaaccagcagcagccacacataatgccatcaagtttgactgcttcaagcagattagattccagctgtcttccaaccctctagtgaataccagaattattgttttttctgtctttcgagaccagggtctcact

SEQ ID NO: 434207 - DNA, 4224 bp, Homo sapiens
ccacgcgtccgccggatcagagagtgctccgagctgggttgccccactgtgcttgtatctgcactctccaacactaggcatcattgacatgttaaagcttagccaaatagaattgttctttgtcattctttttttaacttttacttattcattaggatgatttcataatatatttcctggtttagaggaaacaggaacaatggctaccgagagtactccctcagagatcatagaaagagaaagaaaaaagttgcttgaaatccttcaacatgatcctgattctatcttagacacgttaacttctcggaggctgatttctgaggaagagtatgagactctggagaatgttacagatctcctgaagaaaagtcggaagctgttaattttggtacagaaaaagggagaggcgacctgtcagcattttctcaagtgtttatttagtacttttccacagttagctgccatttgcggcttaaggcatgaagttttaaaacatgagaatacagtacctcctcaatctatgggggcaagcagtaattcagaagatgctttttctcctggaataaaacagcctgaagcccctgagatcacagtgttcttcagtgagaaggaacacttggatttggaaacctctgagtttttcagggacaagaaaactagttatagggaaacagctttgtctgccaggaagaatgagaaggaatatgacacaccagaagtcacattatcatattcagttgagaaagttggatgtgaagttccagcaactattacatatataaaagatggacagagatatgaggagctagatgattctttatacttaggaaaagaggaatatctaggatctgttgacacccctgaagatgcagaagccactgtggaagaggaggtttatgatgacccagagcacgttggatatgatggtgaagaggacttcgagaattcagaaaccacagagttctctggtgaagaaccaagttatgagggatcagaaaccagcctttcattggaggaggaacaggagaaaagtatagaagaaagaaaaaaggtgtttaaagatgtcctgttatgtttgaacatggatagaagcagaaaggttctgccagattttgttaaacaattctccttagatcgaggatgtaagtggacccctgagagtccaggagacttagcctggaatttcctgatgaaagttcaagcacgagatgtgacggctagggattcaatcctcagtcacaaggttctggatgaagatagcaaggaggatttgctggctggagtggagaatttggaaattcgagacatacaaaccattaatccccttgacgtgctttgtgccaccatgctgtgttcagatagctctttgcaacgccaagtcatgtcaaacatgtatcagtgccagtttgctcttcccctgctactgccagatgcagaaaacaacaaaagcatcttaatgctgggggccatgaaagacattgtgaagaagcagtcaacacagttttcaggggggcctacagaggatacagaaaagtttctgactctcatgaagatgcctgtcatctcttttgtgcgtctaggatactgtagcttctctaagtccagaatcctcaacacacttctcagccctgcccagttgaaattacacaaaatctttcttcatcaagatttgcctcttttggtgcttccccggcaaatctctgatggcctggttgagataacatggtgttttcctgatagcgatgatagaaaggaaaacccctttttccaaaagcctgttgctctggctaatctccgtggaaatctagaaagcttttggactcagtttggttttttgatggaagtttcttcagctgtgttttttttcactgactgtttaggtgagaaggaatgggacttgctaatgtttttaggagaggctgccattgaaagatgctactttgttctcagttcccaagccagggagagtgaagaggctcaaatttttcagaggatactgaacttgaagccagcacagctactgttttgggagaggggagatgctggggatagaaggaagaacatggagggccttcaagctgccctccaggaagtgatgttctcttcttgcctcagatgtgtgtctgtggaggatatggccgccctggccagggagctggggattcaggtagatgaagactttgaaaacactcagagaattcaagtttcctctggagaaaacatggctgggacagctgaaggtgagggtcagcaaagacacagtcagctaaaaagctcatctaaaagccaggctctaatgccaattcaagagcctgggactcaatgtgagctcagccagaatcttcagaatctctatggtaccccagtattcaggcctgttctagagaactcctggctctttccaaccagaattggaggtaactttaaccatgtttccttgaaagcctcctgggttatgggccgcccctttgggtcagagcagaggcctaagtggttccatcctttgccttttcagaatgcaggggcccagggccgaggtaaaagttttggtattcaatccttccatccccagatattttattcaggtgaaagattcatgaaattttccagagttgctcggggatgtcactcgaatggaacatttgggagactgccaagacccatttgtcagcatgtacaggcctgccctgagagaccacaaatgatgggaactcttgaaaggtctagggcagtagcctccaagataggtcactcctattccctggattcacagccagcaagagcagtagggaagccatggcctcagcaagcttgcaccagggtaacagagttaactgaagcaactggaaaactgataagaacatcccatattggaaagcctcaccctcagtcctttcaaccagcagcagccacacaaaaactaagacctgcttctcagcaaggagtccagatgaagacacaaggtggggcttcaaatccagctctccaaatagggtcccatcccatgtgcaagagctctcagttcaaatccgatcagtccaacccatccacagtcaaacactcccagcctaaacccttccattctgtgccctctcaacctaaatcctctcagacaaaatcctgtcagtcccagccctcccaaactaaaccttctccatgcaaatctactcagcctaagccaagccagccctggcctccccagtctaagccttctcagcccagaccccctcaacctaagtcatcctcaaccaatccttcacaagctaaggcacaccactcaaaagcagggcagaagaggggagggaagcattaaagagctaactccagagatctataaagcatatcctttacccaggccattcctatcatatagtaagcagaagagttgccatgaaagtaaaagactactgtcattagcatgtaaaacaaagaaagatatacatgaccgaattggatatctttgtttgtttgtttgagacagagtttcactcttgttgcccaggctggagtgcaatggcacgatctcggctcaccgcaacctctgcttcctggcttaaagtgattctcctgcctcagcctctcgagtagctgggattacaggcatgcaccaccacacccagctaattttgtatttttagtagaggcagggtttctccatgttggtcaggctggtcttgaactcccgacctcaggtgatccgcccacctaggcctctcaaagtgttgggattacgtgtgtaagccacagtgcccagcccgaattggatatctttaagatatctgtaagtgttatatccctaaccaagaagaaaaatatgaaaataattaagactagaatcaagcagtagataattgaatccaatcttgggtattattagataatgtataacttgcacccagggaatgggggtctatgagacaaccccacttggagaagaatggggttagggtctctaattgcaaagtgactgtacaataggacgaaagttgcctctgtgtctgagaaagtatcttagttgttggctgctccagaggtatctttgtcaaaagcttctggttcaatatcagccactgagcagataaccctgcttatttggtgtggttaaatcaactagcttctgctaatagccccaatttgcttgaatgggaaaactctctcatttgacccttataggtagaaataatgaattaacaaccaataaaattaatcatttggcattaactt

SEQ ID NO: 434208 - DNA, 3384 bp, Homo sapiens
ccacgcgtccgccggatcagagagtgctccgagctgggttgccccactgtgcttgtatctgcactctccaacactaggcatcattgacatgttaaagcttagccaaatagaattgttctttgtcattctttttttaacttttacttattcattaggatgatttcataatatatttcctggtttagaggaaacaggaacaatggctaccgagagtactccctcagagatcatagaaagagaaagaaaaaagttgcttgaaatccttcaacatgatcctgattctatcttagacacgttaacttctcggaggctgatttctgaggaagagtatgagactctggagaatgttacagatctcctgaagaaaagtcggaagctgttaattttggtacagaaaaagggagaggcgacctgtcagcattttctcaagtgtttatttagtacttttccacagttagctgccatttgcggcttaaggcatgaagttttaaaacatgagaatacagtacctcctcaatctatgggggcaagcagtaattcagaagatgctttttctcctggaataaaacagcctgaagcccctgagatcacagtgttcttcagtgagaaggaacacttggatttggaaacctctgagtttttcagggacaagaaaactagttatagggaaacagctttgtctgccaggaagaatgagaaggaatatgacacaccagaagtcacattatcatattcagttgagaaagttggatgtgaagttccagcaactattacatatataaaagatggacagagatatgaggagctagatgattctttatacttaggaaaagaggaatatctaggatctgttgacacccctgaagatgcagaagccactgtggaagaggaggtttatgatgacccagagcacgttggatatgatggtgaagaggacttcgagaattcagaaaccacagagttctctggtgaagaaccaagttatgagggatcagaaaccagcctttcattggaggaggaacaggagaaaagtatagaagaaagaaaaaaggtgtttaaagatgtcctgttatgtttgaacatggatagaagcagaaaggttctgccagattttgttaaacaattctccttagatcgaggatgtaagtggacccctgagagtccaggagacttagcctggaatttcctgatgaaagttcaagcacgagatgtgacggctagggattcaatcctcagtcacaaggttctggatgaagatagcaaggaggatttgctggctggagtggagaatttggaaattcgagacatacaaaccattaatccccttgacgtgctttgtgccaccatgctgtgttcagatagctctttgcaacgccaagtcatgtcaaacatgtatcagtgccagtttgctcttcccctgctactgccagatgcagaaaacaacaaaagcatcttaatgctgggggccatgaaagacattgtgaagaagcagtcaacacagttttcaggggggcctacagaggatacagaaaagtttctgactctcatgaagatgcctgtcatctcttttgtgcgtctaggatactgtagcttctctaagtccagaatcctcaacacacttctcagccctgcccagttgaaattacacaaaatctttcttcatcaagatttgcctcttttggtgcttccccggcaaatctctgatggcctggttgagataacatggtgttttcctgatagcgatgatagaaaggaaaacccctttttccaaaagcctgttgctctggctaatctccgtggaaatctagaaagcttttggactcagtttggttttttgatggaagtttcttcagctgtgttttttttcactgactgtttaggtgagaaggaatgggacttgctaatgtttttaggagaggctgccattgaaagatgctactttgttctcagttcccaagccagggagagtgaagaggctcaaatttttcagaggatactgaacttgaagccagcacagctactgttttgggagaggggagatgctggggatagaaggaagaacatggagggccttcaagctgccctccaggaagtgatgttctcttcttgcctcagatgtgtgtctgtggaggatatggccgccctggccagggagctggggattcaggtagatgaagactttgaaaacactcagagaattcaagtttcctctggagaaaacatggctgggacagctgaaggtgagggtcagcaaagacacagtcagctaaaaagctcatctaaaagccaggctctaatgccaattcaagagcctgggactcaatgtgagctcagccagaatcttcagaatctctatggtaccccagtattcaggcctgttctagagaactcctggctctttccaaccagaattggaggtaactttaaccatgtttccttgaaagcctcctgggttatgggccgcccctttgggtcagagcagaggcctaagtggttccatcctttgccttttcagaatgcaggggcccagggccgaggtaaaagttttggtattcaatccttccatccccagatattttattcaggtgaaagattcatgaaattttccagagttgctcggggatgtcactcgaatggaacatttgggagactgccaagacccatttgtcagcatgtacaggcctgccctgagagaccacaaatgatgggaactcttgaaaggtctagggcagtagcctccaagataggtcactcctattccctggattcacagccagcaagagcagtagggaagccatggcctcagcaagcttgcaccagggtaacagagttaactgaagcaactggaaaactgataagaacatcccatattggaaagcctcaccctcagtcctttcaaccagcagcagccacacaaaaactaagacctgcttctcagcaaggagtccagatgaagacacaaggtggggcttcaaatccagctctccaaatagggtcccatcccatgtgcaagagctctcagttcaaatccgatcagtccaacccatccacagtcaaacactcccagcctaaacccttccattctgtgccctctcaacctaaatcctctcagacaaaatcctgtcagtcccagccctcccaaactaaaccttctccatgcaaatctactcagcctaagccaagccagccctggcctccccagtcaaaagcttctggttcaatatcagccactgagcagataaccctgcttatttggtgtggttaaatcaactagcttctgctaatagccccaatttgcttgaatgggaaaactctctcatttgacccttataggtagaaataatgaattaacaaccaataaaattaatcatttggcattaactt

SEQ ID NO: 434209 - DNA, 3023 bp, Homo sapiens
ccacgcgtccgccggatcagagagtgctccgagctgggttgccccactgtgcttgtatctgcactctccaacactaggcatcattgacatgttaaagcttagccaaatagaattgttctttgtcattctttttttaacttttacttattcattaggatgatttcataatatatttcctggtttagaggaaacaggaacaatggctaccgagagtactccctcagagatcatagaaagagaaagaaaaaagttgcttgaaatccttcaacatgatcctgattctatcttagacacgttaacttctcggaggctgatttctgaggaagagtatgagactctggagaatgttacagatctcctgaagaaaagtcggaagctgttaattttggtacagaaaaagggagaggcgacctgtcagcattttctcaagtgtttatttagtacttttccacagttagctgccatttgcggcttaaggcatgaagttttaaaacatgagaatacagtacctcctcaatctatgggggcaagcagtaattcagaagatgctttttctcctggaataaaacagcctgaagcccctgagatcacagtgttcttcagtgagaaggaacacttggatttggaaacctctgagtttttcagggacaagaaaactagttatagggaaacagctttgtctgccaggaagaatgagaaggaatatgacacaccagaagtcacattatcatattcagttgagaaagttggatgtgaagttccagcaactattacatatataaaagatggacagagatatgaggagctagatgattctttatacttaggaaaagaggaatatctaggatctgttgacacccctgaagatgcagaagccactgtggaagaggaggtttatgatgacccagagcacgttggatatgatggtgaagaggacttcgagaattcagaaaccacagagttctctggtgaagaaccaagttatgagggatcagaaaccagcctttcattggaggaggaacaggagaaaagtatagaagaaagaaaaaaggtgtttaaagatgtcctgttatgtttgaacatggatagaagcagaaaggttctgccagattttgttaaacaattctccttagatcgaggatgtaagtggacccctgagagtccaggagacttagcctggaatttcctgatgaaagttcaagcacgagatgtgacggctagggattcaatcctcagtcacaaggttctggatgaagatagcaaggaggatttgctggctggagtggagaatttggaaattcgagacatacaaaccattaatccccttgacgtgctttgtgccaccatgctgtgttcagatagctctttgcaacgccaagtcatgtcaaacatgtatcagtgccagtttgctcttcccctgctactgccagatgcagaaaacaacaaaagcatcttaatgctgggggccatgaaagacattgtgaagaagcagtcaacacagttttcaggggggcctacagaggatacagaaaagtttctgactctcatgaagatgcctgtcatctcttttgtgcgtctaggatactgtagcttctctaagtccagaatcctcaacacacttctcagccctgcccagttgaaattacacaaaatctttcttcatcaagatttgcctcttttggtgcttccccggcaaatctctgatggcctggttgagataacatggtgttttcctgatagcgatgatagaaaggaaaacccctttttccaaaagcctgttgctctggctaatctccgtggaaatctagaaagcttttggactcagtttggttttttgatggaagtttcttcagctgtgttttttttcactgactgtttaggtgagaaggaatgggacttgctaatgtttttaggagaggctgccattgaaagatgctactttgttctcagttcccaagccagggagagtgaagaggctcaaatttttcagaggatactgaacttgaagccagcacagctactgttttgggagaggggagatgctggggatagaaggaagaacatggagggccttcaagctgccctccaggaagtgatgttctcttcttgcctcagatgtgtgtctgtggaggatatggccgccctggccagggagctggggattcaggtagatgaagactttgaaaacactcagagaattcaagtttcctctggagaaaacatggctgggacagctgaaggtgagggtcagcaaagacacagtcagctaaaaagctcatctaaaagccaggctctaatgccaattcaagagcctgggactcaatgtgagctcagccagaatcttcagaatctctatggtaccccagtattcaggcctgttctagagaactcctggctctttccaaccagaattggaggtaactttaaccatgtttccttgaaagcctcctgggttatgggccgcccctttgggtcagagcagaggcctaagtggttccatcctttgccttttcagaatgcaggggcccagggccgaggtaaaagttttggtattcaatccttccatccccagatattttattcaggtgaaagattcatgaaattttccagagttgctcggggatgtcactcgaatggaacatttgggagactgccaagacccatttgtcagcatgtacaggcctgccctgagagaccacaaatgatgggaactcttgaaaggtctagggcagtagcctccaagataggtcactcctattccctggattcacagccagcaagagcagtagggaagccatggcctcagcaagcttgcaccagggtaacagagttaactgaagcaactggaaaactgataagaacatcccatattggaaagcctcaccctcagtcctttcaaccagcagcagccacacacacatacacacacacacatgcagaggaaacagacttactgggattcaaaactctacaatatctgagacacacagatgacccacagagtacggggccaggcctcctcc

SEQ ID NO: 434210 - DNA, 2108 bp, Homo sapiens
gaaaagccgaccgagacggagccgctgtcaactctccaactcagctcagctgatcggttgccgccgccgccgccgccagattctggaggcgaagaacgcaaagctgagaacatggacgttaatatcgccccactccgcgcctgggacgatttcttcccgggttccgatcgctttgcccggccggacttcagggacatttccaaatggaacaaccgcgtagtgagcaacctgctctattaccagaccaactacctggtggtggctgccatgatgatttccattgtggggtttctgagtcccttcaacatgatcctgggaggaatcgtggtggtgctggtgttcacagggtttgtgtgggcagcccacaataaagacgtccttcgccggatgaagaagcgctaccccacgacgttcgttatggtggtcatgttggcgagctatttccttatctccatgtttggaggagtcatggtctttgtgtttggcattacttttcctttgctgttgatgtttatccatgcatcgttgagacttcggaacctcaagaacaaactggagaataaaatggaaggaataggtttgaagaggacaccgatgggcattgtcctggatgccctagaacagcaggaagaaggcatcaacagactcactgactatatcagcaaagtgaaggaataaacataacttacctgagctagggttgcagcagaaattgagttgcagcttgcccttgtccagacctatgttctgcttgcgtttttgaaacaggaggtgcacgtaccacccaattatctatggcagcatgcatgtataggccgaactattatcagctctgatgtttcagagagaagacctcagaaaccgaaagaaaaccaccaccctcctattgtgtctgaagtttcacgtgtgtttatgaaatctaatgggaaatggatcacacgatttctttaagggaattaaaaaaaataaaagaattacggcttttacagcaacaatacgattatcttataggaaaaaaaaaatcattgtaaagtatcaagacaatacgagtaaatgaaaaggctgttaaagtagatgacatcatgtgttagcctgttcctaatcccctagaattgtaatgtgtgggatataaattagtttttattattctcttaaaaatcaaagatgatctctatcactttgccacctgtttgatgtgcagtggaaactggttaagccagttgttcatacttcgtttacaaatataaagatagctgtttaggatattttgttacatttttgtaaatttttgaaatgctagtaatgtgttttcaccagcaagtatttgttgcaaacttaatgtcattttccttaagatggttacagctatgtaacctgtattattctggacggacttattaaaatacaaacagacaaaaaataaaacaaaacttgagttctatttaccttgcacattttttgttgttacagtgaaaaaaatggtccaagaaaatgtttgccatttttgcattgtttcgtttttaactggaacatttagaaagaaggaaatgaatgtgcattttattaattccttaggggcacaaggaggacaataatagctgatcttttgaaatttgaaaaacgtctttagatgaccaagcaaaaagactttaaaaaatggtaatgaaaatggaatgcagctactgcagctaataaaaaattttagatagcaattgttacaaccatatgcctttatagctagacattagaattatgatagcatgagtttatacattctattatttttcctccctttctcatgtttttataaataggtaataaaaaatgttttgcctgccaattgaatgatttcgtagctgaagtagaaacatttaggtttctgtagcattaaattgtgaagacaactggagtggtacttactgaagaaactctctgtatgtcctagaataagaagcaatgatgtgctgcttctgatttttcttgcattttaaattctcagccaacctacagccatgatctttagcacagtgatatcaccatgacttcacagacatggtctagaatctgtacccttacccacatatgaagaataaaattgattaaaggtt

SEQ ID NO: 434211 - DNA, 1441 bp, Homo sapiens
gaaaagccgaccgagacggagccgctgtcaactctccaactcagctcagctgatcggttgccgccgccgccgccgccagattctggaggcgaagaacgcaaagctgagaacatggacgttaatatcgccccactccgcgcctgggacgatttcttcccgggttccgatcgctttgcccggccggacttcagggacatttccaaatggaacaaccgcgtagtgagcaacctgctctattaccagaccaactacctggtggtggctgccatgatgatttccattgtggggtttctgagtcccttcaacatgatcctgggaggaatcgtggtggtgctggtgttcacagggtttgtgtgggcagcccacaataaagacgtccttcgccggatgaagaagcgctaccccacgacgttcgttatggtggtcatgttggcgagctatttccttatctccatgtttggaggagtcatggtctttgtgtttggcattacttttcctttgctgttgatgtttatccatgcatcgttgagacttcggaacctcaagaacaaactggagaataaaatggaaggaataggtttgaagaggacaccgatgggcattgtcctggatgccctagaacagcaggaagaaggcatcaacagactcactgactatatcagcaaagtgaaggaataaacataacttacctgagctagggttgcagcagaaattgagttgcagcttgcccttgtccagacctatgttctgcttgcgtttttgaaacaggaggtgcacgtaccacccaattatctatggcagcatgcatgtataggccgaactattatcagctctgatgtttcagagagaagacctcagaaaccgaaagaaaaccaccaccctcctattgtgtctgaagtttcacgtgtgtttatgaaatctaatgggaaatggatcacacgatttctttaagggaattaaaaaaaataaaagaattacggcttttacagcaacaatacgattatcttataggaaaaaaaaaatcattgtaaagtatcaagacaatacgagtaaatgaaaaggctgttaaagtagatgacatcatgtgttagcctgttcctaatcccctagaattgtaatgtgtgggatataaattagtttttattattctcttaaaaatcaaagatgatctctatcactttgccacctgtttgatgtgcagtggaaactggttaagccagttgttcatacttcgtttacaaatataaagatagctgtttaggatattttgttacatttttgtaaatttttgaaatgctagtaatgtgttttcaccagcaagtatttgttgcaaacttaatgtcattttccttaagatggttacagctatgtaacctgtattattctggacggacttattaaaatacaaacagacaaaaaataaaacaaaacttgagttcta

SEQ ID NO: 434212 - DNA, 901 bp, Homo sapiens
catgctggagtgcagtggcacaatctcggctcactgcaacctccacctcccatgttcaagtgattcttctgcctcagcctcctgagtagctgggattgcaggtgtgtgccaccacacctggctaatttttctatattttatagagacgggggagattctggaggcgaagaacgcaaagctgagaacatggacgttaatatcgccccactccgcgcctgggacgatttcttcccgggttccgatcgctttgcccggccggacttcagggacatttccaaatggaacaaccgcgtagtgagcaacctgctctattaccagaccaactacctggtggtggctgccatgatgatttccattgtggggtttctgagtcccttcaacatgatcctgggaggaatcgtggtggtgctggtgttcacagggtttgtgtgggcagcccacaataaagacgtccttcgccggatgaagaagcgctaccccacgacgttcgttatggtggtcatgttggcgagctatttccttatctccatgtttggaggagtcatggtctttgtgtttggcattacttttcctttgctgttgatgtttatccatgcatcgttgagacttcggaacctcaagaacaaactggagaataaaatggaaggaataggtttgaagaggacaccgatgggcattgtcctggatgccctagaacagcaggaagaaggcatcaacagactcactgactatatcagcaaagtgaaggaataaacataacttacctgagctagggttgcagcagaaattgagttgcagcttgcccttgtccagacctatgttctgcttgcgtttttgaaacaggagtgcgtcaccatttatgggtgtgttagcgaattagtctgtgtagaaaagactgaac

SEQ ID NO: 434213 - DNA, 536 bp, Homo sapiens
tcatcgagctcggtccggtgttatcgatgctcctctttctccttttgctacttctattgctgaactagtcacccctcattttttcttcctcatatttcaggtgtttctgagtcccttcaacatgatcctgggaggaatcgtggtggtgctggtgttcacagggtttgtgtgggcagcccacaataaagacgtccttcgccggatgaagaagcgctaccccacgacgttcgttatggtggtcatgttggcgagctatttccttatctccatgtttggaggagtcatggtctttgtgtttggcattacttttcctttgctgtgtaagtgaacttgagttttttcttccatcatcaaaaaaatgtagaagcaattatccaacgggaattccataacccatttcttatatgtgttggcatgtcagcaaaagtgtcagaattttctaaaacagctttctacttgttatccaactagacccagataacacagaactgaggtcaagaactatgaggtcaaggccttatagttcattaattcca

SEQ ID NO: 434214 - DNA, 2329 bp, Homo sapiens
gaaaagccgaccgagacggagccgctgtcaactctccaactcagctcagctgatcggttgccgccgccgccgccgccagattctggaggcgaagaacgcaaagctgagaacatggacgttaatatcgccccactccgcgcctgggacgatttcttcccgggttccgatcgctttgcccggccggacttcagggacatttccaaatggaacaaccgcgtagtgagcaacctgctctattaccagaccaactacctggtggtggctgccatgatgatttccattgtggggtttctgagtcccttcaacatgatcctgggaggaatcgtggtggtgctggtgttcacagggtttgtgtgggcagcccacaataaagacgtccttcgccggatgaagaagcgctaccccacgacgttcgttatggtggtcatgttggcgagctatttccttatctccatgtttggaggagtcatggtctttgtgtttggcattacttttcctttgctgttgatgtttatccatgcatcgttgagacttcggaacctcaagaacaaactggagaataaaatggaaggaataggtttgaagaggacaccgatgggcattgtcctggatgccctagaacagcaggaagaaggcatcaacagactcactgactatatcagcaaagtgaaggaataaacataacttacctgagctagggttgcagcagaaattgagttgcagcttgcccttgtccagacctatgttctgcttgcgtttttgaaacaggaggtgcacgtaccacccaattatctatggcagcatgcatgtataggccgaactattatcagctctgatgtttcagagagaagacctcagaaaccgaaagaaaaccaccaccctcctattgtgtctgaagtttcacgtgtgtttatgaaatctaatgggaaatggatcacacgatttctttaagggaattaaaaaaaataaaagaattacggcttttacagcaacaatacgattatcttataggaaaaaaaaaatcattgtaaagtatcaagacaatacgagtaaatgaaaaggctgttaaagtagatgacatcatgtgttagcctgttcctaatcccctagaattgtaatgtgtgggatataaattagtttttattattctcttaaaaatcaaagatgatctctatcactttgccacctgtttgatgtgcagtggaaactggttaagccagttgttcatacttcgtttacaaatataaagatagctgtttaggatattttgttacatttttgtaaatttttgaaatgctagtaatgtgttttcaccagcaagtatttgttgcaaacttaatgtcattttccttaagatggttacagctatgtaacctgtattattctggacggacttattaaaatacaaacagacaaaaaataaaacaaaacttgagttctatttaccttgcacattttttgttgttacagtgaaaaaaatggtccaagaaaatgtttgccatttttgcattgtttcgtttttaactggaacatttagaaagaaggaaatgaatgtgcattttattaattccttaggggcacaaggaggacaataatagctgatcttttgaaatttgaaaaacgtctttagatgaccaagcaaaaagactttaaaaaatggtaatgaaaatggaatgcagctactgcagctaataaaaaattttagatagcaattgttacaaccatatgcctttatagctagacattagaattatgatagcatgagtttatacattctattatttttcctccctttctcatgtttttataaataggtaataaaaaatgttttgcctgccaattgaatgatttcgtagctgaagtagaaacatttaggtttctgtagcattaaattgtgaagacaactggagtggtacttactgaagaaactctctgtatgtcctagaataagaagcaatgatgtgctgcttctgatttttcttgcattttaaattctcagccaacctacagccatgatctttagcacagtgatatcaccatgacttcacagacatggtctagaatctgtacccttacccacatatgaagaataaaattgattaaaggtttattggtgagactttatttaatgcacatctgtcttaaatacctgagaaacttggcgacgaccctataaacagtgaagcaaacacttcagctgtttcaaatactgtttagtaaagcttgaatactttattaacttgcagccagaataaaacaattccagtgggatcctatttttaaacctggcacgagttttatatacatgttagcccagttttatatacat

SEQ ID NO: 434215 - DNA, 2207 bp, Homo sapiens
gaaaagccgaccgagacggagccgctgtcaactctccaactcagctcagctgatcggttgccgccgccgccgccgccagattctggaggcgaagaacgcaaagctgagaacatggacgttaatatcgccccactccgcgcctgggacgatttcttcccgggttccgatcgctttgcccggccggacttcagggacatttccaaatggaacaaccgcgtagtgagcaacctgctctattaccagaccaactacctggtggtggctgccatgatgatttccattgtggggtttctgagtcccttcaacatgatcctgggaggaatcgtggtggtgctggtgttcacagggtttgtgtgggcagcccacaataaagacgtccttcgccggatgaagaagcgctaccccacgacgttcgttatggtggtcatgttggcgagctatttccttatctccatgtttggaggagtcatggtctttgtgtttggcattacttttcctttgctgttgatgtttatccatgcatcgttgagacttcggaacctcaagaacaaactggagaataaaatggaaggaataggtttgaagaggacaccgatgggcattgtcctggatgccctagaacagcaggaagaaggcatcaacagactcactgactatatcagcaaagtgaaggaataaacataacttacctgagctagggttgcagcagaaattgagttgcagcttgcccttgtccagacctatgttctgcttgcgtttttgaaacaggaggtgcacgtaccacccaattatctatggcagcatgcatgtataggccgaactattatcagctctgatgtttcagagagaagacctcagaaaccgaaagaaaaccaccaccctcctattgtgtctgaagtttcacgtgtgtttatgaaatctaatgggaaatggatcacacgatttctttaagggaattaaaaaaaataaaagaattacggcttttacagcaacaatacgattatcttataggaaaaaaaaaatcattgtaaagtatcaagacaatacgagtaaatgaaaaggctgttaaagtagatgacatcatgtgttagcctgttcctaatcccctagaattgtaatgtgtgggatataaattagtttttattattctcttaaaaatcaaagatgatctctatcactttgccacctgtttgatgtgcagtggaaactggttaagccagttgttcatacttcgtttacaaatataaagatagctgtttaggatattttgttacatttttgtaaatttttgaaatgctagtaatgtgttttcaccagcaagtatttgttgcaaacttaatgtcattttccttaagatggttacagctatgtaacctgtattattctggacggacttattaaaatacaaacagacaaaaaataaaacaaaacttgagttctatttaccttgcacattttttgttgttacagtgaaaaaaatggtccaagaaaatgtttgccatttttgcattgtttcgtttttaactggaacatttagaaagaaggaaatgaatgtgcattttattaattccttaggggcacaaggaggacaataatagctgatcttttgaaatttgaaaaacgtctttagatgaccaagcaaaaagactttaaaaaatggtaatgaaaatggaatgcagctactgcagctaataaaaaattttagatagcaattgttacaaccatatgcctttatagctagacattagaattatgatagcatgagtttatacattctattatttttcctccctttctcatgtttttataaataggtaataaaaaatgttttgcctgccaattgaatgatttcgtagctgaagtagaaacatttaggtttctgtagcattaaattgtgaagacaactggagtggtacttactgaagaaactctctgtatgtcctagaataagaagcaatgatgtgctgcttctgatttttcttgcattttaaattctcagccaacctacagccatgatctttagcacagtgatatcaccatgacttcacagacatggtctagaatctgtacccttacccacatatgaagaataaaattgattaaaggttaaaaaaaaaacccaaacaacaaaaaaaactctcataatacaacaggggatacagtcatatgcctctaaaagggtcatctccattggatgattcttaaaa

SEQ ID NO: 434216 - DNA, 2174 bp, Homo sapiens
  misc_feature (2147)..(2147): n is a, c, g, or t
  misc_feature (2171)..(2171): n is a, c, g, or t
gaaaagccgaccgagacggagccgctgtcaactctccaactcagctcagctgatcggttgccgccgccgccgccgccagattctggaggcgaagaacgcaaagctgagaacatggacgttaatatcgccccactccgcgcctgggacgatttcttcccgggttccgatcgctttgcccggccggacttcagggacatttccaaatggaacaaccgcgtagtgagcaacctgctctattaccagaccaactacctggtggtggctgccatgatgatttccattgtggggtttctgagtcccttcaacatgatcctgggaggaatcgtggtggtgctggtgttcacagggtttgtgtgggcagcccacaataaagacgtccttcgccggatgaagaagcgctaccccacgacgttcgttatggtggtcatgttggcgagctatttccttatctccatgtttggaggagtcatggtctttgtgtttggcattacttttcctttgctgttgatgtttatccatgcatcgttgagacttcggaacctcaagaacaaactggagaataaaatggaaggaataggtttgaagaggacaccgatgggcattgtcctggatgccctagaacagcaggaagaaggcatcaacagactcactgactatatcagcaaagtgaaggaataaacataacttacctgagctagggttgcagcagaaattgagttgcagcttgcccttgtccagacctatgttctgcttgcgtttttgaaacaggaggtgcacgtaccacccaattatctatggcagcatgcatgtataggccgaactattatcagctctgatgtttcagagagaagacctcagaaaccgaaagaaaaccaccaccctcctattgtgtctgaagtttcacgtgtgtttatgaaatctaatgggaaatggatcacacgatttctttaagggaattaaaaaaaataaaagaattacggcttttacagcaacaatacgattatcttataggaaaaaaaaaatcattgtaaagtatcaagacaatacgagtaaatgaaaaggctgttaaagtagatgacatcatgtgttagcctgttcctaatcccctagaattgtaatgtgtgggatataaattagtttttattattctcttaaaaatcaaagatgatctctatcactttgccacctgtttgatgtgcagtggaaactggttaagccagttgttcatacttcgtttacaaatataaagatagctgtttaggatattttgttacatttttgtaaatttttgaaatgctagtaatgtgttttcaccagcaagtatttgttgcaaacttaatgtcattttccttaagatggttacagctatgtaacctgtattattctggacggacttattaaaatacaaacagacaaaaaataaaacaaaacttgagttctatttaccttgcacattttttgttgttacagtgaaaaaaatggtccaagaaaatgtttgccatttttgcattgtttcgtttttaactggaacatttagaaagaaggaaatgaatgtgcattttattaattccttaggggcacaaggaggacaataatagctgatcttttgaaatttgaaaaacgtctttagatgaccaagcaaaaagactttaaaaaatggtaatgaaaatggaatgcagctactgcagctaataaaaaattttagatagcaattgttacaaccatatgcctttatagctagacattagaattatgatagcatgagtttatacattctattatttttcctccctttctcatgtttttataaataggtaataaaaaatgttttgcctgccaattgaatgatttcgtagctgaagtagaaacatttaggtttctgtagcattaaattgtgaagacaactggagtggtacttactgaagaaactctctgtatgtcctagaataagaagcaatgatgtgctgcttctgatttttcttgcattttaaattctcagccaacctacagccatgatctttagcacagtgatatcaccatgacttcacagacatggtctagaatcttccctacacccttctctgcctttattttttgatttgtggcaacttgtaactaggggtgtttatggggaataaagggaggantgggaaaaaaggataaaaaaaaanaaa

SEQ ID NO: 434217 - DNA, 2054 bp, Homo sapiens
gaaaagccgaccgagacggagccgctgtcaactctccaactcagctcagctgatcggttgccgccgccgccgccgccagattctggaggcgaagaacgcaaagctgagaacatggacgttaatatcgccccactccgcgcctgggacgatttcttcccgggttccgatcgctttgcccggccggacttcagggacatttccaaatggaacaaccgcgtagtgagcaacctgctctattaccagaccaactacctggtggtggctgccatgatgatttccattgtggggtttctgagtcccttcaacatgatcctgggaggaatcgtggtggtgctggtgttcacagggtttgtgtgggcagcccacaataaagacgtccttcgccggatgaagaagcgctaccccacgacgttcgttatggtggtcatgttggcgagctatttccttatctccatgtttggaggagtcatggtctttgtgtttggcattacttttcctttgctgttgatgtttatccatgcatcgttgagacttcggaacctcaagaacaaactggagaataaaatggaaggaataggtttgaagaggacaccgatgggcattgtcctggatgccctagaacagcaggaagaaggcatcaacagactcactgactatatcagcaaagtgaaggaataaacataacttacctgagctagggttgcagcagaaattgagttgcagcttgcccttgtccagacctatgttctgcttgcgtttttgaaacaggaggtgcacgtaccacccaattatctatggcagcatgcatgtataggccgaactattatcagctctgatgtttcagagagaagacctcagaaaccgaaagaaaaccaccaccctcctattgtgtctgaagtttcacgtgtgtttatgaaatctaatgggaaatggatcacacgatttctttaagggaattaaaaaaaataaaagaattacggcttttacagcaacaatacgattatcttataggaaaaaaaaaatcattgtaaagtatcaagacaatacgagtaaatgaaaaggctgttaaagtagatgacatcatgtgttagcctgttcctaatcccctagaattgtaatgtgtgggatataaattagtttttattattctcttaaaaatcaaagatgatctctatcactttgccacctgtttgatgtgcagtggaaactggttaagccagttgttcatacttcgtttacaaatataaagatagctgtttaggatattttgttacatttttgtaaatttttgaaatgctagtaatgtgttttcaccagcaagtatttgttgcaaacttaatgtcattttccttaagatggttacagctatgtaacctgtattattctggacggacttattaaaatacaaacagacaaaaaataaaacaaaacttgagttctatttaccttgcacattttttgttgttacagtgaaaaaaatggtccaagaaaatgtttgccatttttgcattgtttcgtttttaactggaacatttagaaagaaggaaatgaatgtgcattttattaattccttaggggcacaaggaggacaataatagctgatcttttgaaatttgaaaaacgtctttagatgaccaagcaaaaagactttaaaaaatggtaatgaaaatggaatgcagctactgcagctaataaaaaattttagatagcaattgttacaaccatatgcctttatagctagacattagaattatgatagcatgagtttatacattctattatttttcctccctttctcatgtttttataaataggtaataagtttctgtagcattaaattgtgaagacaactggagtggtacttactgaagaaactctctgtatgtcctagaataagaagcaatgatgtgctgcttctgatttttcttgcattttaaattctcagccaacctacagccatgatctttagcacagtgatatcaccatgacttcacagacatggtctagaatctgtacccttacccacatatgaagaataaaattgattaaaggtt

SEQ ID NO: 434218 - DNA, 2183 bp, Homo sapiens
catgctggagtgcagtggcacaatctcggctcactgcaacctccacctcccatgttcaagtgattcttctgcctcagcctcctgagtagctgggattgcaggtgtgtgccaccacacctggctaatttttctatattttatagagacgggggagattctggaggcgaagaacgcaaagctgagaacatggacgttaatatcgccccactccgcgcctgggacgatttcttcccgggttccgatcgctttgcccggccggacttcagggacatttccaaatggaacaaccgcgtagtgagcaacctgctctattaccagaccaactacctggtggtggctgccatgatgatttccattgtggggtttctgagtcccttcaacatgatcctgggaggaatcgtggtggtgctggtgttcacagggtttgtgtgggcagcccacaataaagacgtccttcgccggatgaagaagcgctaccccacgacgttcgttatggtggtcatgttggcgagctatttccttatctccatgtttggaggagtcatggtctttgtgtttggcattacttttcctttgctgttgatgtttatccatgcatcgttgagacttcggaacctcaagaacaaactggagaataaaatggaaggaataggtttgaagaggacaccgatgggcattgtcctggatgccctagaacagcaggaagaaggcatcaacagactcactgactatatcagcaaagtgaaggaataaacataacttacctgagctagggttgcagcagaaattgagttgcagcttgcccttgtccagacctatgttctgcttgcgtttttgaaacaggaggtgcacgtaccacccaattatctatggcagcatgcatgtataggccgaactattatcagctctgatgtttcagagagaagacctcagaaaccgaaagaaaaccaccaccctcctattgtgtctgaagtttcacgtgtgtttatgaaatctaatgggaaatggatcacacgatttctttaagggaattaaaaaaaataaaagaattacggcttttacagcaacaatacgattatcttataggaaaaaaaaaatcattgtaaagtatcaagacaatacgagtaaatgaaaaggctgttaaagtagatgacatcatgtgttagcctgttcctaatcccctagaattgtaatgtgtgggatataaattagtttttattattctcttaaaaatcaaagatgatctctatcactttgccacctgtttgatgtgcagtggaaactggttaagccagttgttcatacttcgtttacaaatataaagatagctgtttaggatattttgttacatttttgtaaatttttgaaatgctagtaatgtgttttcaccagcaagtatttgttgcaaacttaatgtcattttccttaagatggttacagctatgtaacctgtattattctggacggacttattaaaatacaaacagacaaaaaataaaacaaaacttgagttctatttaccttgcacattttttgttgttacagtgaaaaaaatggtccaagaaaatgtttgccatttttgcattgtttcgtttttaactggaacatttagaaagaaggaaatgaatgtgcattttattaattccttaggggcacaaggaggacaataatagctgatcttttgaaatttgaaaaacgtctttagatgaccaagcaaaaagactttaaaaaatggtaatgaaaatggaatgcagctactgcagctaataaaaaattttagatagcaattgttacaaccatatgcctttatagctagacattagaattatgatagcatgagtttatacattctattatttttcctccctttctcatgtttttataaataggtaataaaaaatgttttgcctgccaattgaatgatttcgtagctgaagtagaaacatttaggtttctgtagcattaaattgtgaagacaactggagtggtacttactgaagaaactctctgtatgtcctagaataagaagcaatgatgtgctgcttctgatttttcttgcattttaaattctcagccaacctacagccatgatctttagcacagtgatatcaccatgacttcacagacatggtctagaatctgtacccttacccacatatgaagaataaaattgattaaaggtt

SEQ ID NO: 434219 - DNA, 2048 bp, Homo sapiens
gaaaagccgaccgagacggagccgctgtcaactctccaactcagctcagctgatcggttgccgccgccgccgccgccagattctggaggcgaagaacgcaaagctgagaacatggacgttaatatcgccccactccgcgcctgggacgatttcttcccgggttccgatcgctttgcccggccggacttcagggacatttccaaatggaacaaccgcgtagtgagcaacctgctctattaccagaccaactacctggtggtggctgccatgatgatttccattgtggggtttctgagtcccttcaacatgatcctgggaggaatcgtggtggtgctggtgttcacagggtttgtgtgggcagcccacaataaagacgtccttcgccggatgaagaagcgctaccccacgacgttcgttatggtggtcatgttggcgagctatttccttatctccatgtttggaggagtcatggtctttgtgtttggcattacttttcctttgctgttgatgtttatccatgcatcgttgagacttcggaacctcaagaacaaactggagaataaaatggaaggaataggtttgaagaggacaccgatgggcattgtcctggatgccctagaacagcaggaagaaggcatcaacagactcactgactatatcagcaaagtgaaggaataaacataacttacctgagctagggttgcagcagaaattgagttgcagcttgcccttgtccagacctatgttctgcttgcgtttttgaaacaggaggtgcacgtaccacccaattatctatggcagcatgcatgtataggccgaactattatcagctctgatgtttcagagagaagacctcagaaaccgaaagaaaaccaccaccctcctattgtgtctgaagtttcacgtgtgtttatgaaatctaatgggaaatggatcacacgatttctttaagggaattaaaaaaaataaaagaattacggcttttacagcaacaatacgattatcttataggaaaaaaaaaatcattgtaaagtatcaagacaatacgagtaaatgaaaaggctgttaaagtagatgacatcatgtgttagcctgttcctaatcccctagaattgtaatgtgtgggatataaattagtttttattatttggttaagccagttgttcatacttcgtttacaaatataaagatagctgtttaggatattttgttacatttttgtaaatttttgaaatgctagtaatgtgttttcaccagcaagtatttgttgcaaacttaatgtcattttccttaagatggttacagctatgtaacctgtattattctggacggacttattaaaatacaaacagacaaaaaataaaacaaaacttgagttctatttaccttgcacattttttgttgttacagtgaaaaaaatggtccaagaaaatgtttgccatttttgcattgtttcgtttttaactggaacatttagaaagaaggaaatgaatgtgcattttattaattccttaggggcacaaggaggacaataatagctgatcttttgaaatttgaaaaacgtctttagatgaccaagcaaaaagactttaaaaaatggtaatgaaaatggaatgcagctactgcagctaataaaaaattttagatagcaattgttacaaccatatgcctttatagctagacattagaattatgatagcatgagtttatacattctattatttttcctccctttctcatgtttttataaataggtaataaaaaatgttttgcctgccaattgaatgatttcgtagctgaagtagaaacatttaggtttctgtagcattaaattgtgaagacaactggagtggtacttactgaagaaactctctgtatgtcctagaataagaagcaatgatgtgctgcttctgatttttcttgcattttaaattctcagccaacctacagccatgatctttagcacagtgatatcaccatgacttcacagacatggtctagaatctgtacccttacccacatatgaagaataaaattgattaaaggtt

SEQ ID NO: 434220 - DNA, 1433 bp, Homo sapiens
  misc_feature (1415)..(1415): n is a, c, g, or t
gaaaagccgaccgagacggagccgctgtcaactctccaactcagctcagctgatcggttgccgccgccgccgccgccagattctggaggcgaagaacgcaaagctgagaacatggacgttaatatcgccccactccgcgcctgggacgatttcttcccgggttccgatcgctttgcccggccggacttcagggacatttccaaatggaacaaccgcgtagtgagcaacctgctctattaccagaccaactacctggtggtggctgccatgatgatttccattgtggggtttctgagtcccttcaacatgatcctgggaggaatcgtggtggtgctggtgttcacagggtttgtgtgggcagcccacaataaagacgtccttcgccggatgaagaagcgctaccccacgacgttcgttatggtggtcatgttggcgagctatttccttatctccatgtttggaggagtcatggtctttgtgtttggcattacttttcctttgctgttgatgtttatccatgcatcgttgagacttcggaacctcaagaacaaactggagaataaaatggaaggaataggtttgaagaggacaccgatgggcattgtcctggatgccctagaacagcaggaagaaggcatcaacagactcactgactatatcagcaaagtgaaggaataaacataacttacctgagctagggttgcagcagaaattgagttgcagcttgcccttgtccagacctatgttctgcttgcgtttttgaaacaggaggtgcacgtaccacccaattatctatggcagcatgcatgtataggccgaactattatcagctctgatgtttcagagagaagacctcagaaaccgaaagaaaaccaccaccctcctattgtgtctgaagtttcacgtgtgtttatgaaatctaatgggaaatggatcacacgatttctttaagggaattaaaaaaaataaaagaattacggcttttacagcaacaatacgattatcttataggaaaaaaaaaatcattgtaaagtatcaagacaatacgagtaaatgaaaaggctgttaaagtagatgacatcatgtgttagcctgttcctaatcccctagaattgtaatgtgtgggatataaattagtttttattattctcttaaaaatcaaagatgatctctatcactttgccacctgtttgatgtgcagtggaaactggttaagccagttgttcatacttcgtttacaaatataaagatagctgtttaggatattttgttacatttttgtaaatttttgaaatgctagtaatgtgttttcaccagcaagtatttgttgcaaacttaatgtcattttccttaagatggttacagctatgtaacctgtattattctggacggacttattaaaataccatttcaanctcggggatcctctgaat

SEQ ID NO: 434221 - DNA, 1547 bp, Homo sapiens
gaaaagccgaccgagacggagccgctgtcaactctccaactcagctcagctgatcggttgccgccgccgccgccgccagattctggaggcgaagaacgcaaagctgagaacatggacgttaatatcgccccactccgcgcctgggacgatttcttcccgggttccgatcgctttgcccggccggacttcagggacatttccaaatggaacaaccgcgtagtgagcaacctgctctattaccagaccaactacctggtggtggctgccatgatgatttccattgtggggtttctgagtcccttcaacatgatcctgggaggaatcgtggtggtgctggtgttcacagggtttgtgtgggcagcccacaataaagacgtccttcgccggatgaagaagcgctaccccacgacgttcgttatggtggtcatgttggcgagctatttccttatctccatgtttggaggagtcatggtctttgtgtttggcattacttttcctttgctgttgatgtttatccatgcatcgttgagacttcggaacctcaagaacaaactggagaataaaatggaaggaataggtttgaagaggacaccgatgggcattgtcctggatgccctagaacagcaggaagaaggcatcaacagactcactgactatatcagcaaagtgaaggaataaacataacttacctgagctagggttgcagcagaaattgagttgcagcttgcccttgtccagacctatgttctgcttgcgtttttgaaacaggaggtgcacgtaccacccaattatctatggcagcatgcatgtataggccgaactattatcagctctgatgtttcagagagaagacctcagaaaccgaaagaaaaccaccaccctcctattgtgtctgaagtttcacgtgtgtttatgaaatctaatgggaaatggatcacacgatttctttaagggaattaaaaaaaataaaagaattacggcttttacagcaacaatacgattatcttataggaaaaaaaaaatcattgtaaagtatcaagacaatacgagtaaatgaaaaggctgttaaagtagatgacatcatgtgttagcctgttcctaatcccctagaattgtaatgtgtgggatataaattagtttttattattctcttaaaaatcaaagatgatctctatcactttgccacctgtttgatgtgcagtggaaactggttaagccagttgttcatacttcgtttacaaatataaagatagctgtttaggatattttgttacatttttgtaaatttttgaaatgctagtaatgtgttttcaccagcaagtatttgttgcaaacttaatgtcattttccttaagatggttacagctatgtaacctgtattattctggacggacttattaaaatactaaacgacaaaataaacaaatggtctattacctgcatttgtgtccgggaacaatgtcagaaagttgcatttgctggtcgttcagaattaaaggaggaggtataactcgggcagggaaaacgttgatgagtttgcggaaaaa

SEQ ID NO: 434222 - DNA, 1387 bp, Homo sapiens
  misc_feature (1299)..(1299): n is a, c, g, or t
gaaaagccgaccgagacggagccgctgtcaactctccaactcagctcagctgatcggttgccgccgccgccgccgccagattctggaggcgaagaacgcaaagctgagaacatggacgttaatatcgccccactccgcgcctgggacgatttcttcccgggttccgatcgctttgcccggccggacttcagggacatttccaaatggaacaaccgcgtagtgagcaacctgctctattaccagaccaactacctggtggtggctgccatgatgatttccattgtggggtttctgagtcccttcaacatgatcctgggaggaatcgtggtggtgctggtgttcacagggtttgtgtgggcagcccacaataaagacgtccttcgccggatgaagaagcgctaccccacgacgttcgttatggtggtcatgttggcgagctatttccttatctccatgtttggaggagtcatggtctttgtgtttggcattacttttcctttgctgttgatgtttatccatgcatcgttgagacttcggaacctcaagaacaaactggagaataaaatggaaggaataggtttgaagaggacaccgatgggcattgtcctggatgccctagaacagcaggaagaaggcatcaacagactcactgactatatcagcaaagtgaaggaataaacataacttacctgagctagggttgcagcagaaattgagttgcagcttgcccttgtccagacctatgttctgcttgcgtttttgaaacaggaggtgcacgtaccacccaattatctatggcagcatgcatgtataggccgaactattatcagctctgatgtttcagagagaagacctcagaaaccgaaagaaaaccaccaccctcctattgtgtctgaagtttcacgtgtgtttatgaaatctaatgggaaatggatcacacgatttctttaagggaattaaaaaaaataaaagaattacggcttttacagcaacaatacgattatcttataggaaaaaaaaaatcattgtaaagtatcaagacaatacgagtaaatgaaaaggctgttaaagtagatgacatcatgtgttagcctgttcctaatcccctagaattgtaatgtgtgggatataaattagtttttattattctcttaaaaatcaaagatgatctctatcactttgccacctgtttgatgtgcagtggaaactggttaagccagttgttcatagagtcatggtacgaaatattaaagatagaatcgatcttatgcgatagttgtgtaacagattagcgtatanatatctgaaagtggtagtatatgagctttgtcagccagcaagtatattgtccagacgcaatgaatacctcctggagatgttacaggca

SEQ ID NO: 434223 - DNA, 2040 bp, Homo sapiens
aattcgcggccgcgtcgacgcgagaagacgacagaaggggaacatggacgttaatatcgccccactccgcgcctgggacgatttcttcccgggttccgatcgctttgcccggccggacttcagggacatttccaaatggaacaaccgcgtagtgagcaacctgctctattaccagaccaactacctggtggtggctgccatgatgatttccattgtggggtttctgagtcccttcaacatgatcctgggaggaatcgtggtggtgctggtgttcacagggtttgtgtgggcagcccacaataaagacgtccttcgccggatgaagaagcgctaccccacgacgttcgttatggtggtcatgttggcgagctatttccttatctccatgtttggaggagtcatggtctttgtgtttggcattacttttcctttgctgttgatgtttatccatgcatcgttgagacttcggaacctcaagaacaaactggagaataaaatggaaggaataggtttgaagaggacaccgatgggcattgtcctggatgccctagaacagcaggaagaaggcatcaacagactcactgactatatcagcaaagtgaaggaataaacataacttacctgagctagggttgcagcagaaattgagttgcagcttgcccttgtccagacctatgttctgcttgcgtttttgaaacaggaggtgcacgtaccacccaattatctatggcagcatgcatgtataggccgaactattatcagctctgatgtttcagagagaagacctcagaaaccgaaagaaaaccaccaccctcctattgtgtctgaagtttcacgtgtgtttatgaaatctaatgggaaatggatcacacgatttctttaagggaattaaaaaaaataaaagaattacggcttttacagcaacaatacgattatcttataggaaaaaaaaaatcattgtaaagtatcaagacaatacgagtaaatgaaaaggctgttaaagtagatgacatcatgtgttagcctgttcctaatcccctagaattgtaatgtgtgggatataaattagtttttattattctcttaaaaatcaaagatgatctctatcactttgccacctgtttgatgtgcagtggaaactggttaagccagttgttcatacttcgtttacaaatataaagatagctgtttaggatattttgttacatttttgtaaatttttgaaatgctagtaatgtgttttcaccagcaagtatttgttgcaaacttaatgtcattttccttaagatggttacagctatgtaacctgtattattctggacggacttattaaaatacaaacagacaaaaaataaaacaaaacttgagttctatttaccttgcacattttttgttgttacagtgaaaaaaatggtccaagaaaatgtttgccatttttgcattgtttcgtttttaactggaacatttagaaagaaggaaatgaatgtgcattttattaattccttaggggcacaaggaggacaataatagctgatcttttgaaatttgaaaaacgtctttagatgaccaagcaaaaagactttaaaaaatggtaatgaaaatggaatgcagctactgcagctaataaaaaattttagatagcaattgttacaaccatatgcctttatagctagacattagaattatgatagcatgagtttatacattctattatttttcctccctttctcatgtttttataaataggtaataaaaaatgttttgcctgccaattgaatgatttcgtagctgaagtagaaacatttaggtttctgtagcattaaattgtgaagacaactggagtggtacttactgaagaaactctctgtatgtcctagaataagaagcaatgatgtgctgcttctgatttttcttgcattttaaattctcagccaacctacagccatgatctttagcacagtgatatcaccatgacttcacagacatggtctagaatctgtacccttacccacatatgaagaataaaattgattaaaggtt

SEQ ID NO: 434224 - DNA, 1061 bp, Homo sapiens
gaaaagccgaccgagacggagccgctgtcaactctccaactcagctcagctgatcggttgccgccgccgccgccgccagattctggaggcgaagaacgcaaagctgagaacatggacgttaatatcgccccactccgcgcctgggacgatttcttcccgggttccgatcgctttgcccggccggacttcagggacatttccaaatggaacaaccgcgtagtgagcaacctgctctattaccagaccaactacctggtggtggctgccatgatgatttccattgtggggtttctgagtcccttcaacatgatcctgggaggaatcgtggtggtgctggtgttcacagggtttgtgtgggcagcccacaataaagacgtccttcgccggatgaagaagcgctaccccacgacgttcgttatggtggtcatgttggcgagctatttccttatctccatgtttggaggagtcatggtctttgtgtttggcattacttttcctttgctgttgatgtttatccatgcatcgttgagacttcggaacctcaagaacaaactggagaataaaatggaaggaataggtttgaagaggacaccgatgggcattgtcctggatgccctagaacagcaggaagaaggcatcaacagactcactgactatatcagcaaagtgaaggaataaacataacttacctgagctagggttgcagcagaaattgagttgcagcttgcccttgtccagacctatgttctgcttgcgtttttgaaacaggaggtgcacgtaccacccaattatctatggcagcatgcatgtataggccgaactattatcagctctgatgtttcagagagaagacctcagaaaccgaaagaaaaccaccaccctcctattgtgtctgaagtttcacgtgtgtttatgaaatctaatgggaatgggcccgaattttagcggtcacaaaccaaaggggggctaaattaccgaggcacgtacgccacctttggaagggcccaagggggttaaaagacgggggaacacaggaaagtggtgggaaccctcggtggaac

SEQ ID NO: 434225 - DNA, 2166 bp, Homo sapiens
  misc_feature (1)..(1): n is a, c, g, or t
  misc_feature (274)..(274): n is a, c, g, or t
nacgggtgtgcgtacgcacggcatgtcgcattaggtgctggcgacgggcgaccagaatcagcgataacgttggaagcaatgagtgcgaatagtctagattattcgtaccgcagcattcccgtgtgctctagtggaactgagttgtcttgcgcctgcttctacccgaattgacatataagcgccgcggcgggacatatccagaggcgcttctgcacacaatgtccacggatgcgacgtactggaaggctacattagttgcgtaatctactcaagnacacgagaagttacccataggctgagtcgtgcgtagtcactactagaatgtattgtcccactgttgtcggggtttctgagtcccttcaacatgatcctgggaggaatcgtggtggtgctggtgttcacagggtttgtgtgggcagcccacaataaagacgtccttcgccggatgaagaagcgctaccccacgacgttcgttatggtggtcatgttggcgagctatttccttatctccatgtttggaggagtcatggtctttgtgtttggcattacttttcctttgctgttgatgtttatccatgcatcgttgagacttcggaacctcaagaacaaactggagaataaaatggaaggaataggtttgaagaggacaccgatgggcattgtcctggatgccctagaacagcaggaagaaggcatcaacagactcactgactatatcagcaaagtgaaggaataaacataacttacctgagctagggttgcagcagaaattgagttgcagcttgcccttgtccagacctatgttctgcttgcgtttttgaaacaggaggtgcacgtaccacccaattatctatggcagcatgcatgtataggccgaactattatcagctctgatgtttcagagagaagacctcagaaaccgaaagaaaaccaccaccctcctattgtgtctgaagtttcacgtgtgtttatgaaatctaatgggaaatggatcacacgatttctttaagggaattaaaaaaaataaaagaattacggcttttacagcaacaatacgattatcttataggaaaaaaaaaatcattgtaaagtatcaagacaatacgagtaaatgaaaaggctgttaaagtagatgacatcatgtgttagcctgttcctaatcccctagaattgtaatgtgtgggatataaattagtttttattattctcttaaaaatcaaagatgatctctatcactttgccacctgtttgatgtgcagtggaaactggttaagccagttgttcatacttcgtttacaaatataaagatagctgtttaggatattttgttacatttttgtaaatttttgaaatgctagtaatgtgttttcaccagcaagtatttgttgcaaacttaatgtcattttccttaagatggttacagctatgtaacctgtattattctggacggacttattaaaatacaaacagacaaaaaataaaacaaaacttgagttctatttaccttgcacattttttgttgttacagtgaaaaaaatggtccaagaaaatgtttgccatttttgcattgtttcgtttttaactggaacatttagaaagaaggaaatgaatgtgcattttattaattccttaggggcacaaggaggacaataatagctgatcttttgaaatttgaaaaacgtctttagatgaccaagcaaaaagactttaaaaaatggtaatgaaaatggaatgcagctactgcagctaataaaaaattttagatagcaattgttacaaccatatgcctttatagctagacattagaattatgatagcatgagtttatacattctattatttttcctccctttctcatgtttttataaataggtaataaaaaatgttttgcctgccaattgaatgatttcgtagctgaagtagaaacatttaggtttctgtagcattaaattgtgaagacaactggagtggtacttactgaagaaactctctgtatgtcctagaataagaagcaatgatgtgctgcttctgatttttcttgcattttaaattctcagccaacctacagccatgatctttagcacagtgatatcaccatgacttcacagacatggtctagaatctgtacccttacccacatatgaagaataaaattgattaaaggtt

SEQ ID NO: 434226 - DNA, 2087 bp, Homo sapiens
aaggcgataaacgatacgttgggaacagtggacgtaaatatctgccctcactccttgcgtccatgggcatggatctctatcgcacgagtgcttcggcggatctgcaattagccgcgggcgatactccagcggatattatccaggacatggaagcaacacgcggataggttgagcgaaacatgattcctatataacgccagtacctagacgtgaccatggatggtggtctgatcatgcatggattcccatgtagggctatcatgagagtttctgagtcccttcaacatgatcctgggaggaatcgtggtggtgctggtgttcacagggtttgtgtgggcagcccacaataaagacgtccttcgccggatgaagaagcgctaccccacgacgttcgttatggtggtcatgttggcgagctatttccttatctccatgtttggaggagtcatggtctttgtgtttggcattacttttcctttgctgttgatgtttatccatgcatcgttgagacttcggaacctcaagaacaaactggagaataaaatggaaggaataggtttgaagaggacaccgatgggcattgtcctggatgccctagaacagcaggaagaaggcatcaacagactcactgactatatcagcaaagtgaaggaataaacataacttacctgagctagggttgcagcagaaattgagttgcagcttgcccttgtccagacctatgttctgcttgcgtttttgaaacaggaggtgcacgtaccacccaattatctatggcagcatgcatgtataggccgaactattatcagctctgatgtttcagagagaagacctcagaaaccgaaagaaaaccaccaccctcctattgtgtctgaagtttcacgtgtgtttatgaaatctaatgggaaatggatcacacgatttctttaagggaattaaaaaaaataaaagaattacggcttttacagcaacaatacgattatcttataggaaaaaaaaaatcattgtaaagtatcaagacaatacgagtaaatgaaaaggctgttaaagtagatgacatcatgtgttagcctgttcctaatcccctagaattgtaatgtgtgggatataaattagtttttattattctcttaaaaatcaaagatgatctctatcactttgccacctgtttgatgtgcagtggaaactggttaagccagttgttcatacttcgtttacaaatataaagatagctgtttaggatattttgttacatttttgtaaatttttgaaatgctagtaatgtgttttcaccagcaagtatttgttgcaaacttaatgtcattttccttaagatggttacagctatgtaacctgtattattctggacggacttattaaaatacaaacagacaaaaaataaaacaaaacttgagttctatttaccttgcacattttttgttgttacagtgaaaaaaatggtccaagaaaatgtttgccatttttgcattgtttcgtttttaactggaacatttagaaagaaggaaatgaatgtgcattttattaattccttaggggcacaaggaggacaataatagctgatcttttgaaatttgaaaaacgtctttagatgaccaagcaaaaagactttaaaaaatggtaatgaaaatggaatgcagctactgcagctaataaaaaattttagatagcaattgttacaaccatatgcctttatagctagacattagaattatgatagcatgagtttatacattctattatttttcctccctttctcatgtttttataaataggtaataaaaaatgttttgcctgccaattgaatgatttcgtagctgaagtagaaacatttaggtttctgtagcattaaattgtgaagacaactggagtggtacttactgaagaaactctctgtatgtcctagaataagaagcaatgatgtgctgcttctgatttttcttgcattttaaattctcagccaacctacagccatgatctttagcacagtgatatcaccatgacttcacagacatggtctagaatctgtacccttacccacatatgaagaataaaattgattaaaggtt

SEQ ID NO: 434227 - DNA, 2281 bp, Homo sapiens
catgctggagtgcagtggcacaatctcggctcactgcaacctccacctcccatgttcaagtgattcttctgcctcagcctcctgagtagctgggattgcaggtgtgtgccaccacacctggctaatttttctatattttatagagacgggggagattctggaggcgaagaacgcaaagctgagaacatggacgttaatatcgccccactccgcgcctgggacgatttcttcccgggttccgatcgctttgcccggccggacttcagggacatttccaaatggaacaaccgcgtagtgagcaacctgctctattaccagaccaactacctggtggtggctgccatgatgatttccattgtggggctggagtgcaatggcgtgatctcagctcactgcaacctccaccttctgagttcaagtgattctcctgcctcagcctcccaagtagctgggattacaggtttctgagtcccttcaacatgatcctgggaggaatcgtggtggtgctggtgttcacagggtttgtgtgggcagcccacaataaagacgtccttcgccggatgaagaagcgctaccccacgacgttcgttatggtggtcatgttggcgagctatttccttatctccatgtttggaggagtcatggtctttgtgtttggcattacttttcctttgctgttgatgtttatccatgcatcgttgagacttcggaacctcaagaacaaactggagaataaaatggaaggaataggtttgaagaggacaccgatgggcattgtcctggatgccctagaacagcaggaagaaggcatcaacagactcactgactatatcagcaaagtgaaggaataaacataacttacctgagctagggttgcagcagaaattgagttgcagcttgcccttgtccagacctatgttctgcttgcgtttttgaaacaggaggtgcacgtaccacccaattatctatggcagcatgcatgtataggccgaactattatcagctctgatgtttcagagagaagacctcagaaaccgaaagaaaaccaccaccctcctattgtgtctgaagtttcacgtgtgtttatgaaatctaatgggaaatggatcacacgatttctttaagggaattaaaaaaaataaaagaattacggcttttacagcaacaatacgattatcttataggaaaaaaaaaatcattgtaaagtatcaagacaatacgagtaaatgaaaaggctgttaaagtagatgacatcatgtgttagcctgttcctaatcccctagaattgtaatgtgtgggatataaattagtttttattattctcttaaaaatcaaagatgatctctatcactttgccacctgtttgatgtgcagtggaaactggttaagccagttgttcatacttcgtttacaaatataaagatagctgtttaggatattttgttacatttttgtaaatttttgaaatgctagtaatgtgttttcaccagcaagtatttgttgcaaacttaatgtcattttccttaagatggttacagctatgtaacctgtattattctggacggacttattaaaatacaaacagacaaaaaataaaacaaaacttgagttctatttaccttgcacattttttgttgttacagtgaaaaaaatggtccaagaaaatgtttgccatttttgcattgtttcgtttttaactggaacatttagaaagaaggaaatgaatgtgcattttattaattccttaggggcacaaggaggacaataatagctgatcttttgaaatttgaaaaacgtctttagatgaccaagcaaaaagactttaaaaaatggtaatgaaaatggaatgcagctactgcagctaataaaaaattttagatagcaattgttacaaccatatgcctttatagctagacattagaattatgatagcatgagtttatacattctattatttttcctccctttctcatgtttttataaataggtaataaaaaatgttttgcctgccaattgaatgatttcgtagctgaagtagaaacatttaggtttctgtagcattaaattgtgaagacaactggagtggtacttactgaagaaactctctgtatgtcctagaataagaagcaatgatgtgctgcttctgatttttcttgcattttaaattctcagccaacctacagccatgatctttagcacagtgatatcaccatgacttcacagacatggtctagaatctgtacccttacccacatatgaagaataaaattgattaaaggtt

SEQ ID NO: 434228 - DNA, 1856 bp, Homo sapiens
tttccttaaaagccattaacggtcatctactgtccgtttctgagtcccttcaacatgatcctgggaggaatcgtggtggtgctggtgttcacagggtttgtgtgggcagcccacaataaagacgtccttcgccggatgaagaagcgctaccccacgacgttcgttatggtggtcatgttggcgagctatttccttatctccatgtttggaggagtcatggtctttgtgtttggcattacttttcctttgctgttgatgtttatccatgcatcgttgagacttcggaacctcaagaacaaactggagaataaaatggaaggaataggtttgaagaggacaccgatgggcattgtcctggatgccctagaacagcaggaagaaggcatcaacagactcactgactatatcagcaaagtgaaggaataaacataacttacctgagctagggttgcagcagaaattgagttgcagcttgcccttgtccagacctatgttctgcttgcgtttttgaaacaggaggtgcacgtaccacccaattatctatggcagcatgcatgtataggccgaactattatcagctctgatgtttcagagagaagacctcagaaaccgaaagaaaaccaccaccctcctattgtgtctgaagtttcacgtgtgtttatgaaatctaatgggaaatggatcacacgatttctttaagggaattaaaaaaaataaaagaattacggcttttacagcaacaatacgattatcttataggaaaaaaaaaatcattgtaaagtatcaagacaatacgagtaaatgaaaaggctgttaaagtagatgacatcatgtgttagcctgttcctaatcccctagaattgtaatgtgtgggatataaattagtttttattattctcttaaaaatcaaagatgatctctatcactttgccacctgtttgatgtgcagtggaaactggttaagccagttgttcatacttcgtttacaaatataaagatagctgtttaggatattttgttacatttttgtaaatttttgaaatgctagtaatgtgttttcaccagcaagtatttgttgcaaacttaatgtcattttccttaagatggttacagctatgtaacctgtattattctggacggacttattaaaatacaaacagacaaaaaataaaacaaaacttgagttctatttaccttgcacattttttgttgttacagtgaaaaaaatggtccaagaaaatgtttgccatttttgcattgtttcgtttttaactggaacatttagaaagaaggaaatgaatgtgcattttattaattccttaggggcacaaggaggacaataatagctgatcttttgaaatttgaaaaacgtctttagatgaccaagcaaaaagactttaaaaaatggtaatgaaaatggaatgcagctactgcagctaataaaaaattttagatagcaattgttacaaccatatgcctttatagctagacattagaattatgatagcatgagtttatacattctattatttttcctccctttctcatgtttttataaataggtaataaaaaatgttttgcctgccaattgaatgatttcgtagctgaagtagaaacatttaggtttctgtagcattaaattgtgaagacaactggagtggtacttactgaagaaactctctgtatgtcctagaataagaagcaatgatgtgctgcttctgatttttcttgcattttaaattctcagccaacctacagccatgatctttagcacagtgatatcaccatgacttcacagacatggtctagaatctgtacccttacccacatatgaagaataaaattgattaaaggtt

SEQ ID NO: 434229 - DNA, 2079 bp, Homo sapiens
catgctggagtgcagtggcacaatctcggctcactgcaacctccacctcccatgttcaagtgattcttctgcctcagcctcctgagtagctgggattgcaggtgtgtgccaccacacctggctaatttttctatattttatagagacgggggagattctggaggcgaagaacgcaaagctgagaacatggacgttaatatcgccccactccgcgcctgggacgatttcttcccgggttccgatcgctttgcccggccggacttcagggacatttccaaatggaacaaccgcgtagtgagcaacctgctctattacagggtttgtgtgggcagcccacaataaagacgtccttcgccggatgaagaagcgctaccccacgacgttcgttatggtggtcatgttggcgagctatttccttatctccatgtttggaggagtcatggtctttgtgtttggcattacttttcctttgctgttgatgtttatccatgcatcgttgagacttcggaacctcaagaacaaactggagaataaaatggaaggaataggtttgaagaggacaccgatgggcattgtcctggatgccctagaacagcaggaagaaggcatcaacagactcactgactatatcagcaaagtgaaggaataaacataacttacctgagctagggttgcagcagaaattgagttgcagcttgcccttgtccagacctatgttctgcttgcgtttttgaaacaggaggtgcacgtaccacccaattatctatggcagcatgcatgtataggccgaactattatcagctctgatgtttcagagagaagacctcagaaaccgaaagaaaaccaccaccctcctattgtgtctgaagtttcacgtgtgtttatgaaatctaatgggaaatggatcacacgatttctttaagggaattaaaaaaaataaaagaattacggcttttacagcaacaatacgattatcttataggaaaaaaaaaatcattgtaaagtatcaagacaatacgagtaaatgaaaaggctgttaaagtagatgacatcatgtgttagcctgttcctaatcccctagaattgtaatgtgtgggatataaattagtttttattattctcttaaaaatcaaagatgatctctatcactttgccacctgtttgatgtgcagtggaaactggttaagccagttgttcatacttcgtttacaaatataaagatagctgtttaggatattttgttacatttttgtaaatttttgaaatgctagtaatgtgttttcaccagcaagtatttgttgcaaacttaatgtcattttccttaagatggttacagctatgtaacctgtattattctggacggacttattaaaatacaaacagacaaaaaataaaacaaaacttgagttctatttaccttgcacattttttgttgttacagtgaaaaaaatggtccaagaaaatgtttgccatttttgcattgtttcgtttttaactggaacatttagaaagaaggaaatgaatgtgcattttattaattccttaggggcacaaggaggacaataatagctgatcttttgaaatttgaaaaacgtctttagatgaccaagcaaaaagactttaaaaaatggtaatgaaaatggaatgcagctactgcagctaataaaaaattttagatagcaattgttacaaccatatgcctttatagctagacattagaattatgatagcatgagtttatacattctattatttttcctccctttctcatgtttttataaataggtaataaaaaatgttttgcctgccaattgaatgatttcgtagctgaagtagaaacatttaggtttctgtagcattaaattgtgaagacaactggagtggtacttactgaagaaactctctgtatgtcctagaataagaagcaatgatgtgctgcttctgatttttcttgcattttaaattctcagccaacctacagccatgatctttagcacagtgatatcaccatgacttcacagacatggtctagaatctgtacccttacccacatatgaagaataaaattgattaaaggtt

SEQ ID NO: 434230 - DNA, 1794 bp, Homo sapiens
actttttcctttttttttttggttgagcacagggtttgtgtgggcagcccacaataaagacgtccttcgccggatgaagaagcgctaccccacgacgttcgttatggtggtcatgttggcgagctatttccttatctccatgtttggaggagtcatggtctttgtgtttggcattacttttcctttgctgttgatgtttatccatgcatcgttgagacttcggaacctcaagaacaaactggagaataaaatggaaggaataggtttgaagaggacaccgatgggcattgtcctggatgccctagaacagcaggaagaaggcatcaacagactcactgactatatcagcaaagtgaaggaataaacataacttacctgagctagggttgcagcagaaattgagttgcagcttgcccttgtccagacctatgttctgcttgcgtttttgaaacaggaggtgcacgtaccacccaattatctatggcagcatgcatgtataggccgaactattatcagctctgatgtttcagagagaagacctcagaaaccgaaagaaaaccaccaccctcctattgtgtctgaagtttcacgtgtgtttatgaaatctaatgggaaatggatcacacgatttctttaagggaattaaaaaaaataaaagaattacggcttttacagcaacaatacgattatcttataggaaaaaaaaaatcattgtaaagtatcaagacaatacgagtaaatgaaaaggctgttaaagtagatgacatcatgtgttagcctgttcctaatcccctagaattgtaatgtgtgggatataaattagtttttattattctcttaaaaatcaaagatgatctctatcactttgccacctgtttgatgtgcagtggaaactggttaagccagttgttcatacttcgtttacaaatataaagatagctgtttaggatattttgttacatttttgtaaatttttgaaatgctagtaatgtgttttcaccagcaagtatttgttgcaaacttaatgtcattttccttaagatggttacagctatgtaacctgtattattctggacggacttattaaaatacaaacagacaaaaaataaaacaaaacttgagttctatttaccttgcacattttttgttgttacagtgaaaaaaatggtccaagaaaatgtttgccatttttgcattgtttcgtttttaactggaacatttagaaagaaggaaatgaatgtgcattttattaattccttaggggcacaaggaggacaataatagctgatcttttgaaatttgaaaaacgtctttagatgaccaagcaaaaagactttaaaaaatggtaatgaaaatggaatgcagctactgcagctaataaaaaattttagatagcaattgttacaaccatatgcctttatagctagacattagaattatgatagcatgagtttatacattctattatttttcctccctttctcatgtttttataaataggtaataaaaaatgttttgcctgccaattgaatgatttcgtagctgaagtagaaacatttaggtttctgtagcattaaattgtgaagacaactggagtggtacttactgaagaaactctctgtatgtcctagaataagaagcaatgatgtgctgcttctgatttttcttgcattttaaattctcagccaacctacagccatgatctttagcacagtgatatcaccatgacttcacagacatggtctagaatctgtacccttacccacatatgaagaataaaattgattaaaggtt

SEQ ID NO: 434231 - DNA, 2054 bp, Homo sapiens
gaaaagccgaccgagacggagccgctgtcaactctccaactcagctcagctgatcggttgccgccgccgccgccgccagattctggaggcgaagaacgcaaagctgagaacatggacgttaatatcgccccactccgcgcctgggacgatttcttcccgggttccgatcgctttgcccggccggacttcagggacatttccaaatggaacaaccgcgtagtgagcaacctgctctattaccagaccaactacctggtggtggctgccatgatgatttccattgtggggtttctgagtcccttcaacatgatcctgggaggaatcgtggtggtgctggtgttcacagggtttgtgtgggcagcccacaataaagacgtccttcgccggatgaagaagcgctaccccacgacgttcgttatggtggtcatgttggcgagctatttccttatctccatgtttggaggagtcatggtctttgtgtttggcattacttttcctttgctgttgatgtttatccatgcatcgttgagacttcggaacctcaagaacaaactggagaatctagaacagcaggaagaaggcatcaacagactcactgactatatcagcaaagtgaaggaataaacataacttacctgagctagggttgcagcagaaattgagttgcagcttgcccttgtccagacctatgttctgcttgcgtttttgaaacaggaggtgcacgtaccacccaattatctatggcagcatgcatgtataggccgaactattatcagctctgatgtttcagagagaagacctcagaaaccgaaagaaaaccaccaccctcctattgtgtctgaagtttcacgtgtgtttatgaaatctaatgggaaatggatcacacgatttctttaagggaattaaaaaaaataaaagaattacggcttttacagcaacaatacgattatcttataggaaaaaaaaaatcattgtaaagtatcaagacaatacgagtaaatgaaaaggctgttaaagtagatgacatcatgtgttagcctgttcctaatcccctagaattgtaatgtgtgggatataaattagtttttattattctcttaaaaatcaaagatgatctctatcactttgccacctgtttgatgtgcagtggaaactggttaagccagttgttcatacttcgtttacaaatataaagatagctgtttaggatattttgttacatttttgtaaatttttgaaatgctagtaatgtgttttcaccagcaagtatttgttgcaaacttaatgtcattttccttaagatggttacagctatgtaacctgtattattctggacggacttattaaaatacaaacagacaaaaaataaaacaaaacttgagttctatttaccttgcacattttttgttgttacagtgaaaaaaatggtccaagaaaatgtttgccatttttgcattgtttcgtttttaactggaacatttagaaagaaggaaatgaatgtgcattttattaattccttaggggcacaaggaggacaataatagctgatcttttgaaatttgaaaaacgtctttagatgaccaagcaaaaagactttaaaaaatggtaatgaaaatggaatgcagctactgcagctaataaaaaattttagatagcaattgttacaaccatatgcctttatagctagacattagaattatgatagcatgagtttatacattctattatttttcctccctttctcatgtttttataaataggtaataaaaaatgttttgcctgccaattgaatgatttcgtagctgaagtagaaacatttaggtttctgtagcattaaattgtgaagacaactggagtggtacttactgaagaaactctctgtatgtcctagaataagaagcaatgatgtgctgcttctgatttttcttgcattttaaattctcagccaacctacagccatgatctttagcacagtgatatcaccatgacttcacagacatggtctagaatctgtacccttacccacatatgaagaataaaattgattaaaggtt

SEQ ID NO: 434232 - DNA, 1965 bp, Homo sapiens
catgctggagtgcagtggcacaatctcggctcactgcaacctccacctcccatgttcaagtgattcttctgcctcagcctcctgagtagctgggattgcaggtgtgtgccaccacacctggctaatttttctatattttatagagacgggggagattctggaggcgaagaacgcaaagctgagaacatggacgttaatatcgccccactccgcgcctgggacgatttcttcccgggttccgatcgctttgcccggccggacttcagggacatttccaaatggaacaaccgcgtagtgagcaacctgctctattaccagaccaactacctggtggtggctgccatgatgatttccattgtgggtgatgtttatccatgcatcgttgagacttcggaacctcaagaacaaactggagaataaaatggaaggaataggtttgaagaggacaccgatgggcattgtcctggatgccctagaacagcaggaagaaggcatcaacagactcactgactatatcagcaaagtgaaggaataaacataacttacctgagctagggttgcagcagaaattgagttgcagcttgcccttgtccagacctatgttctgcttgcgtttttgaaacaggaggtgcacgtaccacccaattatctatggcagcatgcatgtataggccgaactattatcagctctgatgtttcagagagaagacctcagaaaccgaaagaaaaccaccaccctcctattgtgtctgaagtttcacgtgtgtttatgaaatctaatgggaaatggatcacacgatttctttaagggaattaaaaaaaataaaagaattacggcttttacagcaacaatacgattatcttataggaaaaaaaaaatcattgtaaagtatcaagacaatacgagtaaatgaaaaggctgttaaagtagatgacatcatgtgttagcctgttcctaatcccctagaattgtaatgtgtgggatataaattagtttttattattctcttaaaaatcaaagatgatctctatcactttgccacctgtttgatgtgcagtggaaactggttaagccagttgttcatacttcgtttacaaatataaagatagctgtttaggatattttgttacatttttgtaaatttttgaaatgctagtaatgtgttttcaccagcaagtatttgttgcaaacttaatgtcattttccttaagatggttacagctatgtaacctgtattattctggacggacttattaaaatacaaacagacaaaaaataaaacaaaacttgagttctatttaccttgcacattttttgttgttacagtgaaaaaaatggtccaagaaaatgtttgccatttttgcattgtttcgtttttaactggaacatttagaaagaaggaaatgaatgtgcattttattaattccttaggggcacaaggaggacaataatagctgatcttttgaaatttgaaaaacgtctttagatgaccaagcaaaaagactttaaaaaatggtaatgaaaatggaatgcagctactgcagctaataaaaaattttagatagcaattgttacaaccatatgcctttatagctagacattagaattatgatagcatgagtttatacattctattatttttcctccctttctcatgtttttataaataggtaataaaaaatgttttgcctgccaattgaatgatttcgtagctgaagtagaaacatttaggtttctgtagcattaaattgtgaagacaactggagtggtacttactgaagaaactctctgtatgtcctagaataagaagcaatgatgtgctgcttctgatttttcttgcattttaaattctcagccaacctacagccatgatctttagcacagtgatatcaccatgacttcacagacatggtctagaatctgtacccttacccacatatgaagaataaaattgattaaaggtt

SEQ ID NO: 434233 - DNA, 1674 bp, Homo sapiens
gagatggtatcaacccagagtgcccttacggccgggggtctttgtgtttggcattacttttcctttgctgttgatgtttatccatgcatcgttgagacttcggaacctcaagaacaaactggagaataaaatggaaggaataggtttgaagaggacaccgatgggcattgtcctggatgccctagaacagcaggaagaaggcatcaacagactcactgactatatcagcaaagtgaaggaataaacataacttacctgagctagggttgcagcagaaattgagttgcagcttgcccttgtccagacctatgttctgcttgcgtttttgaaacaggaggtgcacgtaccacccaattatctatggcagcatgcatgtataggccgaactattatcagctctgatgtttcagagagaagacctcagaaaccgaaagaaaaccaccaccctcctattgtgtctgaagtttcacgtgtgtttatgaaatctaatgggaaatggatcacacgatttctttaagggaattaaaaaaaataaaagaattacggcttttacagcaacaatacgattatcttataggaaaaaaaaaatcattgtaaagtatcaagacaatacgagtaaatgaaaaggctgttaaagtagatgacatcatgtgttagcctgttcctaatcccctagaattgtaatgtgtgggatataaattagtttttattattctcttaaaaatcaaagatgatctctatcactttgccacctgtttgatgtgcagtggaaactggttaagccagttgttcatacttcgtttacaaatataaagatagctgtttaggatattttgttacatttttgtaaatttttgaaatgctagtaatgtgttttcaccagcaagtatttgttgcaaacttaatgtcattttccttaagatggttacagctatgtaacctgtattattctggacggacttattaaaatacaaacagacaaaaaataaaacaaaacttgagttctatttaccttgcacattttttgttgttacagtgaaaaaaatggtccaagaaaatgtttgccatttttgcattgtttcgtttttaactggaacatttagaaagaaggaaatgaatgtgcattttattaattccttaggggcacaaggaggacaataatagctgatcttttgaaatttgaaaaacgtctttagatgaccaagcaaaaagactttaaaaaatggtaatgaaaatggaatgcagctactgcagctaataaaaaattttagatagcaattgttacaaccatatgcctttatagctagacattagaattatgatagcatgagtttatacattctattatttttcctccctttctcatgtttttataaataggtaataaaaaatgttttgcctgccaattgaatgatttcgtagctgaagtagaaacatttaggtttctgtagcattaaattgtgaagacaactggagtggtacttactgaagaaactctctgtatgtcctagaataagaagcaatgatgtgctgcttctgatttttcttgcattttaaattctcagccaacctacagccatgatctttagcacagtgatatcaccatgacttcacagacatggtctagaatctgtacccttacccacatatgaagaataaaattgattaaaggtt

SEQ ID NO: 434234 - DNA, 1986 bp, Homo sapiens
aattcgcggccgcgtcgacgcgagaagacgacagaaggggaacatggacgttaatatcgccccactccgcgcctgggacgatttcttcccgggttccgatcgctttgcccggccggacttcagggacatttccaaatggaacaaccgcgtagtgagcaacctgctctattaccagaccaactacctggtggtggctgccatgatgatttccattgtggggtttctgagtcccttcaacatgatcctgggaggaatcgtggtggtgctggtgttcacagggtttgtgtgggcagcccacaataaagacgtccttcgccggatgaagaagcgctaccccacgacgttcgttatggtggtcatgttggcgagctatttccttatctccatgtttggaggagtcatggtctttgtgtttggcattacttttcctttgctgttgatgtttatccatgcatcgttgagacttcggaacctcaagaacaaactggagaatctagaacagcaggaagaaggcatcaacagactcactgactatatcagcaaagtgaaggaataaacataacttacctgagctagggttgcagcagaaattgagttgcagcttgcccttgtccagacctatgttctgcttgcgtttttgaaacaggaggtgcacgtaccacccaattatctatggcagcatgcatgtataggccgaactattatcagctctgatgtttcagagagaagacctcagaaaccgaaagaaaaccaccaccctcctattgtgtctgaagtttcacgtgtgtttatgaaatctaatgggaaatggatcacacgatttctttaagggaattaaaaaaaataaaagaattacggcttttacagcaacaatacgattatcttataggaaaaaaaaaatcattgtaaagtatcaagacaatacgagtaaatgaaaaggctgttaaagtagatgacatcatgtgttagcctgttcctaatcccctagaattgtaatgtgtgggatataaattagtttttattattctcttaaaaatcaaagatgatctctatcactttgccacctgtttgatgtgcagtggaaactggttaagccagttgttcatacttcgtttacaaatataaagatagctgtttaggatattttgttacatttttgtaaatttttgaaatgctagtaatgtgttttcaccagcaagtatttgttgcaaacttaatgtcattttccttaagatggttacagctatgtaacctgtattattctggacggacttattaaaatacaaacagacaaaaaataaaacaaaacttgagttctatttaccttgcacattttttgttgttacagtgaaaaaaatggtccaagaaaatgtttgccatttttgcattgtttcgtttttaactggaacatttagaaagaaggaaatgaatgtgcattttattaattccttaggggcacaaggaggacaataatagctgatcttttgaaatttgaaaaacgtctttagatgaccaagcaaaaagactttaaaaaatggtaatgaaaatggaatgcagctactgcagctaataaaaaattttagatagcaattgttacaaccatatgcctttatagctagacattagaattatgatagcatgagtttatacattctattatttttcctccctttctcatgtttttataaataggtaataaaaaatgttttgcctgccaattgaatgatttcgtagctgaagtagaaacatttaggtttctgtagcattaaattgtgaagacaactggagtggtacttactgaagaaactctctgtatgtcctagaataagaagcaatgatgtgctgcttctgatttttcttgcattttaaattctcagccaacctacagccatgatctttagcacagtgatatcaccatgacttcacagacatggtctagaatctgtacccttacccacatatgaagaataaaattgattaaaggtt

SEQ ID NO: 434235 - DNA, 1547 bp, Homo sapiens
agaggatccccctcggctctacctagtctgccacgatgaagagacatcagaagtctagaacagcaggaagaaggcatcaacagactcactgactatatcagcaaagtgaaggaataaacataacttacctgagctagggttgcagcagaaattgagttgcagcttgcccttgtccagacctatgttctgcttgcgtttttgaaacaggaggtgcacgtaccacccaattatctatggcagcatgcatgtataggccgaactattatcagctctgatgtttcagagagaagacctcagaaaccgaaagaaaaccaccaccctcctattgtgtctgaagtttcacgtgtgtttatgaaatctaatgggaaatggatcacacgatttctttaagggaattaaaaaaaataaaagaattacggcttttacagcaacaatacgattatcttataggaaaaaaaaaatcattgtaaagtatcaagacaatacgagtaaatgaaaaggctgttaaagtagatgacatcatgtgttagcctgttcctaatcccctagaattgtaatgtgtgggatataaattagtttttattattctcttaaaaatcaaagatgatctctatcactttgccacctgtttgatgtgcagtggaaactggttaagccagttgttcatacttcgtttacaaatataaagatagctgtttaggatattttgttacatttttgtaaatttttgaaatgctagtaatgtgttttcaccagcaagtatttgttgcaaacttaatgtcattttccttaagatggttacagctatgtaacctgtattattctggacggacttattaaaatacaaacagacaaaaaataaaacaaaacttgagttctatttaccttgcacattttttgttgttacagtgaaaaaaatggtccaagaaaatgtttgccatttttgcattgtttcgtttttaactggaacatttagaaagaaggaaatgaatgtgcattttattaattccttaggggcacaaggaggacaataatagctgatcttttgaaatttgaaaaacgtctttagatgaccaagcaaaaagactttaaaaaatggtaatgaaaatggaatgcagctactgcagctaataaaaaattttagatagcaattgttacaaccatatgcctttatagctagacattagaattatgatagcatgagtttatacattctattatttttcctccctttctcatgtttttataaataggtaataaaaaatgttttgcctgccaattgaatgatttcgtagctgaagtagaaacatttaggtttctgtagcattaaattgtgaagacaactggagtggtacttactgaagaaactctctgtatgtcctagaataagaagcaatgatgtgctgcttctgatttttcttgcattttaaattctcagccaacctacagccatgatctttagcacagtgatatcaccatgacttcacagacatggtctagaatctgtacccttacccacatatgaagaataaaattgattaaaggtt

SEQ ID NO: 434236 - DNA, 1649 bp, Homo sapiens
gaaaagccgaccgagacggagccgctgtcaactctccaactcagctcagctgatcggttgccgccgccgccgccgccagattctggaggcgaagaacgcaaagctgagaacatggacgttaatatcgccccactccgcgcctgggacgatttcttcccgggttccgatcgctttgcccggccggacttcagggacatttccaaatggaacaaccgcgtagtgagcaacctgctctattaccagaccaactacctggtggtggctgccatgatgatttccattgtggggtttctgagtcccttcaacatgatcctgggaggaatcgtggtggtgctggtgttcacagggtttgtgtgggcagcccacaataaagacgtccttcgccggatgaagaagcgctaccccacgacgttcgttatggtggtcatgttggcgagctatttccttatctccatgtttggaggagtcatggtctttgtgtttggcattacttttcctttgctgttgatgtttatccatgcatcgttgagacttcggaacctcaagaacaaactggagaataaaatggaaggaataggtttgaagaggacaccgatgggcattgtcctggatgccctagaacagcaggaagaaggcatcaacagactcactgactatatcagcaaagtgaaggaataaacataacttacctcttaaaaatcaaagatgatctctatcactttgccacctgtttgatgtgcagtggaaactggttaagccagttgttcatacttcgtttacaaatataaagatagctgtttaggatattttgttacatttttgtaaatttttgaaatgctagtaatgtgttttcaccagcaagtatttgttgcaaacttaatgtcattttccttaagatggttacagctatgtaacctgtattattctggacggacttattaaaatacaaacagacaaaaaataaaacaaaacttgagttctatttaccttgcacattttttgttgttacagtgaaaaaaatggtccaagaaaatgtttgccatttttgcattgtttcgtttttaactggaacatttagaaagaaggaaatgaatgtgcattttattaattccttaggggcacaaggaggacaataatagctgatcttttgaaatttgaaaaacgtctttagatgaccaagcaaaaagactttaaaaaatggtaatgaaaatggaatgcagctactgcagctaataaaaaattttagatagcaattgttacaaccatatgcctttatagctagacattagaattatgatagcatgagtttatacattctattatttttcctccctttctcatgtttttataaataggtaataaaaaatgttttgcctgccaattgaatgatttcgtagctgaagtagaaacatttaggtttctgtagcattaaattgtgaagacaactggagtggtacttactgaagaaactctctgtatgtcctagaataagaagcaatgatgtgctgcttctgatttttcttgcattttaaattctcagccaacctacagccatgatctttagcacagtgatatcaccatgacttcacagacatggtctagaatctgtacccttacccacatatgaagaataaaattgattaaaggtt

SEQ ID NO: 434237 - DNA, 826 bp, Homo sapiens
gaaaagccgaccgagacggagccgctgtcaactctccaactcagctcagctgatcggttgccgccgccgccgccgccagattctggaggcgaagaacgcaaagctgagaacatggacgttaatatcgccccactccgcgcctgggacgatttcttcccgggttccgatcgctttgcccggccggacttcagggacatttccaaatggaacaaccgcgtagtgagcaacctgctctattaccagaccaactacctggtggtggctgccatgatgatttccattgtggggtttctgagtcccttcaacatgatcctgggaggaatcgtggtggtgctggtgttcacagggtttgtgtgggcagcccacaataaagacgtccttcgccggatgaagaagcgctaccccacgacgttcgttatggtggtcatgttggcgagctatttccttatctccatgtttggaggagtcatggtctttgtgtttggcattacttttcctttgctgttgatgtttatccatgcatcgttgagacttcggaacctcaagaacaaactggagaataaaatggaaggaataggtttgaagaggacaccgatgggcattgtcctggatgccctagaacagcaggaagaaggcatcaacagactcactgactatatcagcaaagtgaaggaataaacataacttacctgagctagggttgcagcagaaattgagttgcagcttgcccttgtccagacctatgttctgcttgcgtttttgaaacaggagtgcgtcaccatttatgggtgtgttagcgaattagtctgtgtagaaaagactgaac

SEQ ID NO: 434238 - DNA, 474 bp, Homo sapiens
gaaaagccgaccgagacggagccgctgtcaactctccaactcagctcagctgatcggttgccgccgccgccgccgccagattctggaggcgaagaacgcaaagctgagaacatggacgttaatatcgccccactccgcgcctgggacgatttcttcccgggttccgatcgctttgcccggccggacttcagggacatttccaaatggaacaaccgcgtagtgagcaacctgctctattaccagaccaactacctggtggtggctgccatgatgatttccattgtggggtttctgagtcccttcaacatgatcctgggaggaatcgtggtggtgctggtgttcacagagctggtgggcatgtggtgcacctgggcctggtggtctcagccctgccagggaggctttgagtgcacccgcccgtctctcccccaggctctcacatgcctgtgttttccaaagtagagatgtggcttt

SEQ ID NO: 434239 - DNA, 3906 bp, Homo sapiens
agacgtggcttggggccgccatcttggcaagaggcgaagcggcagcggttcctgtcaagggggcagcaggtccagagctgctggtgctcccgttccccagaccctacccctatccccagtggagccggagtgcgggcgcgccccaccaccgccctcaccatggtgctgttggcagcagcggtctgcacaaaagcaggaaaggctattgtttctcgacagtttgtggaaatgacccgaactcggattgagggcttattagcagcttttccaaagctcatgaacactggaaaacaacatacgtttgttgaaacagagagtgtaagatatgtctaccagcctatggagaaactgtatatggtactgatcactaccaaaaacagcaacattttagaagatttggagaccctaaggctcttctcaagagtgatccctgaatattgccgagccttagaagagaatgaaatatctgagcactgttttgatttgatttttgcttttgatgaaattgtcgcactgggataccgggagaatgttaacttggcacagatcagaaccttcacagaaatggattctcatgaggagaaggtgttcagagccgtcagagagactcaagaacgtgaagctaaggctgagatgcgtcgtaaagcaaaggaattacaacaggcccgaagagatgcagagagacagggcaaaaaagcaccaggatttggcggatttggcagctctgcagtatctggaggcagcacagctgccatgatcacagagaccatcattgaaactgataaaccaaaagtggcacctgcaccagccaggccttcaggccccagcaaggctttaaaacttggagccaaaggaaaggaagtagataactttgtggacaaattaaaatctgaaggtgaaaccatcatgtcctctagtatgggcaagcgtacttctgaagcaaccaaaatgcatgctccacccattaatatggaaagtgtacatatgaagattgaagaaaagataacattaacctgtggacgagacggaggattacagaatatggagttgcatggcatgatcatgcttaggatctcagatgacaagtatggccgaattcgtcttcatgtggaaaatgaagataagaaaggggtgcagctacagacccatccaaatgtggataaaaaacttttcactgcagagtctctaattggcctgaagaatccagagaagtcatttccagtcaacagtgacgtaggggtgctaaagtggagactacaaaccacagaggaatcttttattccactgacaattaattgctggccctcggagagtggaaatggctgtgatgtcaacatagaatatgagctacaagaagataatttagaactgaatgatgtggttatcaccatcccactcccgtctggtgtcggcgcgcctgttatcggtgagatcgatggggagtatcgacatgacagtcgacgaaataccctggagtggtgcctgcctgtgattgatgccaaaaataagagtggcagcctggagtttagcattgctgggcagcccaatgacttcttccctgttcaagtttcctttgtctccaagaaaaattactgtaacatacaggttaccaaagtgacccaggtagatggaaacagccccgtcaggttttccacagagaccactttcctagtggataagtatgaaattctgtaataccaagaagagggagctgaaaaggaaaattttcagattaataaagaagacgccaatgatggctgaagagtttttcccagatttacaagccactggagaccccttttttctgatacaatgcacgattctctgcgcgcaaggaccctcgactcacccccatgtttcagtgtcacagagacattctttgataaggaaatggcacaaacataaagggaaaggctgctaattttctttggcagattgtattggccagcaggaaagcaagctctccagagaatgcccccagttaaatacctcctctacctttacctaagttgctcctttatttttattttattattattattattattattattttttgagatggagtctcactttgtaacccaggctggaatgcaatggcatgatctcagctcactgcaacctccgcctcctgggttcaagcaagtctcctgcctcagcctccgagtagctgggactacaggtgcacgccaccacgcctggctaattttttgtattttagtagagacggggtttcaccgtgttgcccaggctggtcgcgaactcctgagctcaggcaatccgcccacctcagcctcccaaagtgttgggattacaggcatgagccaccatgcccagctgctcctttattttaatccctaaatataatccctaaatatagttatatttcatacttagtttgtttttaaaaagttttctctgtagaaaattttaatcattcataccctttacctttaggtttttctttctatacattcagtcaggcactgggatcatctgtttacaggcattatatttatttggcactcctggaacaagtatatctaacccattcttgatttttggactattcaggtgaactatttgaggggtatggggtctagaagttaaaagatacgcatgtcttctgttcttttcccgtatcaattcattccttcatctctttgccaagttgttttcctttcagggcctgtccttccagtttagaacagtaccatgaatcccacttgtgtcaatattaaagatagctgagaagcacctttcaaatggcacagtccctcttcaagatgtctaaaagaatggttatgtctgtccagttagggatttcacatccacatgtaatcatgtctgctgctgttgctacccaaattttcatttctccacattttgggtacttaagctaaaacgtaatggccacagtctgtaatccattcacattcctcagtttcaccacctccctcttccagactgcactctctgtcatcagtcccctcctttctaacagaaatggggttatgattttgaaggctgtgggttcagggagtctttgccaatcctgttggccctaaactatcaaggaggctccatttcaccatttgattttttgcatttcaggaggcaactgattgtttcgatatgtacatattactcacgtataccccatttccttccagtcagcccaacattttccaccagtctgtccccatctctgaaatccttccttctctttccccctaagtcttttgagtgtcatcatgtactggtggtttctcggttccatctcatccatttccttttcaatggagactacagcgtcagccagctcagccttggcttttaactcaatattccagtccataggggtggttaaaagttgctgcaaggctgcaggcactggcagtgggaagaggcagacgactagatgacttctgcacttttagctggttgaaaagtaccactcccactctgaacatctggccgtccctgcaaagagtgtactgtgcttgaagcagagcactcacacataaatggctgtgtgtggaattgcttgccaaagaagtttctagcctttccctttcccctaactgcatcagggaagaattcttatctctagcttggtttccacatgaggtttttctgagaagggcttgggacaagaagtctgtcatgttagttaagcaggcaagaaatcctactaatccagttttgtttgaaagttgtttgtccgtatgattttttaaaagtcaagtttaatttcaaaaaaccttttttttctgagattacttttggggtaatatttaaaatgagagacattttgtaaccctgtaaaatacatagggaatataacattccagtgtatacaaagaaggcaaattctttaatcaaataaagcgcattataaaatga

SEQ ID NO: 434240 - DNA, 3713 bp, Homo sapiens
cggaaatcatcctagtaataaagtgaaatcagacccacaacgaatgaatgaacagccacgtattagcagcttttccaaagctcatgaacactggaaaacaacatacgtttgttgaaacagagagtgtaagatatgtctaccagcctatggagaaactgtatatggtactgatcactaccaaaaacagcaacattttagaagatttggagaccctaaggctcttctcaagagtgatccctgaatattgccgagccttagaagagaatgaaatatctgagcactgttttgatttgatttttgcttttgatgaaattgtcgcactgggataccgggagaatgttaacttggcacagatcagaaccttcacagaaatggattctcatgaggagaaggtgttcagagccgtcagagagactcaagaacgtgaagctaaggctgagatgcgtcgtaaagcaaaggaattacaacaggcccgaagagatgcagagagacagggcaaaaaagcaccaggatttggcggatttggcagctctgcagtatctggaggcagcacagctgccatgatcacagagaccatcattgaaactgataaaccaaaagtggcacctgcaccagccaggccttcaggccccagcaaggctttaaaacttggagccaaaggaaaggaagtagataactttgtggacaaattaaaatctgaaggtgaaaccatcatgtcctctagtatgggcaagcgtacttctgaagcaaccaaaatgcatgctccacccattaatatggaaagtgtacatatgaagattgaagaaaagataacattaacctgtggacgagacggaggattacagaatatggagttgcatggcatgatcatgcttaggatctcagatgacaagtatggccgaattcgtcttcatgtggaaaatgaagataagaaaggggtgcagctacagacccatccaaatgtggataaaaaacttttcactgcagagtctctaattggcctgaagaatccagagaagtcatttccagtcaacagtgacgtaggggtgctaaagtggagactacaaaccacagaggaatcttttattccactgacaattaattgctggccctcggagagtggaaatggctgtgatgtcaacatagaatatgagctacaagaagataatttagaactgaatgatgtggttatcaccatcccactcccgtctggtgtcggcgcgcctgttatcggtgagatcgatggggagtatcgacatgacagtcgacgaaataccctggagtggtgcctgcctgtgattgatgccaaaaataagagtggcagcctggagtttagcattgctgggcagcccaatgacttcttccctgttcaagtttcctttgtctccaagaaaaattactgtaacatacaggttaccaaagtgacccaggtagatggaaacagccccgtcaggttttccacagagaccactttcctagtggataagtatgaaattctgtaataccaagaagagggagctgaaaaggaaaattttcagattaataaagaagacgccaatgatggctgaagagtttttcccagatttacaagccactggagaccccttttttctgatacaatgcacgattctctgcgcgcaaggaccctcgactcacccccatgtttcagtgtcacagagacattctttgataaggaaatggcacaaacataaagggaaaggctgctaattttctttggcagattgtattggccagcaggaaagcaagctctccagagaatgcccccagttaaatacctcctctacctttacctaagttgctcctttatttttattttattattattattattattattattttttgagatggagtctcactttgtaacccaggctggaatgcaatggcatgatctcagctcactgcaacctccgcctcctgggttcaagcaagtctcctgcctcagcctccgagtagctgggactacaggtgcacgccaccacgcctggctaattttttgtattttagtagagacggggtttcaccgtgttgcccaggctggtcgcgaactcctgagctcaggcaatccgcccacctcagcctcccaaagtgttgggattacaggcatgagccaccatgcccagctgctcctttattttaatccctaaatataatccctaaatatagttatatttcatacttagtttgtttttaaaaagttttctctgtagaaaattttaatcattcataccctttacctttaggtttttctttctatacattcagtcaggcactgggatcatctgtttacaggcattatatttatttggcactcctggaacaagtatatctaacccattcttgatttttggactattcaggtgaactatttgaggggtatggggtctagaagttaaaagatacgcatgtcttctgttcttttcccgtatcaattcattccttcatctctttgccaagttgttttcctttcagggcctgtccttccagtttagaacagtaccatgaatcccacttgtgtcaatattaaagatagctgagaagcacctttcaaatggcacagtccctcttcaagatgtctaaaagaatggttatgtctgtccagttagggatttcacatccacatgtaatcatgtctgctgctgttgctacccaaattttcatttctccacattttgggtacttaagctaaaacgtaatggccacagtctgtaatccattcacattcctcagtttcaccacctccctcttccagactgcactctctgtcatcagtcccctcctttctaacagaaatggggttatgattttgaaggctgtgggttcagggagtctttgccaatcctgttggccctaaactatcaaggaggctccatttcaccatttgattttttgcatttcaggaggcaactgattgtttcgatatgtacatattactcacgtataccccatttccttccagtcagcccaacattttccaccagtctgtccccatctctgaaatccttccttctctttccccctaagtcttttgagtgtcatcatgtactggtggtttctcggttccatctcatccatttccttttcaatggagactacagcgtcagccagctcagccttggcttttaactcaatattccagtccataggggtggttaaaagttgctgcaaggctgcaggcactggcagtgggaagaggcagacgactagatgacttctgcacttttagctggttgaaaagtaccactcccactctgaacatctggccgtccctgcaaagagtgtactgtgcttgaagcagagcactcacacataaatggctgtgtgtggaattgcttgccaaagaagtttctagcctttccctttcccctaactgcatcagggaagaattcttatctctagcttggtttccacatgaggtttttctgagaagggcttgggacaagaagtctgtcatgttagttaagcaggcaagaaatcctactaatccagttttgtttgaaagttgtttgtccgtatgattttttaaaagtcaagtttaatttcaaaaaaccttttttttctgagattacttttggggtaatatttaaaatgagagacattttgtaaccctgtaaaatacatagggaatataacattccagtgtatacaaagaaggcaaattctttaatcaaataaagcgcattataaaatga

SEQ ID NO: 434241 - DNA, 3993 bp, Homo sapiens
agacgtggcttggggccgccatcttggcaagaggcgaagcggcagcggttcctgtcaagggggcagcaggtccagagctgctggtgctcccgttccccagaccctacccctatccccagtggagccggagtgcgggcgcgccccaccaccgccctcaccatggtgctgttggcagcagcggtctgcacaaaagcaggaaaggctattgtttctcgacagtttgtggaaatgacccgaactcggattgagggcttattagcagcttttccaaagctcatgaacactggaaaacaacatacgtttgttgaaacagagagtgtaagatatgtctaccagcctatggagaaactgtatatggtactgatcactaccaaaaacagcaacattttagaagatttggagaccctaaggctcttctcaagagtgatccctgaatattgccgagccttagaagagaatgaaatatctgagcactgttttgatttgatttttgcttttgatgaaattgtcgcactgggataccgggagaatgttaacttggcacagatcagaaccttcacagaaatggattctcatgaggagaaggtgttcagagccgtcagagagactcaagaacgtgaagctaaggctgagatgcgtcgtaaagcaaaggaattacaacaggcccgaagagatgcagagagacagggcaaaaaagcaccaggatttggcggatttggcagctctgcagtatctggaggcagcacagctgccatgatcacagagaccatcattgaaactgataaaccaaaagtggcacctgcaccagccaggccttcaggccccagcaaggctttaaaacttggagccaaaggaaaggaagtagataactttgtggacaaattaaaatctgaaggtgaaaccatcatgtcctctagtatgggcaagcgtacttctgaagcaaccaaaatgcatgctccacccattaatatggaaagtgtacatatgaagattgaagaaaagataacattaacctgtggacgagacggaggattacagaatatggagttgcatggcatgatcatgcttaggatctcagatgacaagtatggccgaattcgtcttcatgtggaaaatgaagataagaaaggggtgcagctacagacccatccaaatgtggataaaaaacttttcactgcagagtctctaattggcctgaagaatccagagaagtcatttccagtcaacagtgacgtaggggtgctaaagtggagactacaaaccacagaggaatcttttattccactgacaattaattgctggccctcggagagtggaaatggctgtgatgtcaacatagaatatgagctacaagaagataatttagaactgaatgatgtggttatcaccatcccactcccgtctggtgtcggcgcgcctgttatcggtgagatcgatggggagtatcgacatgacagtcgacgaaataccctggagtggtgcctgcctgtgattgatgccaaaaataagagtggcagcctggagtttagcattgctgggcagcccaagcaaggccaaatggaactttctttccctggtttcaaaggtttcccttttggttcttcctcaaggaaaaaaattaccgtggttaaaccaattaacagggtttcccaacaaggtggaacccaagggttaaggaattgggaaccaaggccccggttcagggtttttcccaaccaaagaaagaaccaactttcccttaagtggaattaagggtattgaaaaattctggtttaattaaccaaaggaaagaagggagctgaaaaggaaaattttcagattaataaagaagacgccaatgatggctgaagagtttttcccagatttacaagccactggagaccccttttttctgatacaatgcacgattctctgcgcgcaaggaccctcgactcacccccatgtttcagtgtcacagagacattctttgataaggaaatggcacaaacataaagggaaaggctgctaattttctttggcagattgtattggccagcaggaaagcaagctctccagagaatgcccccagttaaatacctcctctacctttacctaagttgctcctttatttttattttattattattattattattattattttttgagatggagtctcactttgtaacccaggctggaatgcaatggcatgatctcagctcactgcaacctccgcctcctgggttcaagcaagtctcctgcctcagcctccgagtagctgggactacaggtgcacgccaccacgcctggctaattttttgtattttagtagagacggggtttcaccgtgttgcccaggctggtcgcgaactcctgagctcaggcaatccgcccacctcagcctcccaaagtgttgggattacaggcatgagccaccatgcccagctgctcctttattttaatccctaaatataatccctaaatatagttatatttcatacttagtttgtttttaaaaagttttctctgtagaaaattttaatcattcataccctttacctttaggtttttctttctatacattcagtcaggcactgggatcatctgtttacaggcattatatttatttggcactcctggaacaagtatatctaacccattcttgatttttggactattcaggtgaactatttgaggggtatggggtctagaagttaaaagatacgcatgtcttctgttcttttcccgtatcaattcattccttcatctctttgccaagttgttttcctttcagggcctgtccttccagtttagaacagtaccatgaatcccacttgtgtcaatattaaagatagctgagaagcacctttcaaatggcacagtccctcttcaagatgtctaaaagaatggttatgtctgtccagttagggatttcacatccacatgtaatcatgtctgctgctgttgctacccaaattttcatttctccacattttgggtacttaagctaaaacgtaatggccacagtctgtaatccattcacattcctcagtttcaccacctccctcttccagactgcactctctgtcatcagtcccctcctttctaacagaaatggggttatgattttgaaggctgtgggttcagggagtctttgccaatcctgttggccctaaactatcaaggaggctccatttcaccatttgattttttgcatttcaggaggcaactgattgtttcgatatgtacatattactcacgtataccccatttccttccagtcagcccaacattttccaccagtctgtccccatctctgaaatccttccttctctttccccctaagtcttttgagtgtcatcatgtactggtggtttctcggttccatctcatccatttccttttcaatggagactacagcgtcagccagctcagccttggcttttaactcaatattccagtccataggggtggttaaaagttgctgcaaggctgcaggcactggcagtgggaagaggcagacgactagatgacttctgcacttttagctggttgaaaagtaccactcccactctgaacatctggccgtccctgcaaagagtgtactgtgcttgaagcagagcactcacacataaatggctgtgtgtggaattgcttgccaaagaagtttctagcctttccctttcccctaactgcatcagggaagaattcttatctctagcttggtttccacatgaggtttttctgagaagggcttgggacaagaagtctgtcatgttagttaagcaggcaagaaatcctactaatccagttttgtttgaaagttgtttgtccgtatgattttttaaaagtcaagtttaatttcaaaaaaccttttttttctgagattacttttggggtaatatttaaaatgagagacattttgtaaccctgtaaaatacatagggaatataacattccagtgtatacaaagaaggcaaattctttaatcaaataaagcgcattataaaatga

SEQ ID NO: 434242 - DNA, 2534 bp, Homo sapiens
accttgaccagaatgtttctcacaacaggtctggtgtcggcgcgcctgttatcggtgagatcgatggggagtatcgacatgacagtcgacgaaataccctggagtggtgcctgcctgtgattgatgccaaaaataagagtggcagcctggagtttagcattgctgggcagcccaatgacttcttccctgttcaagtttcctttgtctccaagaaaaattactgtaacatacaggttaccaaagtgacccaggtagatggaaacagccccgtcaggttttccacagagaccactttcctagtggataagtatgaaattctgtaataccaagaagagggagctgaaaaggaaaattttcagattaataaagaagacgccaatgatggctgaagagtttttcccagatttacaagccactggagaccccttttttctgatacaatgcacgattctctgcgcgcaaggaccctcgactcacccccatgtttcagtgtcacagagacattctttgataaggaaatggcacaaacataaagggaaaggctgctaattttctttggcagattgtattggccagcaggaaagcaagctctccagagaatgcccccagttaaatacctcctctacctttacctaagttgctcctttatttttattttattattattattattattattattttttgagatggagtctcactttgtaacccaggctggaatgcaatggcatgatctcagctcactgcaacctccgcctcctgggttcaagcaagtctcctgcctcagcctccgagtagctgggactacaggtgcacgccaccacgcctggctaattttttgtattttagtagagacggggtttcaccgtgttgcccaggctggtcgcgaactcctgagctcaggcaatccgcccacctcagcctcccaaagtgttgggattacaggcatgagccaccatgcccagctgctcctttattttaatccctaaatataatccctaaatatagttatatttcatacttagtttgtttttaaaaagttttctctgtagaaaattttaatcattcataccctttacctttaggtttttctttctatacattcagtcaggcactgggatcatctgtttacaggcattatatttatttggcactcctggaacaagtatatctaacccattcttgatttttggactattcaggtgaactatttgaggggtatggggtctagaagttaaaagatacgcatgtcttctgttcttttcccgtatcaattcattccttcatctctttgccaagttgttttcctttcagggcctgtccttccagtttagaacagtaccatgaatcccacttgtgtcaatattaaagatagctgagaagcacctttcaaatggcacagtccctcttcaagatgtctaaaagaatggttatgtctgtccagttagggatttcacatccacatgtaatcatgtctgctgctgttgctacccaaattttcatttctccacattttgggtacttaagctaaaacgtaatggccacagtctgtaatccattcacattcctcagtttcaccacctccctcttccagactgcactctctgtcatcagtcccctcctttctaacagaaatggggttatgattttgaaggctgtgggttcagggagtctttgccaatcctgttggccctaaactatcaaggaggctccatttcaccatttgattttttgcatttcaggaggcaactgattgtttcgatatgtacatattactcacgtataccccatttccttccagtcagcccaacattttccaccagtctgtccccatctctgaaatccttccttctctttccccctaagtcttttgagtgtcatcatgtactggtggtttctcggttccatctcatccatttccttttcaatggagactacagcgtcagccagctcagccttggcttttaactcaatattccagtccataggggtggttaaaagttgctgcaaggctgcaggcactggcagtgggaagaggcagacgactagatgacttctgcacttttagctggttgaaaagtaccactcccactctgaacatctggccgtccctgcaaagagtgtactgtgcttgaagcagagcactcacacataaatggctgtgtgtggaattgcttgccaaagaagtttctagcctttccctttcccctaactgcatcagggaagaattcttatctctagcttggtttccacatgaggtttttctgagaagggcttgggacaagaagtctgtcatgttagttaagcaggcaagaaatcctactaatccagttttgtttgaaagttgtttgtccgtatgattttttaaaagtcaagtttaatttcaaaaaaccttttttttctgagattacttttggggtaatatttaaaatgagagacattttgtaaccctgtaaaatacatagggaatataacattccagtgtatacaaagaaggcaaattctttaatcaaataaagcgcattataaaatga

SEQ ID NO: 434243 - DNA, 1673 bp, Homo sapiens
cccaattcttctccacgacaacacctgactgcgtgtcgcacaaccagtgcttcaaaagttgaaggaattgggctacaaagttttgcctcatccaccatgcccagctgctcctttattttaatccctaaatataatccctaaatatagttatatttcatacttagtttgtttttaaaaagttttctctgtagaaaattttaatcattcataccctttacctttaggtttttctttctatacattcagtcaggcactgggatcatctgtttacaggcattatatttatttggcactcctggaacaagtatatctaacccattcttgatttttggactattcaggtgaactatttgaggggtatggggtctagaagttaaaagatacgcatgtcttctgttcttttcccgtatcaattcattccttcatctctttgccaagttgttttcctttcagggcctgtccttccagtttagaacagtaccatgaatcccacttgtgtcaatattaaagatagctgagaagcacctttcaaatggcacagtccctcttcaagatgtctaaaagaatggttatgtctgtccagttagggatttcacatccacatgtaatcatgtctgctgctgttgctacccaaattttcatttctccacattttgggtacttaagctaaaacgtaatggccacagtctgtaatccattcacattcctcagtttcaccacctccctcttccagactgcactctctgtcatcagtcccctcctttctaacagaaatggggttatgattttgaaggctgtgggttcagggagtctttgccaatcctgttggccctaaactatcaaggaggctccatttcaccatttgattttttgcatttcaggaggcaactgattgtttcgatatgtacatattactcacgtataccccatttccttccagtcagcccaacattttccaccagtctgtccccatctctgaaatccttccttctctttccccctaagtcttttgagtgtcatcatgtactggtggtttctcggttccatctcatccatttccttttcaatggagactacagcgtcagccagctcagccttggcttttaactcaatattccagtccataggggtggttaaaagttgctgcaaggctgcaggcactggcagtgggaagaggcagacgactagatgacttctgcacttttagctggttgaaaagtaccactcccactctgaacatctggccgtccctgcaaagagtgtactgtgcttgaagcagagcactcacacataaatggctgtgtgtggaattgcttgccaaagaagtttctagcctttccctttcccctaactgcatcagggaagaattcttatctctagcttggtttccacatgaggtttttctgagaagggcttgggacaagaagtctgtcatgttagttaagcaggcaagaaatcctactaatccagttttgtttgaaagttgtttgtccgtatgattttttaaaagtcaagtttaatttcaaaaaaccttttttttctgagattacttttggggtaatatttaaaatgagagacattttgtaaccctgtaaaatacatagggaatataacattccagtgtatacaaagaaggcaaattctttaatcaaataaagcgcattataaaatga

SEQ ID NO: 434244 - DNA, 4017 bp, Homo sapiens
agacgtggcttggggccgccatcttggcaagaggcgaagcggcagcggttcctgtcaagggggcagcaggtccagagctgctggtgctcccgttccccagaccctacccctatccccagtggagccggagtgcgggcgcgccccaccaccgccctcaccatggtgctgttggcagcagcggtctgcacaaaagcaggaaaggctattgtttctcgacagtttgtggaaatgacccgaactcggattgagggcttattagcagcttttccaaagctcatgaacactggaaaacaacatacgtttgttgaaacagagagtgtaagatatgtctaccagcctatggagaaactgtatatggtactgatcactaccaaaaacagcaacattttagaagatttggagaccctaaggctcttctcaagagtgatccctgaatattgccgagccttagaagagaatgaaatatctgagcactgttttgatttgatttttgcttttgatgaaattgtcgcactgggataccgggagaatgttaacttggcacagatcagaaccttcacagaaatggattctcatgaggagaaggtgttcagagccgtcagagagactcaagaacgtgaagctaaggctgagatgcgtcgtaaagcaaaggaattacaacaggcccgaagagatgcagagagacagggcaaaaaagcaccaggatttggcggatttggcagctctgcagtatctggaggcagcacagctgccatgatcacagagaccatcattgaaactgataaaccaaaagtggcacctgcaccagccaggccttcaggccccagcaaggctttaaaacttggagccaaaggaaaggaagtagataactttgtggacaaattaaaatctgaaggtgaaaccatcatgtcctctagtatgggcaagcgtacttctgaagcaaccaaaatgcatgctccacccattaatatggaaagtgtacatatgaagattgaagaaaagataacattaacctgtggacgagacggaggattacagaatatggagttgcatggcatgatcatgcttaggatctcagatgacaagtatggccgaattcgtcttcatgtggaaaatgaagataagaaaggggtgcagctacagacccatccaaatgtggataaaaaacttttcactgcagagtctctaattggcctgaagaatccagagaagtcatttccagtcaacagtgacgtaggggtgctaaagtggagactacaaaccacagaggaatcttttattccactgacaattaattgctggccctcggagagtggaaatggctgtgatgtcaacatagaatatgagctacaagaagataatttagaactgaatgatgtggttatcaccatcccactcccgtctggtgtcggcgcgcctgttatcggtgagatcgatggggagtatcgacatgacagtcgacgaaataccctggagtggtgcctgcctgtgattgatgccaaaaataagagtggcagcctggagtttagcattgctgggcagcccaatgacttcttccctgttcaagtttcctttgtctccaagaaaaattactgtaacatacaggttaccaaagtgacccaggtagatggaaacagccccgtcaggttttccacagagaccactttcctagtggataagtatgaaattctgtaataccaagaagagggagctgaaaaggaaaattttcagattaataaagaagacgccaatgatggctgaagagtttttcccagatttacaagccactggagaccccttttttctgatacaatgcacgattctctgcgcgcaaggaccctcgactcacccccatgtttcagtgtcacagagacattctttgataaggaaatggcacaaacataaagggaaaggctgctaattttctttggcagattgtattggccagcaggaaagcaagctctccagagaatgcccccagttaaatacctcctctacctttacctaagttgctcctttatttttattttattattattattattattattattttttgagatggagtctcactttgtaacccaggctggaatgcaatggcatgatctcagctcactgcaacctccgcctcctgggttcaagcaagtctcctgcctcagcctccgagtagctgggactacaggtgcacgccaccacgcctggctaattttttgtattttagtagagacggggtttcaccgtgttgcccaggctggtcgcgaactcctgagctcaggcaatccgcccacctcagcctcccaaagtgttgggattacaggcatgagccaccatgcccagctgctcctttattttaatccctaaatataatccctaaatatagttatatttcatacttagtttgtttttaaaaagttttctctgtagaaaattttaatcattcataccctttacctttaggtttttctttctatacattcagtcaggcactgggatcatctgtttacaggcattatatttatttggcactcctggaacaagtatatctaacccattcttgatttttggactattcaggtgaactatttgaggggtatggggtctagaagttaaaagatacgcatgtcttctgttcttttcccgtatcaattcattccttcatctctttgccaagttgttttcctttcagggcctgtccttccagtttagaacagtaccatgaatcccacttgtgtcaatattaaagatagctgagaagcacctttcaaatggcacagtccctcttcaagatgtctaaaagaatggttatgtctgtccagttagggatttcacatccacatgtaatcatgtctgctgctgttgctacccaaattttcatttctccacattttgggtacttaagctaaaacgtaatggccacagtctgtaatccattcacattcctcagtttcaccacctccctcttccagactgcactctctgtcatcagtcccctcctttctaacagaaatggggttatgattttgaaggctgtgggttcagggagtctttgccaatcctgttggccctaaactatcaaggaggctccatttcaccatttgattttttgcatttcaggaggcaactgattgtttcgatatgtacatattactcacgtataccccatttccttccagtcagcccaacattttccaccagtctgtccccatctctgaaatccttccttctctttccccctaagtcttttgagtgtcatcatgtactggtggtttctcggttccatctcatccatttccttttcaatggagactacagcgtcagccagctcagccttggcttttaactcaatattccagtccataggggtggttaaaagttgctgcaaggctgcaggcactggcagtgggaagaggcagacgactagatgacttctgcacttttagctggttgaaaagtaccactcccactctgaacatctggccgtccctgcaaagagtgtactgtgcttgaagcagagcactcacacataaatggctgtgtgtggaattgcttgccaaagaagtttctagcctttccctttcccctaactgcatcagggaagaattcttatctctagcttggtttccacatgaggtttttctgagaagggcttgggacaagaagtctgtcatgttagttaagcaggcaagaaatcctactaatccagttttgtttgaaagttgtttgtccgtatgattttttaaaagtcaagtttaatttcaaaaaaccttttttttctgagattacttttggggtaatatttaaaatgagagacattttgtaaccctgtaaaatacatagggaatataacattccagtgtatacaaagaaggcaaattctttaatcaaataaagcgcattataaaatgagatgtttattggattattgactcactttggtgtctgcttgttgattcaggatgctgtaatgggacctaacattaaaaattaatgacatgttttttttaagagaaaaaaaac

SEQ ID NO: 434245 - DNA, 1886 bp, Homo sapiens
agacgtggcttggggccgccatcttggcaagaggcgaagcggcagcggttcctgtcaagggggcagcaggtccagagctgctggtgctcccgttccccagaccctacccctatccccagtggagccggagtgcgggcgcgccccaccaccgccctcaccatggtgctgttggcagcagcggtctgcacaaaagcaggaaaggctattgtttctcgacagtttgtggaaatgacccgaactcggattgagggcttattagcagcttttccaaagctcatgaacactggaaaacaacatacgtttgttgaaacagagagtgtaagatatgtctaccagcctatggagaaactgtatatggtactgatcactaccaaaaacagcaacattttagaagatttggagaccctaaggctcttctcaagagtgatccctgaatattgccgagccttagaagagaatgaaatatctgagcactgttttgatttgatttttgcttttgatgaaattgtcgcactgggataccgggagaatgttaacttggcacagatcagaaccttcacagaaatggattctcatgaggagaaggtgttcagagccgtcagagagactcaagaacgtgaagctaaggctgagatgcgtcgtaaagcaaaggaattacaacaggcccgaagagatgcagagagacagggcaaaaaagcaccaggatttggcggatttggcagctctgcagtatctggaggcagcacagctgccatgatcacagagaccatcattgaaactgataaaccaaaagtggcacctgcaccagccaggccttcaggccccagcaaggctttaaaacttggagccaaaggaaaggaagtagataactttgtggacaaattaaaatctgaaggtgaaaccatcatgtcctctagtatgggcaagcgtacttctgaagcaaccaaaatgcatgctccacccattaatatggaaagtgtacatatgaagattgaagaaaagataacattaacctgtggacgagacggaggattacagaatatggagttgcatggcatgatcatgcttaggatctcagatgacaagtatggccgaattcgtcttcatgtggaaaatgaagataagaaaggggtgcagctacagacccatccaaatgtggataaaaaacttttcactgcagagtctctaattggcctgaagaatccagagaagtcatttccagtcaacagtgacgtaggggtgctaaagtggagactacaaaccacagaggaatcttttattccactgacaattaattgctggccctcggagagtggaaatggctgtgatgtcaacatagaatatgagctacaagaagataatttagaactgaatgatgtggttatcaccatcccactcccgtctggtgtcggcgcgcctgttatcggtgagatcgatggggagtatcgacatgacagtcgacgaaataccctggagtggtgcctgcctgtgattgatgccaaaaataagagtggcagcctggagtttagcattgctgggcagcccaactttccctttcccctaactgcatcagggaagaattcttatctctagcttggtttccacatgaggtttttctgagaagggcttgggacaagaagtctgtcatgttagttaagcaggcaagaaatcctactaatccagttttgtttgaaagttgtttgtccgtatgattttttaaaagtcaagtttaatttcaaaaaaccttttttttctgagattacttttggggtaatatttaaaatgagagacattttgtaaccctgtaaaatacatagggaatataacattccagtgtatacaaagaaggcaaattctttaatcaaataaagcgcattataaaatga

SEQ ID NO: 434246 - DNA, 1657 bp, Homo sapiens
agacgtggcttggggccgccatcttggcaagaggcgaagcggcagcggttcctgtcaagggggcagcaggtccagagctgctggtgctcccgttccccagaccctacccctatccccagtggagccggagtgcgggcgcgccccaccaccgccctcaccatggtgctgttggcagcagcggtctgcacaaaagcaggaaaggctattgtttctcgacagtttgtggaaatgacccgaactcggattgagggcttattagcagcttttccaaagctcatgaacactggaaaacaacatacgtttgttgaaacagagagtgtaagatatgtctaccagcctatggagaaactgtatatggtactgatcactaccaaaaacagcaacattttagaagatttggagaccctaaggctcttctcaagagtgatccctgaatattgccgagccttagaagagaatgaaatatctgagcactgttttgatttgatttttgcttttgatgaaattgtcgcactgggataccgggagaatgttaacttggcacagatcagaaccttcacagaaatggattctcatgaggagaaggtgttcagagccgtcagagagactcaagaacgtgaagctaaggctgagatgcgtcgtaaagcaaaggaattacaacaggcccgaagagatgcagagagacagggcaaaaaagcaccaggatttggcggatttggcagctctgcagtatctggaggcagcacagctgccatgatcacagagaccatcattgaaactgataaaccaaaagtggcacctgcaccagccaggccttcaggccccagcaaggctttaaaacttggagccaaaggaaaggaagtagataactttgtggacaaattaaaatctgaaggtgaaaccatcatgtcctctagtatgggcaagcgtacttctgaagcaaccaaaatgcatgctccacccattaatatggaaagtgtacatatgaagattgaagaaaagataacattaacctgtggacgagacggaggattacagaatatggagttgcatggcatgatcatgcttaggatctcagatgacaagtatggccgaattcgtcttcatgtggaaaatgaagataagaaaggggtgcagctacagacccatccaaatgtggataaaaaacttttcactgcagagtctctaattggcctgaagaatccagagaagtcatttccagtcaacagtgacgtaggggtgctaaagtggagactacaaaccacagaggaatcttttattccactgacaattaattgctggccctcggagagtggaaatggctgtgatgtcaacatagaatatgagctacaagaagataatttagaactgaatgatgtggttatcaccatcccactcccgtctggtgtcggcgcgcctgttatcggtgagatcgatggggagtatcgacatgacagtcgacgaaataccctggagtggtgcctgcctgtgattgatgccaaaaataagagtggcagcctggagtttagcattgctgggcagcccaatttaaaatgagagacattttgtaaccctgtaaaatacatagggaatataacattccagtgtatacaaagaaggcaaattctttaatcaaataaagcgcattataaaatga

SEQ ID NO: 434247 - DNA, 688 bp, Homo sapiens
agacgtggcttggggccgccatcttggcaagaggcgaagcggcagcggttcctgtcaagggggcagcaggtccagagctgctggtgctcccgttccccagaccctacccctatccccagtggagccggagtgcgggcgcgccccaccaccgccctcaccatggtgctgttggcagcagcggtctgcacaaaagcaggaaaggctattgtttctcgacagtttgtggaaatgacccgaactcggattgagggcttattagcagcttttccaaagctcatgaacactggaaaacaacatacgtttgttgaaacagagagtgtaagatatgtctaccagcctatggagaaactgtatatggtactgatcactaccaaaaacagcaacattttagaagatttggtttccacatgaggtttttctgagaagggcttgggacaagaagtctgtcatgttagttaagcaggcaagaaatcctactaatccagttttgtttgaaagttgtttgtccgtatgattttttaaaagtcaagtttaatttcaaaaaaccttttttttctgagattacttttggggtaatatttaaaatgagagacattttgtaaccctgtaaaatacatagggaatataacattccagtgtatacaaagaaggcaaattctttaatcaaataaagcgcattataaaatga

SEQ ID NO: 434248 - DNA, 3852 bp, Homo sapiens
agacgtggcttggggccgccatcttggcaagaggcgaagcggcagcggttcctgtcaagggggcagcaggtccagagctgctggtgctcccgttccccagaccctacccctatccccagtggagccggagtgcgggcgcgccccaccaccgccctcaccatggtgctgttggcagcagcggtctgcacaaaagcaggaaaggctattgtttctcgacagtttgtggaaatgacccgaactcggattgagggcttattagcagcttttccaaagctcatgaacactggaaaacaacatacgtttgttgaaacagagagtgtaagatatgtctaccagcctatggagaaactgtatatggtactgatcactaccaaaaacagcaacattttagaagatttggagaccctaaggctcttctcaagagtgatccctgaatattgccgagccttagaagagaatgaaatatctgagcactgttttgatttgatttttgcttttgatgaaattgtcgcactgggataccgggagaatgttaacttggcacagatcagaaccttcacagaaatggattctcatgaggagaaggtgttcagagccgtcagagagactcaagaacgtgaagctaaggctgagatgcgtcgtaaagcaaaggaattacaacaggcccgaagagatgcagagagacagggcaaaaaagcaccaggatttggcggatttggcagctctgcagtatctggaggcagcacagctgccatgatcacagagaccatcattgaaactgataaaccaaaagtggcacctgcaccagccaggccttcaggccccagcaaggctttaaaacttggagccaaaggaaaggaagtagataactttgtggacaaattaaaatctgaaggtgaaaccatcatgtcctctagtatgggcaagcgtacttctgaagcaaccaaaatgcatgctccacccattaatatggaaagtgtacatatgaagattgaagaaaagataacattaacctgtggacgagacggaggattacagaatatggagttgcatggcatgatcatgcttaggatctcagatgacaagtatggccgaattcgtcttcatgtggaaaatgaagataagaaaggggtgcagctacagacccatccaaatgtggataaaaaacttttcactgcagagtctctaattggcctgaagaatccagagaagtcatttccagtcaacagtgacgtaggggtgctaaagtggagactacaaaccacagaggaatcttttattccactgacaattaattgctggccctcggagagtggaaatggctgtgatgtcaacatagaatatgagctacaagaagataatttagaactgaatgatgtggttatcaccatcccactcccgtctggtgtcggcgcgcctgttatcggtgagatcgatggggagtatcgacatgacagtcgacgaaataccctggagtggtgcctgcctgtgattgatgccaaaaataagagtggcagcctggagtttagcattgctgggcagcccaatgacttcttccctgttcaagtttcctttgtctccaagaaaaattactgtaacatacaggttaccaaagtgacccaggtagatggaaacagccccgtcaggttttccacagagaccactttcctagtggataagtatgaaattctgtaataccaagaagagggagctgaaaaggaaaattttcagattaataaagaagacgccaatgatggctgaagagtttttcccagatttacaagccactggagaccccttttttctgatacaatgcacgattctctgcgcgcaaggaccctcgactcacccccatgtttcagtgtcacagagacattctttgataaggaaatggcacaaacataaagggaaaggctgctaattttctttggcagattgtattggccagcaggaaagcaagctctccagagaatgcccccagttaaatacctcctctacctttacctaagttgctcctttatttttattttattattattattattattattattttttgagatggagtctcactttgtaacccaggctggaatgcaatggcatgatctcagctcactgcaacctccgcctcctgggttcaagcaagtctcctgcctcagcctccgagtagctgggactacaggtgcacgccaccacgcctggctaattttttgtattttagtagagacggggtttcaccgtgttgcccaggctggtcgcgaactcctgagctcaggcaatccgcccacctcagcctcccaaagtgttgggattacaggcatgagccaccatgcccagctgctcctttattttaatccctaaatataatccctaaatatagttatatttcatacttagtttgtttttaaaaagttttctctgtagatcaggcactgggatcatctgtttacaggcattatatttatttggcactcctggaacaagtatatctaacccattcttgatttttggactattcaggtgaactatttgaggggtatggggtctagaagttaaaagatacgcatgtcttctgttcttttcccgtatcaattcattccttcatctctttgccaagttgttttcctttcagggcctgtccttccagtttagaacagtaccatgaatcccacttgtgtcaatattaaagatagctgagaagcacctttcaaatggcacagtccctcttcaagatgtctaaaagaatggttatgtctgtccagttagggatttcacatccacatgtaatcatgtctgctgctgttgctacccaaattttcatttctccacattttgggtacttaagctaaaacgtaatggccacagtctgtaatccattcacattcctcagtttcaccacctccctcttccagactgcactctctgtcatcagtcccctcctttctaacagaaatggggttatgattttgaaggctgtgggttcagggagtctttgccaatcctgttggccctaaactatcaaggaggctccatttcaccatttgattttttgcatttcaggaggcaactgattgtttcgatatgtacatattactcacgtataccccatttccttccagtcagcccaacattttccaccagtctgtccccatctctgaaatccttccttctctttccccctaagtcttttgagtgtcatcatgtactggtggtttctcggttccatctcatccatttccttttcaatggagactacagcgtcagccagctcagccttggcttttaactcaatattccagtccataggggtggttaaaagttgctgcaaggctgcaggcactggcagtgggaagaggcagacgactagatgacttctgcacttttagctggttgaaaagtaccactcccactctgaacatctggccgtccctgcaaagagtgtactgtgcttgaagcagagcactcacacataaatggctgtgtgtggaattgcttgccaaagaagtttctagcctttccctttcccctaactgcatcagggaagaattcttatctctagcttggtttccacatgaggtttttctgagaagggcttgggacaagaagtctgtcatgttagttaagcaggcaagaaatcctactaatccagttttgtttgaaagttgtttgtccgtatgattttttaaaagtcaagtttaatttcaaaaaaccttttttttctgagattacttttggggtaatatttaaaatgagagacattttgtaaccctgtaaaatacatagggaatataacattccagtgtatacaaagaaggcaaattctttaatcaaataaagcgcattataaaatga

SEQ ID NO: 434249 - DNA, 3807 bp, Homo sapiens
gacattgcagcttgcgaacggggtgtccgactcagacgtgttggagctgccgttcagcagaccgtactcgtagtcggaccggaaccggtacgtaagcgcgtccctgagctgcggtaaccatggcgctgctgacagtaccagtctggaccctggccggagacggtctagcttcaggacggtctgcgtatacgaccactgctgcgatagggattagcagcttttccaaagctcatgaacactggaaaacaacatacgtttgttgaaacagagagtgtaagatatgtctaccagcctatggagaaactgtatatggtactgatcactaccatccctgaatattgccgagccttagaagagaatgaaatatctgagcactgttttgatttgatttttgcttttgatgaaattgtcgcactgggataccgggagaatgttaacttggcacagatcagaaccttcacagaaatggattctcatgaggagaaggtgttcagagccgtcagagagactcaagaacgtgaagctaaggctgagatgcgtcgtaaagcaaaggaattacaacaggcccgaagagatgcagagagacagggcaaaaaagcaccaggatttggcggatttggcagctctgcagtatctggaggcagcacagctgccatgatcacagagaccatcattgaaactgataaaccaaaagtggcacctgcaccagccaggccttcaggccccagcaaggctttaaaacttggagccaaaggaaaggaagtagataactttgtggacaaattaaaatctgaaggtgaaaccatcatgtcctctagtatgggcaagcgtacttctgaagcaaccaaaatgcatgctccacccattaatatggaaagtgtacatatgaagattgaagaaaagataacattaacctgtggacgagacggaggattacagaatatggagttgcatggcatgatcatgcttaggatctcagatgacaagtatggccgaattcgtcttcatgtggaaaatgaagataagaaaggggtgcagctacagacccatccaaatgtggataaaaaacttttcactgcagagtctctaattggcctgaagaatccagagaagtcatttccagtcaacagtgacgtaggggtgctaaagtggagactacaaaccacagaggaatcttttattccactgacaattaattgctggccctcggagagtggaaatggctgtgatgtcaacatagaatatgagctacaagaagataatttagaactgaatgatgtggttatcaccatcccactcccgtctggtgtcggcgcgcctgttatcggtgagatcgatggggagtatcgacatgacagtcgacgaaataccctggagtggtgcctgcctgtgattgatgccaaaaataagagtggcagcctggagtttagcattgctgggcagcccaatgacttcttccctgttcaagtttcctttgtctccaagaaaaattactgtaacatacaggttaccaaagtgacccaggtagatggaaacagccccgtcaggttttccacagagaccactttcctagtggataagtatgaaattctgtaataccaagaagagggagctgaaaaggaaaattttcagattaataaagaagacgccaatgatggctgaagagtttttcccagatttacaagccactggagaccccttttttctgatacaatgcacgattctctgcgcgcaaggaccctcgactcacccccatgtttcagtgtcacagagacattctttgataaggaaatggcacaaacataaagggaaaggctgctaattttctttggcagattgtattggccagcaggaaagcaagctctccagagaatgcccccagttaaatacctcctctacctttacctaagttgctcctttatttttattttattattattattattattattattttttgagatggagtctcactttgtaacccaggctggaatgcaatggcatgatctcagctcactgcaacctccgcctcctgggttcaagcaagtctcctgcctcagcctccgagtagctgggactacaggtgcacgccaccacgcctggctaattttttgtattttagtagagacggggtttcaccgtgttgcccaggctggtcgcgaactcctgagctcaggcaatccgcccacctcagcctcccaaagtgttgggattacaggcatgagccaccatgcccagctgctcctttattttaatccctaaatataatccctaaatatagttatatttcatacttagtttgtttttaaaaagttttctctgtagaaaattttaatcattcataccctttacctttaggtttttctttctatacattcagtcaggcactgggatcatctgtttacaggcattatatttatttggcactcctggaacaagtatatctaacccattcttgatttttggactattcaggtgaactatttgaggggtatggggtctagaagttaaaagatacgcatgtcttctgttcttttcccgtatcaattcattccttcatctctttgccaagttgttttcctttcagggcctgtccttccagtttagaacagtaccatgaatcccacttgtgtcaatattaaagatagctgagaagcacctttcaaatggcacagtccctcttcaagatgtctaaaagaatggttatgtctgtccagttagggatttcacatccacatgtaatcatgtctgctgctgttgctacccaaattttcatttctccacattttgggtacttaagctaaaacgtaatggccacagtctgtaatccattcacattcctcagtttcaccacctccctcttccagactgcactctctgtcatcagtcccctcctttctaacagaaatggggttatgattttgaaggctgtgggttcagggagtctttgccaatcctgttggccctaaactatcaaggaggctccatttcaccatttgattttttgcatttcaggaggcaactgattgtttcgatatgtacatattactcacgtataccccatttccttccagtcagcccaacattttccaccagtctgtccccatctctgaaatccttccttctctttccccctaagtcttttgagtgtcatcatgtactggtggtttctcggttccatctcatccatttccttttcaatggagactacagcgtcagccagctcagccttggcttttaactcaatattccagtccataggggtggttaaaagttgctgcaaggctgcaggcactggcagtgggaagaggcagacgactagatgacttctgcacttttagctggttgaaaagtaccactcccactctgaacatctggccgtccctgcaaagagtgtactgtgcttgaagcagagcactcacacataaatggctgtgtgtggaattgcttgccaaagaagtttctagcctttccctttcccctaactgcatcagggaagaattcttatctctagcttggtttccacatgaggtttttctgagaagggcttgggacaagaagtctgtcatgttagttaagcaggcaagaaatcctactaatccagttttgtttgaaagttgtttgtccgtatgattttttaaaagtcaagtttaatttcaaaaaaccttttttttctgagattacttttggggtaatatttaaaatgagagacattttgtaaccctgtaaaatacatagggaatataacattccagtgtatacaaagaaggcaaattctttaatcaaataaagcgcattataaaatga

SEQ ID NO: 434250 - DNA, 4453 bp, Homo sapiens
agacgtggcttggggccgccatcttggcaagaggcgaagcggcagcggttcctgtcaagggggcagcaggtccagagctgctggtgctcccgttccccagaccctacccctatccccagtggagccggagtgcgggcgcgccccaccaccgccctcaccatggtgctgttggcagcagcggtctgcacaaaagcaggaaaggctattgtttctcgacagtttgtggaaatgacccgaactcggattgagggcttattagcagcttttccaaagctcatgaacactggaaaacaacatacgtttgttgaaacagagagtgtaagatatgtctaccagcctatggagaaactgtatatggtactgatcactaccaaaaacagcaacattttagaagatttggagaccctaaggctcttctcaagagtgatccctgaatattgccgagccttagaagagaatgaaatatctgagcactgttttgatttgatttttgcttttgatgaaattgtcgcactgggataccgggagaatgttaacttggcacagatcagaaccttcacagaaatggattctcatgaggagaaggtgttcagagccgtcagagagactcaagaacgtgaagctaaggctgagatgcgtcgtaaagcaaaggaattacaacaggcccgaagagatgcagagagacagggcaaaaaagcaccaggatttggcggatttggcagctctgcagtatctggaggcagcacagctgccatgatcacagagaccatcattgaaactgataaaccaaaagtggcacctgcaccagccaggccttcaggccccagcaaggctttaaaacttggagccaaaggaaaggaagtagataactttgtggacaaattaaaatctgaaggtgaaaccatcatgtcctctagtatgggcaagcgtacttctgaagcaaccaaaatgcatgctccacccattaatatggaaagtgtacatatgaagattgaagaaaagataacattaacctgtggacgagacggaggattacagaatatggagttgcatggcatgatcatgcttaggatctcagatgacaagtatggccgaattcgtcttcatgtggaaaatgaagataagaaaggggtgcagctacagacccatccaaatgtggataaaaaacttttcactgcagagtctctaattggcctgaagaatccagagaagtcatttccagtcaacagtgacgtaggggtgctaaagtggagactacaaaccacagaggaatcttttattccactgacaattaattgctggccctcggagagtggaaatggctgtgatgtcaacatagaatatgagctacaagaagataatttagaactgaatgatgtggttatcaccatcccactcccgtctggtgtcggcgcgcctgttatcggtgagatcgatggggagtatcgacatgacagtcgacgaaataccctggagtggtgcctgcctgtgattgatgccaaaaataagagtggcagcctggagtttagcattgctgggcagcccaatgacttcttccctgttcaagtttcctttgtctccaagaaaaattactgtaacatacaggttaccaaagtgacccaggtagatggaaacagccccgtcaggttttccacagagaccactttcctagtggataagtatgaaattctgtaataccaagaagagggagctgaaaaggaaaattttcagattaataaagaagacgccaatgatggctgaagagtttttcccagatttacaagccactggagaccccttttttctgatacaatgcacgattctctgcgcgcaaggaccctcgactcacccccatgtttcagtgtcacagagacattctttgataaggaaatggcacaaacataaagggaaaggctgctaattttctttggcagattgtattggccagcaggaaagcaagctctccagagaatgcccccagttaaatacctcctctacctttacctaagttgctcctttatttttattttattattattattattattattattttttgagatggagtctcactttgtaacccaggctggaatgcaatggcatgatctcagctcactgcaacctccgcctcctgggttcaagcaagtctcctgcctcagcctccgagtagctgggactacaggtgcacgccaccacgcctggctaattttttgtattttagtagagacggggtttcaccgtgttgcccaggctggtcgcgaactcctgagctcaggcaatccgcccacctcagcctcccaaagtgttgggattacaggcatgagccaccatgcccagctgctcctttattttaatccctaaatataatccctaaatatagttatatttcatacttagtttgtttttaaaaagttttctctgtagaaaattttaatcattcataccctttacctttaggtttttctttctatacattcagtcaggcactgggatcatctgtttacaggcattatatttatttggcactcctggaacaagtatatctaacccattcttgatttttggactattcaggtgaactatttgaggggtatggggtctagaagttaaaagatacgcatgtcttctgttcttttcccgtatcaattcattccttcatctctttgccaagttgttttcctttcagggcctgtccttccagtttagaacagtaccatgaatcccacttgtgtcaatattaaagatagctgagaagcacctttcaaatggcacagtccctcttcaagatgtctaaaagaatggttatgtctgtccagttagggatttcacatccacatgtaatcatgtctgctgctgttgctacccaaattttcatttctccacattttgggtacttaagctaaaacgtaatggccacagtctgtaatccattcacattcctcagtttcaccacctccctcttccagactgcactctctgtcatcagtcccctcctttctaacagaaatggggttatgattttgaaggctgtgggttcagggagtctttgccaatcctgttggccctaaactatcaaggaggctccatttcaccatttgattttttgcatttcaggaggcaactgattgtttcgatatgtacatattactcacgtataccccatttccttccagtcagcccaacattttccaccagtctgtccccatctctgaaatccttccttctctttccccctaagtcttttgagtgtcatcatgtactggtggtttctcggttccatctcatccatttccttttcaatggagactacagcgtcagccagctcagccttggcttttaactcaatattccagtccataggggtggttaaaagttgctgcaaggctgcaggcactggcagtgggaagaggcagacgactagatgacttctgcacttttagctggttgaaaagtaccactcccactctgaacatctggccgtccctgcaaagagtgtactgtgcttgaagcagagcactcacacataaatggctgtgtgtggaattgcttgccaaagaagtttctagcctttccctttcccctaactgcatcagggaagaattcttatctctagcttggtttccacatgaggtttttctgagaagggcttgggacaagaagtctgtcatgttagttaagcaggcaagaaatcctactaatccagttttgtttgaaagttgtttgtccgtatgattttttaaaagtcaagtttaatttcaaaaaaccttttttttctgagattacttttggggtaatatttaaaatgagagacattttgtaaccctgtaaaatacatagggaatataacattccagtgtatacaaagaaggcaaattctttaatcaaataaagcgcattataaaatgaaaaaaaaaaaaaaaaaaaaaaaaaaaagggggggggggaaaaaatagtcctccccaagagagggcgccaaagaaagtcacaggcgatccccaggatctctggtgcaaccacaggggcgcccccaaaatagagagacgcgcgcggattatatatagcgcagagggcaacgtagtgcgacagcgacggttaacaaacacggcgtcagcagacgtggaacaacaccgcggcaccaagccgtggggcacaaccgtggggcgcaaaacggggaacaccaataaacccccggggcgcggatgcggcccgactacagggggggacgccaaagaactaaaccaacaaaacaagcaacgaattctagaaaaagcgccccaaacggagacgggagatacacaaccatccgagcaatgttgtagcacagagagcaggctaaacgacagaggggcggcgagcacacgccacaaagagagcaagcacaatcagatgcccgggcgaagggggcacggacaacaagagatctgagagcgcagcgaagccagggagcaacaag

SEQ ID NO: 434251 - DNA, 2204 bp, Homo sapiens
agacgtggcttggggccgccatcttggcaagaggcgaagcggcagcggttcctgtcaagggggcagcaggtccagagctgctggtgctcccgttccccagaccctacccctatccccagtggagccggagtgcgggcgcgccccaccaccgccctcaccatggtgctgttggcagcagcggtctgcacaaaagcaggaaaggctattgtttctcgacagtttgtggaaatgacccgaactcggattgagggcttattagcagcttttccaaagctcatgaacactggaaaacaacatacgtttgttgaaacagagagtgtaagatatgtctaccagcctatggagaaactgtatatggtactgatcactaccaaaaacagcaacattttagaagatttggagaccctaaggctcttctcaagagtgatccctgaatattgccgagccttagaagagaatgaaatatctgagcactgttttgatttgatttttgcttttgatgaaattgtcgcactgggataccgggagaatgttaacttggcacagatcagaaccttcacagaaatggattctcatgaggagaaggtgttcagagccgtcagagagactcaagaacgtgaagctaaggctgagatgcgtcgtaaagcaaaggaattacaacaggcccgaagagatgcagagagacagggcaaaaaagcaccaggatttggcggatttggcagctctgcagtatctggaggcagcacagctgccatgatcacagagaccatcattgaaactgataaaccaaaagtggcacctgcaccagccaggccttcaggccccagcaaggctttaaaacttggagccaaaggaaaggaagtagataactttgtggacaaattaaaatctgaaggtgaaaccatcatgtcctctagtatgggcaagcgtacttctgaagcaaccaaaatgcatgctccacccattaatatggaaagtgtacatatgaagattgaagaaaagataacattaacctgtggacgagacggaggattacagaatatggagttgcatggcatgatcatgcttaggatctcagatgacaagtatggccgaattcgtcttcatgtggaaaatgaagataagaaaggggtgcagctacagacccatccaaatgtggataaaaaacttttcactgcagagtctctaattggcctgaagaatccagagaagtcatttccagtcaacagtgacgtaggggtgctaaagtggagactacaaaccacagaggaatcttttattccactgacaattaattgctggccctcggagagtggaaatggctgtgatgtcaacatagaatatgagctacaagaagataatttagaactgaatgatgtggttatcaccatcccactcccgtctggtgtcggcgcgcctgttatcggtgagatcgatggggagtatcgacatgacagtcgacgaaataccctggagtggtgcctgcctgtgattgatgccaaaaataagagtggcagcctggagtttagcattgctgggcagcccaatgacttcttccctgttcaagtttcctttgtctccaagaaaaattactgtaacatacaggtactccattttagttgagaacatatatagggaaagtggtaggacagtaggaacacgtataggatgccagacaggtagcatggctttttgtggtcagataaagctcagaaaaaaactgatgtctcctacaggaattccctttctaattcattgtatgatcgtggtcaaattcttttattgctttacctcagttttcctctctagatcagacaaagtaaagaaatggaatgttaatacagataaaagtacttgtggattatgcaagattcataaacacttagttgcctgtttttttttaaccttatatattttaaagtcgatttgccaaaacaccccaacacatggtttttttaaggccttgctgtcacttgatttatacccaaagaatgaaattgttttatttagaagacaaaattactacaaaaaaaaaatccattctattacaaatggaaattatttgagggttatttatgtcacagctccctttattagtacaaataatcatgagccaattctgttgcaaactctgtcctttaggtaggcaaagcaatggagatgtgtgagctgttccttcggatttttttttttttttttttttt

SEQ ID NO: 434252 - DNA, 1000 bp, Homo sapiens
agacgtggcttggggccgccatcttggcaagaggcgaagcggcagcggttcctgtcaagggggcagcaggtccagagctgctggtgctcccgttccccagaccctacccctatccccagtggagccggagtgcgggcgcgccccaccaccgccctcaccatggtgctgttggcagcagcggtctgcacaaaagcaggaaaggctattgtttctcgacagtttgtggaaatgacccgaactcggattgagggcttattagcagcttttccaaagctcatgaacactggaaaacaacatacgtttgttgaaacagagagtgtaagatatgtctaccagcctatggagaaactgtatatggtactgatcactaccaaaaacagcaacattttagaagatttggagaccctaaggctcttctcaagagtgatccctgaatattgccgagccttagaagagaatgaaatatctgagcactgttttgatttgatttttgcttttgatgaaattgtcgcactgggataccgggagaatgttaacttggcacagatcagaaccttcacagaaatggattctcatgaggagaaggtgttcagagccgtcagagagactcaagaacgtgaagctaaggctgagatgcgtcgtaaagcaaaggaattacaacaggcccgaagagatgcagagagacagggcaaaaaagcaccaggatttggcggatttggcagctctgcagtatctggaggcagcacagctgccatgatcacagagaccatcattgaaactgataaaccaaaagtggcacctgcaccagccaggccttcaggaaggcgcaggaattcagaaaactctaaagcttggaaatgctatcgtttgtgccacaaagattaccctgaaaaggtagagagaggtcaaaaagcagaaccaaattggggattttcaaaggctgctctctaacagagtttaaaatatccgtaaacataagtgcttctgctccctccccttg

SEQ ID NO: 434253 - DNA, 8213 bp, Homo sapiens
tttgattatagggggcagtctgtctggaaattggtaaaacccacacattttatatgtgcttatatgtagttctattaagacctatgttaaactctggtgggataattccgtggcactttcacataatttaaattatgccatgtaagagtcactaaacccttatatacttcagtatgaatcctgtacattgcccaagaccttgttaagagaatgtaaattaaatataaattggagtatcagtgtaaaagtgacattctaaatgttcctcactctgcgaggcttattttttagggactttgctataattctgaaagacttagttttacagtacatctgaaagtaggagttttcagaagtatggctcttgggataaatttagattcttaattgtgaagctctgttaccacttgttagaaggcaggtcagctcacctgcttggggaggtaaatatatgaatgcactctcgagtaatttaatggagccctacctcaatgtacagaatgacagtatcacagatcaagaatggagtacgagtgattttcggctatggtgggggtaggtaggtcattgtcccctattgtctcttactatttgtaaagtgaagactacgattagtctttttcatcgggatggtttgagatgaatacagaataggctcggcaatttggatactttaggcttttcaagaacattagtaacattttttttagatatttctcctaatacaatgagtgttgtgaaataacatggcagttattgttgagagaaaagccttcccagttatgtattgagtccttaggcgttttgaccttccctccactcttacagaacttggtggaaggggccactatgttttctacctccttccgtgcctttcacaaagccacatcctgcaccgtctacccttctctgtggatatttttccgcttggcaatttcctttcctgaggcacccacttgggacatctgaatctccatcttcatgttgatggcccgtttgtgcttggacgtgttcttccacttgagactgagggttcatgtaatcaaagaagtttctttgttgtgtgtatctttacagaacacaacaggaattgaaaatgaatcagaacactactgagcctgtggcggccaccgagaccctggctgaggtacccgaacatgtgctgcgaggacttccggaggaagtgaggcttttcccttctgctgttgacaagacccggattggtgtctgggccactaaaccaattttaaaaggcaaaaaatttgggccatttgttggtgataagaaaaaaagatctcaggttaagaataatgtatacatgtgggaggtgtattacccaaatttgggatggatgtgcattgatgccactgatccagagaagggaaactggctgcgatatgtgaattgggcttgctcaggagaagagcaaaatttattcccactggaaatcaacagagccatttactataaaactttaaagccaatcgcgccgggcgaggagctcctggtctggtacaatggggaagacaaccctgagatagcagctgcgattgaggaagagcgagccagcgcccggagcaagcggagctcccccaagagccggaaagggaagaaaaaatcccaggaaaataaaaacaaaggaaacaaaatccaagacatacaactgaagacaagtgagccagatttcacctctgcaaatatgagagattctgcagaaggtcctaaagaagacgaagagaagccttcagcctcagcacttgagcagccggccaccctccaggaggtggccagtcaggaggtgcctccagaactagcaacccctgcccctgcctgggagccacagccagaaccagacgagcgattagaagcggcagcttgtgaggtgaatgatttgggggaagaggaggaggaggaagaggaggaggatgaagaagaagaagaagatgatgatgatgatgagttggaagacgagggggaagaagaagccagcatgccaaatgaaaattctgtgaaagagccagaaatacggtgtgatgagaagccagaagatttattagaggaaccaaaaacaacttcagaagaaactcttgaagactgctcagaggtaacacctgccatgcaaatccccagaactaaagaagaggccaatggtgatgtatttgaaacgtttatgtttccgtgtcaacattgtgaaaggaagtttacaaccaaacaggggcttgagcgtcacatgcatatccatatatccaccgtcaatcatgctttcaaatgcaagtactgtgggaaagcctttggcacacagattaaccggcggcgacatgagcggcgccatgaagcagggttaaagcggaaacccagccaaacactacagccgtcagaggatctggctgatggcaaagcatctggagaaaacgttgcttcaaaagatgattcgagtcctcccagtcttgggccagactgtctgatcatgaattcagagaaggcttcccaagacacaataaattcttctgtcgtagaagagaatggggaagttaaagaacttcatccgtgcaaatattgtaaaaaggtttttggaactcatactaatatgagacggcatcagcgtagagttcacgaacgtcatctgattcccaaaggtgtacggcgaaaaggaggccttgaagagccccagcctccagcagaacaggcccaggccacccagaacgtgtatgtaccaagcacagagccggaggaggaaggggaagcagatgatgtgtacatcatggacatttctagcaatatctctgaaaacttaaattactatattgatggtaaaattcaaactaataacaacactagtaactgtgatgtgattgagatggagtctgcttcggcagatttgtatggtataaattgtctgctcactccagttacagtggaaattactcaaaatataaagaccacacaggtccctgtaacagaagatcttcctaaagagcctttgggcagcacaaatagtgaggccaagaagcggagaactgcgagcccacctgcactgcccaaaattaaggccgaaacagactctgaccccatggtcccctcttgctctttaagtcttcctcttagcatatcaacaacagaggcagtgtctttccacaaagagaaaagtgtttatttgtcatcaaagctcaaacaacttcttcaaacccaagataaactaactcctcctgcagggatttcagcaactgaaatagctaaattaggtcctgtttgtgtgtctgctcctgcatcaatgttgcctgtgacctcaagtaggtttaagaggcggaccagctctcctcccagttctccacagcacagtcctgcccttcgagactttggaaagccaagtgatgggaaagcagcatggaccgatgccgggctgacttccaaaaaatccaaattagaaagtcacagcgactcaccagcatggagtttgtctgggagagatgagagagaaactgtgagccctccatgctttgatgaatataaaatgtctaaagagtggacagctagttctgcttttagcagtgtgtgcaaccagcagccactggatttatccagcggtgtcaaacagaaggctgagggtacaggcaagactccagtccagtgggaatctgtcttagatctcagtgtgcataaaaagcattgtagtgactctgaaggcaaggaattcaaagaaagtcattcagtgcagcctacgtgtagtgctgtaaagaaaaggaaaccaaccacctgcatgctgcagaaggttcttctcaatgaatataatggcatcgatttacctgtagaaaaccctgcagatgggaccaggagcccaagtccttgtaaatccctagaagctcagccagatcctgacctcggtccgggctctggtttccctgcccctactgttgagtccacacctgatgtttgtccttcatcacctgccctgcagacaccctccctttcatccggtcagctgcctcctctcttgatccccacagatccctcttcccctccaccctgtcccccggtattaactgttgccactccgccccctcccctccttcctaccgtacctcttccagccccctcttccagtgcatctccacacccatgcccctctccactctcaaatgccaccgcacagtccccacttccaattctgtccccaacagtgtccccctctccctctcccattcctcccgtggagcccctgatgtctgccgcctcacccgggcctccaacactttcttcttcctcctcttcatcttcctcctcctcttcgttttcttcttcatcttcctcctcttctccttctccacctcctctctccgcaatatcatctgttgtttcctctggtgataatctggaggcttctctccccatgatatctttcaaacaggaggaattagagaatgaaggtctgaaacccagggaagagccccagtctgctgctgaacaggatgttgttgttcaggaaacattcaacaaaaactttgtttgcaacgtctgtgaatcaccttttctttccattaaagatctaaccaaacatttatctattcatgctgaagaatggcccttcaaatgtgaattttgtgtgcagctttttaaggataaaacggacttgtcagaacatcgctttttgcttcatggagttgggaatatctttgtgtgttctgtttgtaaaaaagaatttgcttttttgtgcaatttgcagcagcaccagcgagatctccacccagataaggtgtgcacacatcacgagtttgaaagcgggactctgaggccccagaactttacagatcccagcaaggcccatgtagagcatatgcagagcttgccagaagatcctttagaaacttctaaagaagaagaggagttaaatgattcctctgaagagctttacacgactataaaaataatggcttctggaataaagacaaaagatccagatgttcgattgggcctcaatcagcattacccaagctttaaaccacctccatttcagtaccatcaccgtaaccccatggggattggtgtgacagccacaaatttcactacacacaatattccacagactttcactaccgccattcgctgcacaaagtgtggaaaaggtgtcgacaatatgccggagttgcacaaacatatcctggcttgtgcttctgcaagtgacaagaagaggtacacgcctaagaaaaacccagtaccattaaaacaaactgtgcaacccaaaaatggcgtggtggttttagataactctgggaaaaatgccttccgacgaatgggacagcccaaaaggcttaactttagtgttgagctcagcaaaatgtcgtcgaataagctcaaattaaatgcattgaagaaaaaaaatcagctagtacagaaagcaattcttcagaaaaacaaatctgcaaagcagaaggccgacttgaaaaatgcttgtgagtcatcctctcacatctgcccttactgtaatcgagagttcacttacattggaagcctgaataaacacgccgccttcagctgtcccaaaaaacccctttctcctcccaaaaaaaaagtttctcattcatctaagaaaggtggacactcatcacctgcaagtagtgacaaaaacagtaacagcaaccaccgcagacggacagcggatgcggagattaaaatgcaaagcatgcagactccgttgggcaagaccagagcccgcagctcaggccccacccaagtcccacttccctcctcatccttcaggtccaagcagaacgtcaagtttgcagcttcggtgaaatccaaaaaaccaagctcctcctctttaaggaactccagcccgataagaatggccaaaataactcatgttgaggggaaaaaacctaaagctgtggccaagaatcattctgctcagctttccagcaaaacatcacggagcctgcacgtgagggtacagaaaagcaaagctgttttacaaagcaaatccaccttggcgagtaagaaaagaacagaccggttcaatataaaatctagagagcggagtggggggccagtcacccggagccttcagctggcagctgctgctgacttgagtgagaacaagagagaggacggcagcgccaagcaggagctgaaggacttcagctacagcctccgcttggcgtcccgatgctctccaccagcggccccgtacatcaccaggcagtataggaaggtcaaagctccggctgcagcccagttccagggaccattcttcaaagagtagacactctggctgctccctgacagcacctgaagtgacctggaatcagtgaagccaaagggactggcagtctgccctgcagggagtaccgacctatcccagttgtgtgaggctgcgagagaaagggagtgcatgtgcgcgcgtgcatgtgtgcgtgcgtgtgtgttcacgtgttctcgtgcgggcgcgtgagtggtcttcaaacgagggtcccgaaccccggggcggcaggaagggggccgactccacgctgtcctttgggatgatacttggatgcagctcttgggaccgtgttctgcagcccagccttcctgttggggtggggcctctcctactatgcaatttttcaagagctccttgaccctgctttttgcttcttgagttgtcttttgccattatggggactttggtttgacccaggggtcagccctttaggaaggccttcaggaggaggccgagttccccttcagtaccacccctctctccccaccttccctctcccggcaacatctctgggaatcaacagcatattgacacgttggagccgagcctgaacatgcccctcggccccagcacatggaaaacccccttccttgcctaaggtgtctgagtttctggctcttgaggcatttccagacttgaaattctcatcagtccattgctcttgagtctttgcagagaacctcagatcaggtgcacctgggagaaagactttgtccccacttacagatctatctcctcccttgggaagggcagggaatggggacggtgtatggaggggagggatctcctgcgcccttcattgccacacttggtgggaccatgaacatctttagtgtctgagcttctcaaattagctgcaataggaaaaaacaaattgggaaatggaaaaaaaatgggaagattaaaaagcacagggggaagaagaagagatttcggaggccatcctgccagggggggacggggctgactcctgctctctggaggacggtcagtccatgtctcggagaaacgggtgagctgagcttggcgtttggacccagttcagtgaggttcttgggttttgtgcctttggggcagactccagacaaggatgtctgagaccacttgggctctgttttctcagctccaatttcaagagtgagctatcaaacccagagcggaaggagggagctctgatgagcacggtttgtcacacgataaagggattttttttttcagggctactacggttgatcttgcaactctgtaaatatgtatgtagacacttttaaaagcacgtatttatgtccctgactgtaaatgctccatttttaaagttttataacttgtgttatttaatgagtcagtcaatcggctgcagtacgggatctgataaggatctaggagaagggtctcatgcggaccctcacatgggcagaaaaatggtggtcattggccgacatcacagttttcctgtttcccacccagctaaaaaccgttgtttgctttaaattttcataaactggaatcctttcacccgctcctacagctaaccctcacaagcatgaagtgctgtggctgttccttatcctaatgatgcgcttttgtcccgtaaatgttaacactcatgaagcataccccggcctctcagttcttgagggcctccccaccgcagcagcaaggaaagctcacgaaccccaaacctggcaagtcacctgcagcccatggtgagctctgggaagtgtggttgaggccttggggtcactccttttttgcatgtgcaaatgtgctggtcacccttcaacgctcccagacggtcaggaaaactgttccaatcatgaaaaggggggatgattttgtaaaagtggcatttcctggtcagtggtggtcttcaagacgacagctctgtatctgccatgtgaagagaattaacaataaaagtgtgaagagcgattgtgaggaacaagcctgggagtga

SEQ ID NO: 434254 - DNA, 2736 bp, Homo sapiens
cggccgcgggcgccggggccggcgaaacagcggcggcggcggcggccctcggtgctctgaggcgctggcgcggcgggcgcggggttcatgtaatcaaagaagtttctttgttgtgtgtatctttacagaacacaacaggaattgaaaatgaatcagaacactactgagcctgtggcggccaccgagaccctggctgaggtacccgaacatgtgctgcgaggacttccggaggaagtgaggcttttcccttctgctgttgacaagacccggattggtgtctgggccactaaaccaattttaaaaggcaaaaaatttgggccatttgttggtgataagaaaaaaagatctcaggttaagaataatgtatacatgtgggaggtgtattacccaaatttgggatggatgtgcattgatgccactgatccagagaagggaaactggctgcgatatgtgaattgggcttgctcaggagaagagcaaaatttattcccactggaaatcaacagagccatttactataaaactttaaagccaatcgcgccgggcgaggagctcctggtctggtacaatggggaagacaaccctgagatagcagctgcgattgaggaagagcgagccagcgcccggagcaagcggagctcccccaagagccggaaagctacagcctccgcttggcgtcccgatgctctccaccagcggccccgtacatcaccaggcagtataggaaggtcaaagctccggctgcagcccagttccagggaccattcttcaaagagtagacactctggctgctccctgacagcacctgaagtgacctggaatcagtgaagccaaagggactggcagtctgccctgcagggagtaccgacctatcccagttgtgtgaggctgcgagagaaagggagtgcatgtgcgcgcgtgcatgtgtgcgtgcgtgtgtgttcacgtgttctcgtgcgggcgcgtgagtggtcttcaaacgagggtcccgaaccccggggcggcaggaagggggccgactccacgctgtcctttgggatgatacttggatgcagctcttgggaccgtgttctgcagcccagccttcctgttggggtggggcctctcctactatgcaatttttcaagagctccttgaccctgctttttgcttcttgagttgtcttttgccattatggggactttggtttgacccaggggtcagccctttaggaaggccttcaggaggaggccgagttccccttcagtaccacccctctctccccaccttccctctcccggcaacatctctgggaatcaacagcatattgacacgttggagccgagcctgaacatgcccctcggccccagcacatggaaaacccccttccttgcctaaggtgtctgagtttctggctcttgaggcatttccagacttgaaattctcatcagtccattgctcttgagtctttgcagagaacctcagatcaggtgcacctgggagaaagactttgtccccacttacagatctatctcctcccttgggaagggcagggaatggggacggtgtatggaggggagggatctcctgcgcccttcattgccacacttggtgggaccatgaacatctttagtgtctgagcttctcaaattagctgcaataggaaaaaacaaattgggaaatggaaaaaaaatgggaagattaaaaagcacagggggaagaagaagagatttcggaggccatcctgccagggggggacggggctgactcctgctctctggaggacggtcagtccatgtctcggagaaacgggtgagctgagcttggcgtttggacccagttcagtgaggttcttgggttttgtgcctttggggcagactccagacaaggatgtctgagaccacttgggctctgttttctcagctccaatttcaagagtgagctatcaaacccagagcggaaggagggagctctgatgagcacggtttgtcacacgataaagggattttttttttcagggctactacggttgatcttgcaactctgtaaatatgtatgtagacacttttaaaagcacgtatttatgtccctgactgtaaatgctccatttttaaagttttataacttgtgttatttaatgagtcagtcaatcggctgcagtacgggatctgataaggatctaggagaagggtctcatgcggaccctcacatgggcagaaaaatggtggtcattggccgacatcacagttttcctgtttcccacccagctaaaaaccgttgtttgctttaaattttcataaactggaatcctttcacccgctcctacagctaaccctcacaagcatgaagtgctgtggctgttccttatcctaatgatgcgcttttgtcccgtaaatgttaacactcatgaagcataccccggcctctcagttcttgagggcctccccaccgcagcagcaaggaaagctcacgaaccccaaacctggcaagtcacctgcagcccatggtgagctctgggaagtgtggttgaggccttggggtcactccttttttgcatgtgcaaatgtgctggtcacccttcaacgctcccagacggtcaggaaaactgttccaatcatgaaaaggggggatgattttgtaaaagtggcatttcctggtcagtggtggtcttcaagacgacagctctgtatctgccatgtgaagagaattaacaataaaagtgtgaagagcgattgtgaggaacaagcctgggagtga

SEQ ID NO: 434255 - DNA, 6674 bp, Homo sapiens
cggccgcgggcgccggggccggcgaaacagcggcggcggcggcggccctcggtgctctgaggcgctggcgcggcgggcgcggaacactactgagcctgtggcggccaccgagaccctggctgaggtacccgaacatgtgctgcgaggacttccggaggaagtgaggcttttcccttctgctgttgacaagacccggattggtgtctgggccactaaaccaattttaaaaggcaaaaaatttgggccatttgttggtgataagaaaaaaagatctcaggttaagaataatgtatacatgtgggaggtgtattacccaaatttgggatggatgtgcattgatgccactgatccagagaagggaaactggctgcgatatgtgaattgggcttgctcaggagaagagcaaaatttattcccactggaaatcaacagagccatttactataaaactttaaagccaatcgcgccgggcgaggagctcctggtctggtacaatggggaagacaaccctgagatagcagctgcgattgaggaagagcgagccagcgcccggagcaagcggagctcccccaagagccggaaagggaagaaaaaatcccaggaaaataaaaacaaaggaaacaaaatccaagacatacaactgaagacaagtgagccagatttcacctctgcaaatatgagagattctgcagaaggtcctaaagaagacgaagagaagccttcagcctcagcacttgagcagccggccaccctccaggaggtggccagtcaggaggtgcctccagaactagcaacccctgcccctgcctgggagccacagccagaaccagacgagcgattagaagcggcagcttgtgaggtgaatgatttgggggaagaggaggaggaggaagaggaggaggatgaagaagaagaagaagatgatgatgatgatgagttggaagacgagggggaagaagaagccagcatgccaaatgaaaattctgtgaaagagccagaaatacggtgtgatgagaagccagaagatttattagaggaaccaaaaacaacttcagaagaaactcttgaagactgctcagaggtaacacctgccatgcaaatccccagaactaaagaagaggccaatggtgatgtatttgaaacgtttatgtttccgtgtcaacattgtgaaaggaagtttacaaccaaacaggggcttgagcgtcacatgcatatccatatatccaccgtcaatcatgctttcaaatgcaagtactgtgggaaagcctttggcacacagattaaccggcggcgacatgagcggcgccatgaagcagggttaaagcggaaacccagccaaacactacagccgtcagaggatctggctgatggcaaagcatctggagaaaacgttgcttcaaaagatgattcgagtcctcccagtcttgggccagactgtctgatcatgaattcagagaaggcttcccaagacacaataaattcttctgtcgtagaagagaatggggaagttaaagaacttcatccgtgcaaatattgtaaaaaggtttttggaactcatactaatatgagacggcatcagcgtagagttcacgaacgtcatctgattcccaaaggtgtacggcgaaaaggaggccttgaagagccccagcctccagcagaacaggcccaggccacccagaacgtgtatgtaccaagcacagagccggaggaggaaggggaagcagatgatgtgtacatcatggacatttctagcaatatctctgaaaacttaaattactatattgatggtaaaattcaaactaataacaacactagtaactgtgatgtgattgagatggagtctgcttcggcagatttgtatggtataaattgtctgctcactccagttacagtggaaattactcaaaatataaagaccacacaggtccctgtaacagaagatcttcctaaagagcctttgggcagcacaaatagtgaggccaagaagcggagaactgcgagcccacctgcactgcccaaaattaaggccgaaacagactctgaccccatggtcccctcttgctctttaagtcttcctcttagcatatcaacaacagaggcagtgtctttccacaaagagaaaagtgtttatttgtcatcaaagctcaaacaacttcttcaaacccaagataaactaactcctcctgcagggatttcagcaactgaaatagctaaattaggtcctgtttgtgtgtctgctcctgcatcaatgttgcctgtgacctcaagtaggtttaagaggcggaccagctctcctcccagttctccacagcacagtcctgcccttcgagactttggaaagccaagtgatgggaaagcagcatggaccgatgccgggctgacttccaaaaaatccaaattagaaagtcacagcgactcaccagcatggagtttgtctgggagagatgagagagaaactgtgagccctccatgctttgatgaatataaaatgtctaaagagtggacagctagttctgcttttagcagtgtgtgcaaccagcagccactggatttatccagcggtgtcaaacagaaggctgagggtacaggcaagactccagtccagtgggaatctgtcttagatctcagtgtgcataaaaagcattgtagtgactctgaaggcaaggaattcaaagaaagtcattcagtgcagcctacgtgtagtgctgtaaagaaaaggaaaccaaccacctgcatgctgcagaaggttcttctcaatgaatataatggcatcgatttacctgtagaaaaccctgcagatgggaccaggagcccaagtccttgtaaatccctagaagctcagccagatcctgacctcggtccgggctctggtttccctgcccctactgttgagtccacacctgatgtttgtccttcatcacctgccctgcagacaccctccctttcatccggtcagctgcctcctctcttgatccccacagatccctcttcccctccaccctgtcccccggtattaactgttgccactccgccccctcccctccttcctaccgtacctcttccagccccctcttccagtgcatctccacacccatgcccctctccactctcaaatgccaccgcacagtccccacttccaattctgtccccaacagtgtccccctctccctctcccattcctcccgtggagcccctgatgtctgccgcctcacccgggcctccaacactttcttcttcctcctcttcatcttcctcctcctcttcgttttcttcttcatcttcctcctcttctccttctccacctcctctctccgcaatatcatctgttgtttcctctggtgataatctggaggcttctctccccatgatatctttcaaacaggaggaattagagaatgaaggtctgaaacccagggaagagccccagtctgctgctgaacaggatgttgttgttcaggaaacattcaacaaaaactttgtttgcaacgtctgtgaatcaccttttctttccattaaagatctaaccaaacatttatctattcatgctgaagaatggcccttcaaatgtgaattttgtgtgcagctttttaaggataaaacggacttgtcagaacatcgctttttgcttcatggagttgggaatatctttgtgtgttctgtttgtaaaaaagaatttgcttttttgtgcaatttgcagcagcaccagcgagatctccacccagataaggtgtgcacacatcacgagtttgaaagcgggactctgaggccccagaactttacagatcccagcaaggcccatgtagagcatatgcagagcttgccagaagatcctttagaaacttctaaagaagaagaggagttaaatgattcctctgaagagctttacacgactataaaaataatggcttctggaataaagacaaaagatccagatgttcgattgggcctcaatcagcattacccaagctttaaaccacctccatttcagtaccatcaccgtaaccccatggggattggtgtgacagccacaaatttcactacacacaatattccacagactttcactaccgccattcgctgcacaaagtgtggaaaaggtgtcgacaatatgccggagttgcacaaacatatcctggcttgtgcttctgcaagtgacaagaagaggtacacgcctaagaaaaacccagtaccattaaaacaaactgtgcaacccaaaaatggcgtggtggttttagataactctgggaaaaatgccttccgacgaatgggacagcccaaaaggcttaactttagtgttgagctcagcaaaatgtcgtcgaataagctcaaattaaatgcattgaagaaaaaaaatcagctagtacagaaagcaattcttcagaaaaacaaatctgcaaagcagaaggccgacttgaaaaatgcttgtgagtcatcctctcacatctgcccttactgtaatcgagagttcacttacattggaagcctgaataaacacgccgccttcagctgtcccaaaaaacccctttctcctcccaaaaaaaaagtttctcattcatctaagaaaggtggacactcatcacctgcaagtagtgacaaaaacagtaacagcaaccaccgcagacggacagcggatgcggagattaaaatgcaaagcatgcagactccgttgggcaagaccagagcccgcagctcaggccccacccaagtcccacttccctcctcatccttcaggtccaagcagaacgtcaagtttgcagcttcggtgaaatccaaaaaaccaagctcctcctctttaaggaactccagcccgataagaatggccaaaataactcatgttgaggggaaaaaacctaaagctgtggccaagaatcattctgctcagctttccagcaaaacatcacggagcctgcacgtgagggtacagaaaagcaaagctgttttacaaagcaaatccaccttggcgagtaagaaaagaacagaccggttcaatataaaatctagagagcggagtggggggccagtcacccggagccttcagctggcagctgctgctgacttgagtgagaacaagagagaggacggcagcgccaagcaggagctgaaggacttcaggaacttcctgtagaaaagcccccaaaacaaaacaaaccttaattgactaaaaagtattgcatgctcaacttaggataagcactacggcaaaggatacgaaatctaccaagcttgcaagaccagttgaagctgactcaaaaatcctaacattcagctgattgccggcaggcttagagtcaggcatctgctgcttcggtgggggcccaacgcgcatgctgggcgcccgggtgattgagatccaaagagaagggcactgtaagacaggccagatgaactggctcctcgtcatgggactggtacctcagatctgagcatggcccttgtttttggcacgtagcagagaaaggattgatttgaacttaaccttgcaaagcaagttgcctgttttagcagtagtttgttgtaggtttcagggatgacagatttggatgcactcatttaaaacgttttggtcacatatcagctcttgatgcctttcttttaaattaattatagacagagagaggcatttagctgatctcttacccctggtatttcttttttttgttgttttcgtttttttaaatcacaagtagattgccagcgtaatggagaggaaaccagattggatatggactcttttttatgcctattctggtgttgcgtttgtatatccaaatggacgttatcctctcagattcttatctggcactaatttataactattatattatcagagactatgtagcaatatatcagtgcacaggcgcatcccaggcctgtacagatgtatgtctacacgtaagtataaatgaatttgcataccaggttttacacttgcatctctaatagagattaaaaacaacaaattggcctcttcctaagtatattaatatcatttatccttacattttatgcctccccctaaattaatgactgagttggtggaaagcggctaggttttattcatactgttttttgttctcaacttcaaaagtaatctacctctgaaaaatttgtagtttaatatttgtttggtgaatttgtgccactttaatccttccactatcattcccattttgttacatttctgttatggggactttatgttgaaatattgtataaagcatttgtagcaatttaaaaataaaatatttaaaattatttaaattgttttggacgcttcaattgtattatatgtgatttacatttcactttttttgttggcgttgttaacccggagagtgctcctgtattgaactttgctgttagttattttattgcttctttttggagagtgctataaaagactattctaatgaaaacattaaaatttacaatttgacatacaaaaaggggttgtccattgattttaaccaatgtagcactgagagagagagaggttaattatagatagacaagagtggtgtttgttgtttttcccctcccagcattgaaatcattggggcttgtcagatgtattaaaaaaagatttgttgtgctattgctgcaaacacttaataactagaggagaatttaaacaatgcattttatattattgtaaccaataaaaaactttctaa

SEQ ID NO: 434256 - DNA, 6748 bp, Homo sapiens
cggccgcgggcgccggggccggcgaaacagcggcggcggcggcggccctcggtgctctgaggcgctggcgcggcgggcgcggggttcatgtaatcaaagaagtttctttgttgtgtgtatctttacagaacacaacaggaattgaaaatgaatcagaacactactgagcctgtggcggccaccgagaccctggctgaggtacccgaacatgtgctgcgaggacttccggaggaagtgaggcttttcccttctgctgttgacaagacccggattggtgtctgggccactaaaccaattttaaaaggcaaaaaatttgggccatttgttggtgataagaaaaaaagatctcaggttaagaataatgtatacatgtgggaggtgtattacccaaatttgggatggatgtgcattgatgccactgatccagagaagggaaactggctgcgatatgtgaattgggcttgctcaggagaagagcaaaatttattcccactggaaatcaacagagccatttactataaaactttaaagccaatcgcgccgggcgaggagctcctggtctggtacaatggggaagacaaccctgagatagcagctgcgattgaggaagagcgagccagcgcccggagcaagcggagctcccccaagagccggaaagggaagaaaaaatcccaggaaaataaaaacaaaggaaacaaaatccaagacatacaactgaagacaagtgagccagatttcacctctgcaaatatgagagattctgcagaaggtcctaaagaagacgaagagaagccttcagcctcagcacttgagcagccggccaccctccaggaggtggccagtcaggaggtgcctccagaactagcaacccctgcccctgcctgggagccacagccagaaccagacgagcgattagaagcggcagcttgtgaggtgaatgatttgggggaagaggaggaggaggaagaggaggaggatgaagaagaagaagaagatgatgatgatgatgagttggaagacgagggggaagaagaagccagcatgccaaatgaaaattctgtgaaagagccagaaatacggtgtgatgagaagccagaagatttattagaggaaccaaaaacaacttcagaagaaactcttgaagactgctcagaggtaacacctgccatgcaaatccccagaactaaagaagaggccaatggtgatgtatttgaaacgtttatgtttccgtgtcaacattgtgaaaggaagtttacaaccaaacaggggcttgagcgtcacatgcatatccatatatccaccgtcaatcatgctttcaaatgcaagtactgtgggaaagcctttggcacacagattaaccggcggcgacatgagcggcgccatgaagcagggttaaagcggaaacccagccaaacactacagccgtcagaggatctggctgatggcaaagcatctggagaaaacgttgcttcaaaagatgattcgagtcctcccagtcttgggccagactgtctgatcatgaattcagagaaggcttcccaagacacaataaattcttctgtcgtagaagagaatggggaagttaaagaacttcatccgtgcaaatattgtaaaaaggtttttggaactcatactaatatgagacggcatcagcgtagagttcacgaacgtcatctgattcccaaaggtgtacggcgaaaaggaggccttgaagagccccagcctccagcagaacaggcccaggccacccagaacgtgtatgtaccaagcacagagccggaggaggaaggggaagcagatgatgtgtacatcatggacatttctagcaatatctctgaaaacttaaattactatattgatggtaaaattcaaactaataacaacactagtaactgtgatgtgattgagatggagtctgcttcggcagatttgtatggtataaattgtctgctcactccagttacagtggaaattactcaaaatataaagaccacacaggtccctgtaacagaagatcttcctaaagagcctttgggcagcacaaatagtgaggccaagaagcggagaactgcgagcccacctgcactgcccaaaattaaggccgaaacagactctgaccccatggtcccctcttgctctttaagtcttcctcttagcatatcaacaacagaggcagtgtctttccacaaagagaaaagtgtttatttgtcatcaaagctcaaacaacttcttcaaacccaagataaactaactcctcctgcagggatttcagcaactgaaatagctaaattaggtcctgtttgtgtgtctgctcctgcatcaatgttgcctgtgacctcaagtaggtttaagaggcggaccagctctcctcccagttctccacagcacagtcctgcccttcgagactttggaaagccaagtgatgggaaagcagcatggaccgatgccgggctgacttccaaaaaatccaaattagaaagtcacagcgactcaccagcatggagtttgtctgggagagatgagagagaaactgtgagccctccatgctttgatgaatataaaatgtctaaagagtggacagctagttctgcttttagcagtgtgtgcaaccagcagccactggatttatccagcggtgtcaaacagaaggctgagggtacaggcaagactccagtccagtgggaatctgtcttagatctcagtgtgcataaaaagcattgtagtgactctgaaggcaaggaattcaaagaaagtcattcagtgcagcctacgtgtagtgctgtaaagaaaaggaaaccaaccacctgcatgctgcagaaggttcttctcaatgaatataatggcatcgatttacctgtagaaaaccctgcagatgggaccaggagcccaagtccttgtaaatccctagaagctcagccagatcctgacctcggtccgggctctggtttccctgcccctactgttgagtccacacctgatgtttgtccttcatcacctgccctgcagacaccctccctttcatccggtcagctgcctcctctcttgatccccacagatccctcttcccctccaccctgtcccccggtattaactgttgccactccgccccctcccctccttcctaccgtacctcttccagccccctcttccagtgcatctccacacccatgcccctctccactctcaaatgccaccgcacagtccccacttccaattctgtccccaacagtgtccccctctccctctcccattcctcccgtggagcccctgatgtctgccgcctcacccgggcctccaacactttcttcttcctcctcttcatcttcctcctcctcttcgttttcttcttcatcttcctcctcttctccttctccacctcctctctccgcaatatcatctgttgtttcctctggtgataatctggaggcttctctccccatgatatctttcaaacaggaggaattagagaatgaaggtctgaaacccagggaagagccccagtctgctgctgaacaggatgttgttgttcaggaaacattcaacaaaaactttgtttgcaacgtctgtgaatcaccttttctttccattaaagatctaaccaaacatttatctattcatgctgaagaatggcccttcaaatgtgaattttgtgtgcagctttttaaggataaaacggacttgtcagaacatcgctttttgcttcatggagttgggaatatctttgtgtgttctgtttgtaaaaaagaatttgcttttttgtgcaatttgcagcagcaccagcgagatctccacccagataaggtgtgcacacatcacgagtttgaaagcgggactctgaggccccagaactttacagatcccagcaaggcccatgtagagcatatgcagagcttgccagaagatcctttagaaacttctaaagaagaagaggagttaaatgattcctctgaagagctttacacgactataaaaataatggcttctggaataaagacaaaagatccagatgttcgattgggcctcaatcagcattacccaagctttaaaccacctccatttcagtaccatcaccgtaaccccatggggattggtgtgacagccacaaatttcactacacacaatattccacagactttcactaccgccattcgctgcacaaagtgtggaaaaggtgtcgacaatatgccggagttgcacaaacatatcctggcttgtgcttctgcaagtgacaagaagaggtacacgcctaagaaaaacccagtaccattaaaacaaactgtgcaacccaaaaatggcgtggtggttttagataactctgggaaaaatgccttccgacgaatgggacagcccaaaaggcttaactttagtgttgagctcagcaaaatgtcgtcgaataagctcaaattaaatgcattgaagaaaaaaaatcagctagtacagaaagcaattcttcagaaaaacaaatctgcaaagcagaaggccgacttgaaaaatgcttgtgagtcatcctctcacatctgcccttactgtaatcgagagttcacttacattggaagcctgaataaacacgccgccttcagctgtcccaaaaaacccctttctcctcccaaaaaaaaagtttctcattcatctaagaaaggtggacactcatcacctgcaagtagtgacaaaaacagtaacagcaaccaccgcagacggacagcggatgcggagattaaaatgcaaagcatgcagactccgttgggcaagaccagagcccgcagctcaggccccacccaagtcccacttccctcctcatccttcaggtccaagcagaacgtcaagtttgcagcttcggtgaaatccaaaaaaccaagctcctcctctttaaggaactccagcccgataagaatggccaaaataactcatgttgaggggaaaaaacctaaagctgtggccaagaatcattctgctcagctttccagcaaaacatcacggagcctgcacgtgagggtacagaaaagcaaagctgttttacaaagcaaatccaccttggcgagtaagaaaagaacagaccggttcaatataaaatctagagagcggagtggggggccagtcacccggagccttcagctggcagctgctgctgacttgagtgagaacaagagagaggacggcagcgccaagcaggagctgaaggacttcaggaacttcctgtagaaaagcccccaaaacaaaacaaaccttaattgactaaaaagtattgcatgctcaacttaggataagcactacggcaaaggatacgaaatctaccaagcttgcaagaccagttgaagctgactcaaaaatcctaacattcagctgattgccggcaggcttagagtcaggcatctgctgcttcggtgggggcccaacgcgcatgctgggcgcccgggtgattgagatccaaagagaagggcactgtaagacaggccagatgaactggctcctcgtcatgggactggtacctcagatctgagcatggcccttgtttttggcacgtagcagagaaaggattgatttgaacttaaccttgcaaagcaagttgcctgttttagcagtagtttgttgtaggtttcagggatgacagatttggatgcactcatttaaaacgttttggtcacatatcagctcttgatgcctttcttttaaattaattatagacagagagaggcatttagctgatctcttacccctggtatttcttttttttgttgttttcgtttttttaaatcacaagtagattgccagcgtaatggagaggaaaccagattggatatggactcttttttatgcctattctggtgttgcgtttgtatatccaaatggacgttatcctctcagattcttatctggcactaatttataactattatattatcagagactatgtagcaatatatcagtgcacaggcgcatcccaggcctgtacagatgtatgtctacacgtaagtataaatgaatttgcataccaggttttacacttgcatctctaatagagattaaaaacaacaaattggcctcttcctaagtatattaatatcatttatccttacattttatgcctccccctaaattaatgactgagttggtggaaagcggctaggttttattcatactgttttttgttctcaacttcaaaagtaatctacctctgaaaaatttgtagtttaatatttgtttggtgaatttgtgccactttaatccttccactatcattcccattttgttacatttctgttatggggactttatgttgaaatattgtataaagcatttgtagcaatttaaaaataaaatatttaaaattatttaaattgttttggacgcttcaattgtattatatgtgatttacatttcactttttttgttggcgttgttaacccggagagtgctcctgtattgaactttgctgttagttattttattgcttctttttggagagtgctataaaagactattctaatgaaaacattaaaatttacaatttgacatacaaaaaggggttgtccattgattttaaccaatgtagcactgagagagagagaggttaattatagatagacaagagtggtgtttgttgtttttcccctcccagcattgaaatcattggggcttgtcagatgtattaaaaaaagatttgttgtgctattgctgcaaacacttaataactagaggagaatttaaacaatgcattttatattattgtaaccaataaaaaactttctaa

SEQ ID NO: 434257 - DNA, 6609 bp, Homo sapiens
cggccgcgggcgccggggccggcgaaacagcggcggcggcggcggccctcggtgctctgaggcgctggcgcggcgggcgcggaacactactgagcctgtggcggccaccgagaccctggctgaggtacccgaacatgtgctgcgaggacttccggaggaagtgaggcttttcccttctgctgttgacaagacccggattggtgtctgggccactaaaccaattttaaaaggcaaaaaatttgggccatttgttggtgataagaaaaaaagatctcaggttaagaataatgtatacatgtgggaggtgtattacccaaatttgggatggatgtgcattgatgccactgatccagagaagggaaactggctgcgatatgtgaattgggcttgctcaggagaagagcaaaatttattcccactggaaatcaacagagccatttactataaaactttaaagccaatcgcgccgggcgaggagctcctggtctggtacaatggggaagacaaccctgagatagcagctgcgattgaggaagagcgagccagcgcccggagcaagcggagctcccccaagagccggaaagggaagaaaaaatcccaggaaaataaaaacaaaggaaacaaaatccaagacatacaactgaagacaagtgagccagatttcacctctgcaaatatgagagattctgcagaaggtcctaaagaagacgaagagaagccttcagcctcagcacttgagcagccggccaccctccaggaggtggccagtcaggaggtgcctccagaactagcaacccctgcccctgcctgggagccacagccagaaccagacgagcgattagaagcggcagcttgtgaggtgaatgatttgggggaagaggaggaggaggaagaggaggaggatgaagaagaagaagaagatgatgatgatgatgagttggaagacgagggggaagaagaagccagcatgccaaatgaaaattctgtgaaagagccagaaatacggtgtgatgagaagccagaagatttattagaggaaccaaaaacaacttcagaagaaactcttgaagactgctcagaggtaacacctgccatgcaaatccccagaactaaagaagaggccaatggtgatgtatttgaaacgtttatgtttccgtgtcaacattgtgaaaggaagtttacaaccaaacaggggcttgagcgtcacatgcatatccatatatccaccgtcaatcatgctttcaaatgcaagtactgtgggaaagcctttggcacacagattaaccggcggcgacatgagcggcgccatgaagcagggttaaagcggaaacccagccaaacactacagccgtcagaggatctggctgatggcaaagcatctggagaaaacgttgcttcaaaagatgattcgagtcctcccagtcttgggccagactgtctgatcatgaattcagagaaggcttcccaagacacaataaattcttctgtcgtagaagagaatggggaagttaaagaacttcatccgtgcaaatattgtaaaaaggtttttggaactcatactaatatgagacggcatcagcgtagagttcacgaacgtcatctgattcccaaaggtgtacggcgaaaaggaggccttgaagagccccagcctccagcagaacaggcccaggccacccagaacgtgtatgtaccaagcacagagccggaggaggaaggggaagcagatgatgtgtacatcatggacatttctagcaatatctctgaaaacttaaattactatattgatggtaaaattcaaactaataacaacactagtaactgtgatgtgattgagatggagtctgcttcggcagatttgtatggtataaattgtctgctcactccagttacagtggaaattactcaaaatataaagaccacacaggtccctgtaacagaagatcttcctaaagagcctttgggcagcacaaatagtgaggccaagaagcggagaactgcgagcccacctgcactgcccaaaattaaggccgaaacagactctgaccccatggtcccctcttgctctttaagtcttcctcttagcatatcaacaacagaggcagtgtctttccacaaagagaaaagtgtttatttgtcatcaaagctcaaacaacttcttcaaacccaagataaactaactcctcctgcagggatttcagcaactgaaatagctaaattaggtcctgtttgtgtgtctgctcctgcatcaatgttgcctgtgacctcaagtaggtttaagaggcggaccagctctcctcccagttctccacagcacagtcctgcccttcgagactttggaaagccaagtgatgggaaagcagcatggaccgatgccgggctgacttccaaaaaatccaaattagaaagtcacagcgactcaccagcatggagtttgtctgggagagatgagagagaaactgtgagccctccatgctttgatgaatataaaatgtctaaagagtggacagctagttctgcttttagcagtgtgtgcaaccagcagccactggatttatccagcggtgtcaaacagaaggctgagggtacaggcaagactccagtccagtgggaatctgtcttagatctcagtgtgcataaaaagcattgtagtgactctgaaggcaaggaattcaaagaaagtcattcagtgcagcctacgtgtagtgctgtaaagaaaaggaaaccaaccacctgcatgctgcagaaggttcttctcaatgaatataatggcatcgatttacctgtagaaaaccctgcagatgggaccaggagcccaagtccttgtaaatccctagaagctcagccagatcctgacctcggtccgggctctggtttccctgcccctactgttgagtccacacctgatgtttgtccttcatcacctgccctgcagacaccctccctttcatccggtcagctgcctcctctcttgatccccacagatccctcttcccctccaccctgtcccccggtattaactgttgccactccgccccctcccctccttcctaccgtacctcttccagccccctcttccagtgcatctccacacccatgcccctctccactctcaaatgccaccgcacagtccccacttccaattctgtccccaacagtgtccccctctccctctcccattcctcccgtggagcccctgatgtctgccgcctcacccgggcctccaacactttcttcttcctcctcttcatcttcctcctcctcttcgttttcttcttcatcttcctcctcttctccttctccacctcctctctccgcaatatcatctgttgtttcctctggtgataatctggaggcttctctccccatgatatctttcaaacaggaggaattagagaatgaaggtctgaaacccagggaagagccccagtctgctgctgaacaggatgttgttgttcaggaaacattcaacaaaaactttgtttgcaacgtctgtgaatcaccttttctttccattaaagatctaaccaaacatttatctattcatgctgaagaatggcccttcaaatgtgaattttgtgtgcagctttttaaggataaaacggacttgtcagaacatcgctttttgcttcatggagttgggaatatctttgtgtgttctgtttgtaaaaaagaatttgcttttttgtgcaatttgcagcagcaccagcgagatctccacccagataaggtgtgcacacatcacgagtttgaaagcgggactctgaggccccagaactttacagatcccagcaaggcccatgtagagcatatgcagagcttgccagaagatcctttagaaacttctaaagaagaagaggagttaaatgattcctctgaagagctttacacgactataaaaataatggcttctggaataaagacaaaagatccagatgttcgattgggcctcaatcagcattacccaagctttaaaccacctccatttcagtaccatcaccgtaaccccatggggattggtgtgacagccacaaatttcactacacacaatattccacagactttcactaccgccattcgctgcacaaagtgtggaaaaggtgtcgacaatatgccggagttgcacaaacatatcctggcttgtgcttctgcaagtgacaagaagaggtacacgcctaagaaaaacccagtaccattaaaacaaactgtgcaacccaaaaatggcgtggtggttttagataactctgggaaaaatgccttccgacgaatgggacagcccaaaaggcttaactttagtgttgagctcagcaaaatgtcgtcgaataagctcaaattaaatgcattgaagaaaaaaaatcagctagtacagaaagcaattcttcagaaaaacaaatctgcaaagcagaaggccgacttgaaaaatgcttgtgagtcatcctctcacatctgcccttactgtaatcgagagttcacttacattggaagcctgaataaacacgccgccttcagctgtcccaaaaaacccctttctcctcccaaaaaaaaagtttctcattcatctaagaaaggtggacactcatcacctgcaagtagtgacaaaaacagtaacagcaaccaccgcagacggacagcggatgcggagattaaaatgcaaagcatgcagactccgttgggcaagaccagagcccgcagctcaggccccacccaagtcccacttccctcctcatccttcaggtccaagcagaacgtcaagtttgcagcttcggtgaaatccaaaaaaccaagctcctcctctttaaggaactccagcccgataagaatggccaaaataactcatgttgaggggaaaaaacctaaagctgtggccaagaatcattctgctcagctttccagcaaaacatcacggagcctgcacgtgagggtacagaaaagcaaagctgttttacaaagcaaatccaccttggcgagtaagaaaagaacagaccggttcaatataaaatctagagagcggagtggggggccagtcacccggagccttcagctggcagctgctgctgacttgagtgagaacaagagagaggacggcagcgccaagcaggagctgaaggacttcaggaacttcctgtagaaaagcccccaaaacaaaacaaaccttaattgactaaaaagtattgcatgctcaacttaggataagcactacggcaaaggatacgaaatctaccaagcttgcaagaccagttgaagctgactcaaaaatcctaacattcagctgattgccggcaggcttagagtcaggcatctgctgcttcggtgggggcccaacgcgcatgctgggcgcccgggtgattgagatccaaagagaagggcactgtaagacaggccagatgaactggctcctcgtcatgggactggtacctcagatctgagcatggcccttgtttttggcacgtagcagagaaaggattgatttgaacttaaccttgcaaagcaagttgcctgttttagcagtagtttgttgtaggtttcagggatgacagatttggatgcactcatttaaaacgttttgatctcttacccctggtatttcttttttttgttgttttcgtttttttaaatcacaagtagattgccagcgtaatggagaggaaaccagattggatatggactcttttttatgcctattctggtgttgcgtttgtatatccaaatggacgttatcctctcagattcttatctggcactaatttataactattatattatcagagactatgtagcaatatatcagtgcacaggcgcatcccaggcctgtacagatgtatgtctacacgtaagtataaatgaatttgcataccaggttttacacttgcatctctaatagagattaaaaacaacaaattggcctcttcctaagtatattaatatcatttatccttacattttatgcctccccctaaattaatgactgagttggtggaaagcggctaggttttattcatactgttttttgttctcaacttcaaaagtaatctacctctgaaaaatttgtagtttaatatttgtttggtgaatttgtgccactttaatccttccactatcattcccattttgttacatttctgttatggggactttatgttgaaatattgtataaagcatttgtagcaatttaaaaataaaatatttaaaattatttaaattgttttggacgcttcaattgtattatatgtgatttacatttcactttttttgttggcgttgttaacccggagagtgctcctgtattgaactttgctgttagttattttattgcttctttttggagagtgctataaaagactattctaatgaaaacattaaaatttacaatttgacatacaaaaaggggttgtccattgattttaaccaatgtagcactgagagagagagaggttaattatagatagacaagagtggtgtttgttgtttttcccctcccagcattgaaatcattggggcttgtcagatgtattaaaaaaagatttgttgtgctattgctgcaaacacttaataactagaggagaatttaaacaatgcattttatattattgtaaccaataaaaaactttctaa

SEQ ID NO: 434258 - DNA, 6912 bp, Homo sapiens
cggccgcgggcgccggggccggcgaaacagcggcggcggcggcggccctcggtgctctgaggcgctggcgcggcgggcgcggaacactactgagcctgtggcggccaccgagaccctggctgaggtacccgaacatgtgctgcgaggacttccggaggaagtgaggcttttcccttctgctgttgacaagacccggattggtgtctgggccactaaaccaattttaaaaggcaaaaaatttgggccatttgttggtgataagaaaaaaagatctcaggttaagaataatgtatacatgtgggaggtgtattacccaaatttgggatggatgtgcattgatgccactgatccagagaagggaaactggctgcgatatgtgaattgggcttgctcaggagaagagcaaaatttattcccactggaaatcaacagagccatttactataaaactttaaagccaatcgcgccgggcgaggagctcctggtctggtacaatggggaagacaaccctgagatagcagctgcgattgaggaagagcgagccagcgcccggagcaagcggagctcccccaagagccggaaagggaagaaaaaatcccaggaaaataaaaacaaaggaaacaaaatccaagacatacaactgaagacaagtgagccagatttcacctctgcaaatatgagagattctgcagaaggtcctaaagaagacgaagagaagccttcagcctcagcacttgagcagccggccaccctccaggaggtggccagtcaggaggtgcctccagaactagcaacccctgcccctgcctgggagccacagccagaaccagacgagcgattagaagcggcagcttgtgaggtgaatgatttgggggaagaggaggaggaggaagaggaggaggatgaagaagaagaagaagatgatgatgatgatgagttggaagacgagggggaagaagaagccagcatgccaaatgaaaattctgtgaaagagccagaaatacggtgtgatgagaagccagaagatttattagaggaaccaaaaacaacttcagaagaaactcttgaagactgctcagaggtaacacctgccatgcaaatccccagaactaaagaagaggccaatggtgatgtatttgaaacgtttatgtttccgtgtcaacattgtgaaaggaagtttacaaccaaacaggggcttgagcgtcacatgcatatccatatatccaccgtcaatcatgctttcaaatgcaagtactgtgggaaagcctttggcacacagattaaccggcggcgacatgagcggcgccatgaagcagggttaaagcggaaacccagccaaacactacagccgtcagaggatctggctgatggcaaagcatctggagaaaacgttgcttcaaaagatgattcgagtcctcccagtcttgggccagactgtctgatcatgaattcagagaaggcttcccaagacacaataaattcttctgtcgtagaagagaatggggaagttaaagaacttcatccgtgcaaatattgtaaaaaggtttttggaactcatactaatatgagacggcatcagcgtagagttcacgaacgtcatctgattcccaaaggtgtacggcgaaaaggaggccttgaagagccccagcctccagcagaacaggcccaggccacccagaacgtgtatgtaccaagcacagagccggaggaggaaggggaagcagatgatgtgtacatcatggacatttctagcaatatctctgaaaacttaaattactatattgatggtaaaattcaaactaataacaacactagtaactgtgatgtgattgagatggagtctgcttcggcagatttgtatggtataaattgtctgctcactccagttacagtggaaattactcaaaatataaagaccacacaggtccctgtaacagaagatcttcctaaagagcctttgggcagcacaaatagtgaggccaagaagcggagaactgcgagcccacctgcactgcccaaaattaaggccgaaacagactctgaccccatggtcccctcttgctctttaagtcttcctcttagcatatcaacaacagaggcagtgtctttccacaaagagaaaagtgtttatttgtcatcaaagctcaaacaacttcttcaaacccaagataaactaactcctcctgcagggatttcagcaactgaaatagctaaattaggtcctgtttgtgtgtctgctcctgcatcaatgttgcctgtgacctcaagtaggtttaagaggcggaccagctctcctcccagttctccacagcacagtcctgcccttcgagactttggaaagccaagtgatgggaaagcagcatggaccgatgccgggctgacttccaaaaaatccaaattagaaagtcacagcgactcaccagcatggagtttgtctgggagagatgagagagaaactgtgagccctccatgctttgatgaatataaaatgtctaaagagtggacagctagttctgcttttagcagtgtgtgcaaccagcagccactggatttatccagcggtgtcaaacagaaggctgagggtacaggcaagactccagtccagtgggaatctgtcttagatctcagtgtgcataaaaagcattgtagtgactctgaaggcaaggaattcaaagaaagtcattcagtgcagcctacgtgtagtgctgtaaagaaaaggaaaccaaccacctgcatgctgcagaaggttcttctcaatgaatataatggcatcgatttacctgtagaaaaccctgcagatgggaccaggagcccaagtccttgtaaatccctagaagctcagccagatcctgacctcggtccgggctctggtttccctgcccctactgttgagtccacacctgatgtttgtccttcatcacctgccctgcagacaccctccctttcatccggtcagctgcctcctctcttgatccccacagatccctcttcccctccaccctgtcccccggtattaactgttgccactccgccccctcccctccttcctaccgtacctcttccagccccctcttccagtgcatctccacacccatgcccctctccactctcaaatgccaccgcacagtccccacttccaattctgtccccaacagtgtccccctctccctctcccattcctcccgtggagcccctgatgtctgccgcctcacccgggcctccaacactttcttcttcctcctcttcatcttcctcctcctcttcgttttcttcttcatcttcctcctcttctccttctccacctcctctctccgcaatatcatctgttgtttcctctggtgataatctggaggcttctctccccatgatatctttcaaacaggaggaattagagaatgaaggtctgaaacccagggaagagccccagtctgctgctgaacaggatgttgttgttcaggaaacattcaacaaaaactttgtttgcaacgtctgtgaatcaccttttctttccattaaagatctaaccaaacatttatctattcatgctgaagaatggcccttcaaatgtgaattttgtgtgcagctttttaaggataaaacggacttgtcagaacatcgctttttgcttcatggagttgggaatatctttgtgtgttctgtttgtaaaaaagaatttgcttttttgtgcaatttgcagcagcaccagcgagatctccacccagataaggtgtgcacacatcacgagtttgaaagcgggactctgaggccccagaactttacagatcccagcaaggcccatgtagagcatatgcagagcttgccagaagatcctttagaaacttctaaagaagaagaggagttaaatgattcctctgaagagctttacacgactataaaaataatggcttctggaataaagacaaaagatccagatgttcgattgggcctcaatcagcattacccaagctttaaaccacctccatttcagtaccatcaccgtaaccccatggggattggtgtgacagccacaaatttcactacacacaatattccacagactttcactaccgccattcgctgcacaaagtgtggaaaaggtgtcgacaatatgccggagttgcacaaacatatcctggcttgtgcttctgcaagtgacaagaagaggtacacgcctaagaaaaacccagtaccattaaaacaaactgtgcaacccaaaaatggcgtggtggttttagataactctgggaaaaatgccttccgacgaatgggacagcccaaaaggcttaactttagtgttgagctcagcaaaatgtcgtcgaataagctcaaattaaatgcattgaagaaaaaaaatcagctagtacagaaagcaattcttcagaaaaacaaatctgcaaagcagaaggccgacttgaaaaatgcttgtgagtcatcctctcacatctgcccttactgtaatcgagagttcacttacattggaagcctgaataaacacgccgccttcagctgtcccaaaaaacccctttctcctcccaaaaaaaaagtttctcattcatctaagaaaggtggacactcatcacctgcaagtagtgacaaaaacagtaacagcaaccaccgcagacggacagcggatgcggagattaaaatgcaaagcatgcagactccgttgggcaagaccagagcccgcagctcaggccccacccaagtcccacttccctcctcatccttcaggtccaagcagaacgtcaagtttgcagcttcggtgaaatccaaaaaaccaagctcctcctctttaaggaactccagcccgataagaatggccaaaataactcatgttgaggggaaaaaacctaaagctgtggccaagaatcattctgctcagctttccagcaaaacatcacggagcctgcacgtgagggtacagaaaagcaaagctgttttacaaagcaaatccaccttggcgagtaagaaaagaacagaccggttcaatataaaatctagagagcggagtggggggccagtcacccggagccttcagctggcagctgctgctgacttgagtgagaacaagagagaggacggcagcgccaagcaggagctgaaggacttcaggaacttcctgtagaaaagcccccaaaacaaaacaaaccttaattgactaaaaagtattgcatgctcaacttaggataagcactacggcaaaggatacgaaatctaccaagcttgcaagaccagttgaagctgactcaaaaatcctaacattcagctgattgccggcaggcttagagtcaggcatctgctgcttcggtgggggcccaacgcgcatgctgggcgcccgggtgattgagatccaaagagaagggcactgtaagacaggccagatgaactggctcctcgtcatgggactggtacctcagatctgagcatggcccttgtttttggcacgtagcagagaaaggattgatttgaacttaaccttgcaaagcaagttgcctgttttagcagtagtttgttgtaggtttcagggatgacagatttggatgcactcatttaaaacgttttggtcacatatcagctcttgatgcctttcttttaaattaattatagacagagagaggcatttagctgatctcttacccctggtatttcttttttttgttgttttcgtttttttaaatcacaagtagattgccagcgtaatggagaggaaaccagattggatatggactcttttttatgcctattctggtgttgcgtttgtatatccaaatggacgttatcctctcagattcttatctggcactaatttataactattatattatcagagactatgtagcaatatatcagtgcacaggcgcatcccaggcctgtacagatgtatgtctacacgtaagtataaatgaatttgcataccaggttttacacttgcatctctaatagagattaaaaacaacaaattggcctcttcctaagtatattaatatcatttatccttacattttatgcctccccctaaattaatgactgagttggtggaaagcggctaggttttattcatactgttttttgttctcaacttcaaaagtaatctacctctgaaaaatttgtagtttaatatttgtttggtgaatttgtgccactttaatccttccactatcattcccattttgttacatttctgttatggggactttatgttgaaatattgtataaagcatttgtagcaatttaaaaataaaatatttaaaattatttaaattgttttggacgcttcaattgtattatatgtgatttacatttcactttttttgttggcgttgttaacccggagagtgctcctgtattgaactttgctgttagttattttattgcttctttttggagagtgctataaaagactattctaatgaaaacattaaaatttacaatttgacatacaaaaaggggttgtccattgattttaaccaatgtagcactgagagagagagaggttaattatagatagacaagagtggtgtttgttgtttttcccctcccagcattgaaatcattggggcttgtcagatgtattaaaaaaagatttgttgtgctattgctgcaaacacttaataactagaggagaatttaaacaatgcattttatattattgtaaccaataaaaaactttctaaacatctgtgaaaggactgcattttgtacataattgggagcagttagggggtaaaacaaggtgtgtgtggaggattgttcagagcccgcactctaatttaaaagtgcggcgtctactcagcccacctggcgtctgttcacttgtttctatttgacagtaactgaatatgtgctcattccagttggatttctatgtagagggtggacgtgtagtcagacaacggtgccgagaagtacctt

SEQ ID NO: 434259 - DNA, 6204 bp, Homo sapiens
acgctccctctgtggggggcccgtcacccggagccttcagctggcagctgctgctgacttgagtgagaaccagagagaggacggcagcgccaagccggagctgaaggacttcagggaagaaaaaatcccaggaaaataaaaacaaaggaaacaaaatccaagacatacaactgaagacaagtgagccagatttcacctctgcaaatatgagagattctgcagaaggtcctaaagaagacgaagagaagccttcagcctcagcacttgagcagccggccaccctccaggaggtggccagtcaggaggtgcctccagaactagcaacccctgcccctgcctgggagccacagccagaaccagacgagcgattagaagcggcagcttgtgaggtgaatgatttgggggaagaggaggaggaggaagaggaggaggatgaagaagaagaagaagatgatgatgatgatgagttggaagacgagggggaagaagaagccagcatgccaaatgaaaattctgtgaaagagccagaaatacggtgtgatgagaagccagaagatttattagaggaaccaaaaacaacttcagaagaaactcttgaagactgctcagaggtaacacctgccatgcaaatccccagaactaaagaagaggccaatggtgatgtatttgaaacgtttatgtttccgtgtcaacattgtgaaaggaagtttacaaccaaacaggggcttgagcgtcacatgcatatccatatatccaccgtcaatcatgctttcaaatgcaagtactgtgggaaagcctttggcacacagattaaccggcggcgacatgagcggcgccatgaagcagggttaaagcggaaacccagccaaacactacagccgtcagaggatctggctgatggcaaagcatctggagaaaacgttgcttcaaaagatgattcgagtcctcccagtcttgggccagactgtctgatcatgaattcagagaaggcttcccaagacacaataaattcttctgtcgtagaagagaatggggaagttaaagaacttcatccgtgcaaatattgtaaaaaggtttttggaactcatactaatatgagacggcatcagcgtagagttcacgaacgtcatctgattcccaaaggtgtacggcgaaaaggaggccttgaagagccccagcctccagcagaacaggcccaggccacccagaacgtgtatgtaccaagcacagagccggaggaggaaggggaagcagatgatgtgtacatcatggacatttctagcaatatctctgaaaacttaaattactatattgatggtaaaattcaaactaataacaacactagtaactgtgatgtgattgagatggagtctgcttcggcagatttgtatggtataaattgtctgctcactccagttacagtggaaattactcaaaatataaagaccacacaggtccctgtaacagaagatcttcctaaagagcctttgggcagcacaaatagtgaggccaagaagcggagaactgcgagcccacctgcactgcccaaaattaaggccgaaacagactctgaccccatggtcccctcttgctctttaagtcttcctcttagcatatcaacaacagaggcagtgtctttccacaaagagaaaagtgtttatttgtcatcaaagctcaaacaacttcttcaaacccaagataaactaactcctcctgcagggatttcagcaactgaaatagctaaattaggtcctgtttgtgtgtctgctcctgcatcaatgttgcctgtgacctcaagtaggtttaagaggcggaccagctctcctcccagttctccacagcacagtcctgcccttcgagactttggaaagccaagtgatgggaaagcagcatggaccgatgccgggctgacttccaaaaaatccaaattagaaagtcacagcgactcaccagcatggagtttgtctgggagagatgagagagaaactgtgagccctccatgctttgatgaatataaaatgtctaaagagtggacagctagttctgcttttagcagtgtgtgcaaccagcagccactggatttatccagcggtgtcaaacagaaggctgagggtacaggcaagactccagtccagtgggaatctgtcttagatctcagtgtgcataaaaagcattgtagtgactctgaaggcaaggaattcaaagaaagtcattcagtgcagcctacgtgtagtgctgtaaagaaaaggaaaccaaccacctgcatgctgcagaaggttcttctcaatgaatataatggcatcgatttacctgtagaaaaccctgcagatgggaccaggagcccaagtccttgtaaatccctagaagctcagccagatcctgacctcggtccgggctctggtttccctgcccctactgttgagtccacacctgatgtttgtccttcatcacctgccctgcagacaccctccctttcatccggtcagctgcctcctctcttgatccccacagatccctcttcccctccaccctgtcccccggtattaactgttgccactccgccccctcccctccttcctaccgtacctcttccagccccctcttccagtgcatctccacacccatgcccctctccactctcaaatgccaccgcacagtccccacttccaattctgtccccaacagtgtccccctctccctctcccattcctcccgtggagcccctgatgtctgccgcctcacccgggcctccaacactttcttcttcctcctcttcatcttcctcctcctcttcgttttcttcttcatcttcctcctcttctccttctccacctcctctctccgcaatatcatctgttgtttcctctggtgataatctggaggcttctctccccatgatatctttcaaacaggaggaattagagaatgaaggtctgaaacccagggaagagccccagtctgctgctgaacaggatgttgttgttcaggaaacattcaacaaaaactttgtttgcaacgtctgtgaatcaccttttctttccattaaagatctaaccaaacatttatctattcatgctgaagaatggcccttcaaatgtgaattttgtgtgcagctttttaaggataaaacggacttgtcagaacatcgctttttgcttcatggagttgggaatatctttgtgtgttctgtttgtaaaaaagaatttgcttttttgtgcaatttgcagcagcaccagcgagatctccacccagataaggtgtgcacacatcacgagtttgaaagcgggactctgaggccccagaactttacagatcccagcaaggcccatgtagagcatatgcagagcttgccagaagatcctttagaaacttctaaagaagaagaggagttaaatgattcctctgaagagctttacacgactataaaaataatggcttctggaataaagacaaaagatccagatgttcgattgggcctcaatcagcattacccaagctttaaaccacctccatttcagtaccatcaccgtaaccccatggggattggtgtgacagccacaaatttcactacacacaatattccacagactttcactaccgccattcgctgcacaaagtgtggaaaaggtgtcgacaatatgccggagttgcacaaacatatcctggcttgtgcttctgcaagtgacaagaagaggtacacgcctaagaaaaacccagtaccattaaaacaaactgtgcaacccaaaaatggcgtggtggttttagataactctgggaaaaatgccttccgacgaatgggacagcccaaaaggcttaactttagtgttgagctcagcaaaatgtcgtcgaataagctcaaattaaatgcattgaagaaaaaaaatcagctagtacagaaagcaattcttcagaaaaacaaatctgcaaagcagaaggccgacttgaaaaatgcttgtgagtcatcctctcacatctgcccttactgtaatcgagagttcacttacattggaagcctgaataaacacgccgccttcagctgtcccaaaaaacccctttctcctcccaaaaaaaaagtttctcattcatctaagaaaggtggacactcatcacctgcaagtagtgacaaaaacagtaacagcaaccaccgcagacggacagcggatgcggagattaaaatgcaaagcatgcagactccgttgggcaagaccagagcccgcagctcaggccccacccaagtcccacttccctcctcatccttcaggtccaagcagaacgtcaagtttgcagcttcggtgaaatccaaaaaaccaagctcctcctctttaaggaactccagcccgataagaatggccaaaataactcatgttgaggggaaaaaacctaaagctgtggccaagaatcattctgctcagctttccagcaaaacatcacggagcctgcacgtgagggtacagaaaagcaaagctgttttacaaagcaaatccaccttggcgagtaagaaaagaacagaccggttcaatataaaatctagagagcggagtggggggccagtcacccggagccttcagctggcagctgctgctgacttgagtgagaacaagagagaggacggcagcgccaagcaggagctgaaggacttcaggaacttcctgtagaaaagcccccaaaacaaaacaaaccttaattgactaaaaagtattgcatgctcaacttaggataagcactacggcaaaggatacgaaatctaccaagcttgcaagaccagttgaagctgactcaaaaatcctaacattcagctgattgccggcaggcttagagtcaggcatctgctgcttcggtgggggcccaacgcgcatgctgggcgcccgggtgattgagatccaaagagaagggcactgtaagacaggccagatgaactggctcctcgtcatgggactggtacctcagatctgagcatggcccttgtttttggcacgtagcagagaaaggattgatttgaacttaaccttgcaaagcaagttgcctgttttagcagtagtttgttgtaggtttcagggatgacagatttggatgcactcatttaaaacgttttggtcacatatcagctcttgatgcctttcttttaaattaattatagacagagagaggcatttagctgatctcttacccctggtatttcttttttttgttgttttcgtttttttaaatcacaagtagattgccagcgtaatggagaggaaaccagattggatatggactcttttttatgcctattctggtgttgcgtttgtatatccaaatggacgttatcctctcagattcttatctggcactaatttataactattatattatcagagactatgtagcaatatatcagtgcacaggcgcatcccaggcctgtacagatgtatgtctacacgtaagtataaatgaatttgcataccaggttttacacttgcatctctaatagagattaaaaacaacaaattggcctcttcctaagtatattaatatcatttatccttacattttatgcctccccctaaattaatgactgagttggtggaaagcggctaggttttattcatactgttttttgttctcaacttcaaaagtaatctacctctgaaaaatttgtagtttaatatttgtttggtgaatttgtgccactttaatccttccactatcattcccattttgttacatttctgttatggggactttatgttgaaatattgtataaagcatttgtagcaatttaaaaataaaatatttaaaattatttaaattgttttggacgcttcaattgtattatatgtgatttacatttcactttttttgttggcgttgttaacccggagagtgctcctgtattgaactttgctgttagttattttattgcttctttttggagagtgctataaaagactattctaatgaaaacattaaaatttacaatttgacatacaaaaaggggttgtccattgattttaaccaatgtagcactgagagagagagaggttaattatagatagacaagagtggtgtttgttgtttttcccctcccagcattgaaatcattggggcttgtcagatgtattaaaaaaagatttgttgtgctattgctgcaaacacttaataactagaggagaatttaaacaatgcattttatattattgtaaccaataaaaaactttctaa

SEQ ID NO: 434260 - DNA, 5679 bp, Homo sapiens
tcaattaagtatataaagtagaagtaatttattgttcatcatcatctcccttatgttttaggtggtaagagaaataacttgaatcattcagattgttcaccaagtagctggtttcccatgcttcacttccatgcttctgcttccatgtgctttctaggtcctaaagaagacgaagagaagccttcagcctcagcacttgagcagccggccaccctccaggaggtggccagtcaggaggtgcctccagaactagcaagtactgtgggaaagcctttggcacacagattaaccggcggcgacatgagcggcgccatgaagcagggttaaagcggaaacccagccaaacactacagccgtcagaggatctggctgatggcaaagcatctggagaaaacgttgcttcaaaagatgattcgagtcctcccagtcttgggccagactgtctgatcatgaattcagagaaggcttcccaagacacaataaattcttctgtcgtagaagagaatggggaagttaaagaacttcatccgtgcaaatattgtaaaaaggtttttggaactcatactaatatgagacggcatcagcgtagagttcacgaacgtcatctgattcccaaaggtgtacggcgaaaaggaggccttgaagagccccagcctccagcagaacaggcccaggccacccagaacgtgtatgtaccaagcacagagccggaggaggaaggggaagcagatgatgtgtacatcatggacatttctagcaatatctctgaaaacttaaattactatattgatggtaaaattcaaactaataacaacactagtaactgtgatgtgattgagatggagtctgcttcggcagatttgtatggtataaattgtctgctcactccagttacagtggaaattactcaaaatataaagaccacacaggtccctgtaacagaagatcttcctaaagagcctttgggcagcacaaatagtgaggccaagaagcggagaactgcgagcccacctgcactgcccaaaattaaggccgaaacagactctgaccccatggtcccctcttgctctttaagtcttcctcttagcatatcaacaacagaggcagtgtctttccacaaagagaaaagtgtttatttgtcatcaaagctcaaacaacttcttcaaacccaagataaactaactcctcctgcagggatttcagcaactgaaatagctaaattaggtcctgtttgtgtgtctgctcctgcatcaatgttgcctgtgacctcaagtaggtttaagaggcggaccagctctcctcccagttctccacagcacagtcctgcccttcgagactttggaaagccaagtgatgggaaagcagcatggaccgatgccgggctgacttccaaaaaatccaaattagaaagtcacagcgactcaccagcatggagtttgtctgggagagatgagagagaaactgtgagccctccatgctttgatgaatataaaatgtctaaagagtggacagctagttctgcttttagcagtgtgtgcaaccagcagccactggatttatccagcggtgtcaaacagaaggctgagggtacaggcaagactccagtccagtgggaatctgtcttagatctcagtgtgcataaaaagcattgtagtgactctgaaggcaaggaattcaaagaaagtcattcagtgcagcctacgtgtagtgctgtaaagaaaaggaaaccaaccacctgcatgctgcagaaggttcttctcaatgaatataatggcatcgatttacctgtagaaaaccctgcagatgggaccaggagcccaagtccttgtaaatccctagaagctcagccagatcctgacctcggtccgggctctggtttccctgcccctactgttgagtccacacctgatgtttgtccttcatcacctgccctgcagacaccctccctttcatccggtcagctgcctcctctcttgatccccacagatccctcttcccctccaccctgtcccccggtattaactgttgccactccgccccctcccctccttcctaccgtacctcttccagccccctcttccagtgcatctccacacccatgcccctctccactctcaaatgccaccgcacagtccccacttccaattctgtccccaacagtgtccccctctccctctcccattcctcccgtggagcccctgatgtctgccgcctcacccgggcctccaacactttcttcttcctcctcttcatcttcctcctcctcttcgttttcttcttcatcttcctcctcttctccttctccacctcctctctccgcaatatcatctgttgtttcctctggtgataatctggaggcttctctccccatgatatctttcaaacaggaggaattagagaatgaaggtctgaaacccagggaagagccccagtctgctgctgaacaggatgttgttgttcaggaaacattcaacaaaaactttgtttgcaacgtctgtgaatcaccttttctttccattaaagatctaaccaaacatttatctattcatgctgaagaatggcccttcaaatgtgaattttgtgtgcagctttttaaggataaaacggacttgtcagaacatcgctttttgcttcatggagttgggaatatctttgtgtgttctgtttgtaaaaaagaatttgcttttttgtgcaatttgcagcagcaccagcgagatctccacccagataaggtgtgcacacatcacgagtttgaaagcgggactctgaggccccagaactttacagatcccagcaaggcccatgtagagcatatgcagagcttgccagaagatcctttagaaacttctaaagaagaagaggagttaaatgattcctctgaagagctttacacgactataaaaataatggcttctggaataaagacaaaagatccagatgttcgattgggcctcaatcagcattacccaagctttaaaccacctccatttcagtaccatcaccgtaaccccatggggattggtgtgacagccacaaatttcactacacacaatattccacagactttcactaccgccattcgctgcacaaagtgtggaaaaggtgtcgacaatatgccggagttgcacaaacatatcctggcttgtgcttctgcaagtgacaagaagaggtacacgcctaagaaaaacccagtaccattaaaacaaactgtgcaacccaaaaatggcgtggtggttttagataactctgggaaaaatgccttccgacgaatgggacagcccaaaaggcttaactttagtgttgagctcagcaaaatgtcgtcgaataagctcaaattaaatgcattgaagaaaaaaaatcagctagtacagaaagcaattcttcagaaaaacaaatctgcaaagcagaaggccgacttgaaaaatgcttgtgagtcatcctctcacatctgcccttactgtaatcgagagttcacttacattggaagcctgaataaacacgccgccttcagctgtcccaaaaaacccctttctcctcccaaaaaaaaagtttctcattcatctaagaaaggtggacactcatcacctgcaagtagtgacaaaaacagtaacagcaaccaccgcagacggacagcggatgcggagattaaaatgcaaagcatgcagactccgttgggcaagaccagagcccgcagctcaggccccacccaagtcccacttccctcctcatccttcaggtccaagcagaacgtcaagtttgcagcttcggtgaaatccaaaaaaccaagctcctcctctttaaggaactccagcccgataagaatggccaaaataactcatgttgaggggaaaaaacctaaagctgtggccaagaatcattctgctcagctttccagcaaaacatcacggagcctgcacgtgagggtacagaaaagcaaagctgttttacaaagcaaatccaccttggcgagtaagaaaagaacagaccggttcaatataaaatctagagagcggagtggggggccagtcacccggagccttcagctggcagctgctgctgacttgagtgagaacaagagagaggacggcagcgccaagcaggagctgaaggacttcaggaacttcctgtagaaaagcccccaaaacaaaacaaaccttaattgactaaaaagtattgcatgctcaacttaggataagcactacggcaaaggatacgaaatctaccaagcttgcaagaccagttgaagctgactcaaaaatcctaacattcagctgattgccggcaggcttagagtcaggcatctgctgcttcggtgggggcccaacgcgcatgctgggcgcccgggtgattgagatccaaagagaagggcactgtaagacaggccagatgaactggctcctcgtcatgggactggtacctcagatctgagcatggcccttgtttttggcacgtagcagagaaaggattgatttgaacttaaccttgcaaagcaagttgcctgttttagcagtagtttgttgtaggtttcagggatgacagatttggatgcactcatttaaaacgttttggtcacatatcagctcttgatgcctttcttttaaattaattatagacagagagaggcatttagctgatctcttacccctggtatttcttttttttgttgttttcgtttttttaaatcacaagtagattgccagcgtaatggagaggaaaccagattggatatggactcttttttatgcctattctggtgttgcgtttgtatatccaaatggacgttatcctctcagattcttatctggcactaatttataactattatattatcagagactatgtagcaatatatcagtgcacaggcgcatcccaggcctgtacagatgtatgtctacacgtaagtataaatgaatttgcataccaggttttacacttgcatctctaatagagattaaaaacaacaaattggcctcttcctaagtatattaatatcatttatccttacattttatgcctccccctaaattaatgactgagttggtggaaagcggctaggttttattcatactgttttttgttctcaacttcaaaagtaatctacctctgaaaaatttgtagtttaatatttgtttggtgaatttgtgccactttaatccttccactatcattcccattttgttacatttctgttatggggactttatgttgaaatattgtataaagcatttgtagcaatttaaaaataaaatatttaaaattatttaaattgttttggacgcttcaattgtattatatgtgatttacatttcactttttttgttggcgttgttaacccggagagtgctcctgtattgaactttgctgttagttattttattgcttctttttggagagtgctataaaagactattctaatgaaaacattaaaatttacaatttgacatacaaaaaggggttgtccattgattttaaccaatgtagcactgagagagagagaggttaattatagatagacaagagtggtgtttgttgtttttcccctcccagcattgaaatcattggggcttgtcagatgtattaaaaaaagatttgttgtgctattgctgcaaacacttaataactagaggagaatttaaacaatgcattttatattattgtaaccaataaaaaactttctaa

SEQ ID NO: 434261 - DNA, 4411 bp, Homo sapiens
cggccgcgggcgccggggccggcgaaacagcggcggcggcggcggccctcggtgctctgaggcgctggcgcggcgggcgcggaacactactgagcctgtggcggccaccgagaccctggctgaggtacccgaacatgtgctgcgaggacttccggaggaagtgaggcttttcccttctgctgttgacaagacccggattggtgtctgggccactaaaccaattttaaaaggcaaaaaatttgggccatttgttggtgataagaaaaaaagatctcaggttaagaataatgtatacatgtgggaggtgtattacccaaatttgggatggatgtgcattgatgccactgatccagagaagggaaactggctgcgatatgtgaattgggcttgctcaggagaagagcaaaatttattcccactggaaatcaacagagccatttactataaaactttaaagccaatcgcgccgggcgaggagctcctggtctggtacaatggggaagacaaccctgagatagcagctgcgattgaggaagagcgagccagcgcccggagcaagcggagctcccccaagagccggaaagggaagaaaaaatcccaggaaaataaaaacaaaggaaacaaaatccaagacatacaactgaagacaagtgagccagatttcacctctgcaaatatgagagattctgcagaaggtcctaaagaagacgaagagaagccttcagcctcagcacttgagcagccggccaccctccaggaggtggccagtcaggaggtgcctccagaactagcaacccctgcccctgcctgggagccacagccagaaccagacgagcgattagaagcggcagcttgtgaggtgaatgatttgggggaagaggaggaggaggaagaggaggaggatgaagaagaagaagaagatgatgatgatgatgatctgccgcctcacccgggcctccaacactttcttcttcctcctcttcatcttcctcctcctcttcgttttcttcttcatcttcctcctcttctccttctccacctcctctctccgcaatatcatctgttgtttcctctggtgataatctggaggcttctctccccatgatatctttcaaacaggaggaattagagaatgaaggtctgaaacccagggaagagccccagtctgctgctgaacaggatgttgttgttcaggaaacattcaacaaaaactttgtttgcaacgtctgtgaatcaccttttctttccattaaagatctaaccaaacatttatctattcatgctgaagaatggcccttcaaatgtgaattttgtgtgcagctttttaaggataaaacggacttgtcagaacatcgctttttgcttcatggagttgggaatatctttgtgtgttctgtttgtaaaaaagaatttgcttttttgtgcaatttgcagcagcaccagcgagatctccacccagataaggtgtgcacacatcacgagtttgaaagcgggactctgaggccccagaactttacagatcccagcaaggcccatgtagagcatatgcagagcttgccagaagatcctttagaaacttctaaagaagaagaggagttaaatgattcctctgaagagctttacacgactataaaaataatggcttctggaataaagacaaaagatccagatgttcgattgggcctcaatcagcattacccaagctttaaaccacctccatttcagtaccatcaccgtaaccccatggggattggtgtgacagccacaaatttcactacacacaatattccacagactttcactaccgccattcgctgcacaaagtgtggaaaaggtgtcgacaatatgccggagttgcacaaacatatcctggcttgtgcttctgcaagtgacaagaagaggtacacgcctaagaaaaacccagtaccattaaaacaaactgtgcaacccaaaaatggcgtggtggttttagataactctgggaaaaatgccttccgacgaatgggacagcccaaaaggcttaactttagtgttgagctcagcaaaatgtcgtcgaataagctcaaattaaatgcattgaagaaaaaaaatcagctagtacagaaagcaattcttcagaaaaacaaatctgcaaagcagaaggccgacttgaaaaatgcttgtgagtcatcctctcacatctgcccttactgtaatcgagagttcacttacattggaagcctgaataaacacgccgccttcagctgtcccaaaaaacccctttctcctcccaaaaaaaaagtttctcattcatctaagaaaggtggacactcatcacctgcaagtagtgacaaaaacagtaacagcaaccaccgcagacggacagcggatgcggagattaaaatgcaaagcatgcagactccgttgggcaagaccagagcccgcagctcaggccccacccaagtcccacttccctcctcatccttcaggtccaagcagaacgtcaagtttgcagcttcggtgaaatccaaaaaaccaagctcctcctctttaaggaactccagcccgataagaatggccaaaataactcatgttgaggggaaaaaacctaaagctgtggccaagaatcattctgctcagctttccagcaaaacatcacggagcctgcacgtgagggtacagaaaagcaaagctgttttacaaagcaaatccaccttggcgagtaagaaaagaacagaccggttcaatataaaatctagagagcggagtggggggccagtcacccggagccttcagctggcagctgctgctgacttgagtgagaacaagagagaggacggcagcgccaagcaggagctgaaggacttcaggaacttcctgtagaaaagcccccaaaacaaaacaaaccttaattgactaaaaagtattgcatgctcaacttaggataagcactacggcaaaggatacgaaatctaccaagcttgcaagaccagttgaagctgactcaaaaatcctaacattcagctgattgccggcaggcttagagtcaggcatctgctgcttcggtgggggcccaacgcgcatgctgggcgcccgggtgattgagatccaaagagaagggcactgtaagacaggccagatgaactggctcctcgtcatgggactggtacctcagatctgagcatggcccttgtttttggcacgtagcagagaaaggattgatttgaacttaaccttgcaaagcaagttgcctgttttagcagtagtttgttgtaggtttcagggatgacagatttggatgcactcatttaaaacgttttggtcacatatcagctcttgatgcctttcttttaaattaattatagacagagagaggcatttagctgatctcttacccctggtatttcttttttttgttgttttcgtttttttaaatcacaagtagattgccagcgtaatggagaggaaaccagattggatatggactcttttttatgcctattctggtgttgcgtttgtatatccaaatggacgttatcctctcagattcttatctggcactaatttataactattatattatcagagactatgtagcaatatatcagtgcacaggcgcatcccaggcctgtacagatgtatgtctacacgtaagtataaatgaatttgcataccaggttttacacttgcatctctaatagagattaaaaacaacaaattggcctcttcctaagtatattaatatcatttatccttacattttatgcctccccctaaattaatgactgagttggtggaaagcggctaggttttattcatactgttttttgttctcaacttcaaaagtaatctacctctgaaaaatttgtagtttaatatttgtttggtgaatttgtgccactttaatccttccactatcattcccattttgttacatttctgttatggggactttatgttgaaatattgtataaagcatttgtagcaatttaaaaataaaatatttaaaattatttaaattgttttggacgcttcaattgtattatatgtgatttacatttcactttttttgttggcgttgttaacccggagagtgctcctgtattgaactttgctgttagttattttattgcttctttttggagagtgctataaaagactattctaatgaaaacattaaaatttacaatttgacatacaaaaaggggttgtccattgattttaaccaatgtagcactgagagagagagaggttaattatagatagacaagagtggtgtttgttgtttttcccctcccagcattgaaatcattggggcttgtcagatgtattaaaaaaagatttgttgtgctattgctgcaaacacttaataactagaggagaatttaaacaatgcattttatattattgtaaccaataaaaaactttctaa

SEQ ID NO: 434262 - DNA, 2354 bp, Homo sapiens
gggttcatttccatgggctccagtaaagcagaaagggaaggaaagaggtgtattctctactcacctcctactcatctttcacctttgtaaaccccacggtgtttttgggttctttttttttttttttttttaatgagacagagtctcgctccgttgcccaggctggagtgcagtggcacgatcttggctcactgcaagctctgcctcccgggttcacgccattctcctgtctcagcctcccgagtagctgggactacaggtgcccgccaccatgcccggctaattttttgtatttttagtagagatggggtttcaccgtgttagccaggatggtctcgatctcctgaccttatgatccgcccgtctcggcctcctgcagtgctgggattacaggtgtgagccaccgtgcctggtgtttttgggttctttaatgcttcttttagagccacatttttcttttcaaaccgagttcccatcgcagtcaagaaaaaggtagagaagcaaaatgaaattctagaccaagtttttccatttaccaggaattgatttaaaaaaaaaagtgctaatttctcatgcctccatctctgctacatcccttggaaataaatgcgtgtagttccttgcagggtgtgtcttctgggtaggacgctcgttcctaaatgccttcagtcatgtatgtgttgtcgtcttaataacatttgtcttacggtctattcacctttttctttaacatggtcaatcatgtaaggttatgttctgttgtcatttatcttcagttttcttattttctaggaacttcctgtagaaaagcccccaaaacaaaacaaaccttaattgactaaaaagtattgcatgctcaacttaggataagcactacggcaaaggatacgaaatctaccaagcttgcaagaccagttgaagctgactcaaaaatcctaacattcagctgattgccggcaggcttagagtcaggcatctgctgcttcggtgggggcccaacgcgcatgctgggcgcccgggtgattgagatccaaagagaagggcactgtaagacaggccagatgaactggctcctcgtcatgggactggtacctcagatctgagcatggcccttgtttttggcacgtagcagagaaaggattgatttgaacttaaccttgcaaagcaagttgcctgttttagcagtagtttgttgtaggtttcagggatgacagatttggatgcactcatttaaaacgttttggtcacatatcagctcttgatgcctttcttttaaattaattatagacagagagaggcatttagctgatctcttacccctggtatttcttttttttgttgttttcgtttttttaaatcacaagtagattgccagcgtaatggagaggaaaccagattggatatggactcttttttatgcctattctggtgttgcgtttgtatatccaaatggacgttatcctctcagattcttatctggcactaatttataactattatattatcagagactatgtagcaatatatcagtgcacaggcgcatcccaggcctgtacagatgtatgtctacacgtaagtataaatgaatttgcataccaggttttacacttgcatctctaatagagattaaaaacaacaaattggcctcttcctaagtatattaatatcatttatccttacattttatgcctccccctaaattaatgactgagttggtggaaagcggctaggttttattcatactgttttttgttctcaacttcaaaagtaatctacctctgaaaaatttgtagtttaatatttgtttggtgaatttgtgccactttaatccttccactatcattcccattttgttacatttctgttatggggactttatgttgaaatattgtataaagcatttgtagcaatttaaaaataaaatatttaaaattatttaaattgttttggacgcttcaattgtattatatgtgatttacatttcactttttttgttggcgttgttaacccggagagtgctcctgtattgaactttgctgttagttattttattgcttctttttggagagtgctataaaagactattctaatgaaaacattaaaatttacaatttgacatacaaaaaggggttgtccattgattttaaccaatgtagcactgagagagagagaggttaattatagatagacaagagtggtgtttgttgtttttcccctcccagcattgaaatcattggggcttgtcagatgtattaaaaaaagatttgttgtgctattgctgcaaacacttaataactagaggagaatttaaacaatgcattttatattattgtaaccaataaaaaactttctaa

SEQ ID NO: 434263 - DNA, 3232 bp, Homo sapiens
tttgattatagggggcagtctgtctggaaattggtaaaacccacacattttatatgtgcttatatgtagttctattaagacctatgttaaactctggtgggataattccgtggcactttcacataatttaaattatgccatgtaagagtcactaaacccttatatacttcagtatgaatcctgtacattgcccaagaccttgttaagagaatgtaaattaaatataaattggagtatcagtgtaaaagtgacattctaaatgttcctcactctgcgaggcttattttttagggactttgctataattctgaaagacttagttttacagtacatctgaaagtaggagttttcagaagtatggctcttgggataaatttagattcttaattgtgaagctctgttaccacttgttagaaggcaggtcagctcacctgcttggggaggtaaatatatgaatgcactctcgagtaatttaatggagccctacctcaatgtacagaatgacagtatcacagatcaagaatggagtacgagtgattttcggctatggtgggggtaggtaggtcattgtcccctattgtctcttactatttgtaaagtgaagactacgattagtctttttcatcgggatggtttgagatgaatacagaataggctcggcaatttggatactttaggcttttcaagaacattagtaacattttttttagatatttctcctaatacaatgagtgttgtgaaataacatggcagttattgttgagagaaaagccttcccagttatgtattgagtccttaggcgttttgaccttccctccactcttacagaacttggtggaaggggccactatgttttctacctccttccgtgcctttcacaaagccacatcctgcaccgtctacccttctctgtggatatttttccgcttggcaatttcctttcctgaggcacccacttgggacatctgaatctccatcttcatgttgatggcccgtttgtgcttggacgtgttcttccacttgagactgagggttcatgtaatcaaagaagtttctttgttgtgtgtatctttacagaacacaacaggaattgaaaatgaatcagaacactactgagcctgtggcggccaccgagaccctggctgaggtacccgaacatgtgctgcgaggacttccggaggaagtgaggcttttcccttctgctgttgacaagacccggattggtgtattacccaaatttgggatggatgtgcattgatgccactgatccagagaagggaaactggctgcgatatgtgaattgggcttgctcaggagaagagcaaaatttattcccactggaaatcaacagagccatttactataaaactttaaagccaatcgcgccgggcgaggagctcctggtctggtacaatggggaagacaaccctgagatagcagctgcgattgaggaagagcgagccagcgcccggagcaagcggagctcccccaagagccggaaagaccaagcggagcagccagctggcagtagcgccctgtaggacccccaggacccgatgggaagaaaaaatcccaggaaaataaaaacaaaggaaacaaaatccaagacatacaactgaagacaagtgagccagatttcacctctgcaaatatgagagattctgcagaaggaacttcctgtagaaaagcccccaaaacaaaacaaaccttaattgactaaaaagtattgcatgctcaacttaggataagcactacggcaaaggatacgaaatctaccaagcttgcaagaccagttgaagctgactcaaaaatcctaacattcagctgattgccggcaggcttagagtcaggcatctgctgcttcggtgggggcccaacgcgcatgctgggcgcccgggtgattgagatccaaagagaagggcactgtaagacaggccagatgaactggctcctcgtcatgggactggtacctcagatctgagcatggcccttgtttttggcacgtagcagagaaaggattgatttgaacttaaccttgcaaagcaagttgcctgttttagcagtagtttgttgtaggtttcagggatgacagatttggatgcactcatttaaaacgttttggtcacatatcagctcttgatgcctttcttttaaattaattatagacagagagaggcatttagctgatctcttacccctggtatttcttttttttgttgttttcgtttttttaaatcacaagtagattgccagcgtaatggagaggaaaccagattggatatggactcttttttatgcctattctggtgttgcgtttgtatatccaaatggacgttatcctctcagattcttatctggcactaatttataactattatattatcagagactatgtagcaatatatcagtgcacaggcgcatcccaggcctgtacagatgtatgtctacacgtaagtataaatgaatttgcataccaggttttacacttgcatctctaatagagattaaaaacaacaaattggcctcttcctaagtatattaatatcatttatccttacattttatgcctccccctaaattaatgactgagttggtggaaagcggctaggttttattcatactgttttttgttctcaacttcaaaagtaatctacctctgaaaaatttgtagtttaatatttgtttggtgaatttgtgccactttaatccttccactatcattcccattttgttacatttctgttatggggactttatgttgaaatattgtataaagcatttgtagcaatttaaaaataaaatatttaaaattatttaaattgttttggacgcttcaattgtattatatgtgatttacatttcactttttttgttggcgttgttaacccggagagtgctcctgtattgaactttgctgttagttattttattgcttctttttggagagtgctataaaagactattctaatgaaaacattaaaatttacaatttgacatacaaaaaggggttgtccattgattttaaccaatgtagcactgagagagagagaggttaattatagatagacaagagtggtgtttgttgtttttcccctcccagcattgaaatcattggggcttgtcagatgtattaaaaaaagatttgttgtgctattgctgcaaacacttaataactagaggagaatttaaacaatgcattttatattattgtaaccaataaaaaactttctaa

SEQ ID NO: 434264 - DNA, 2773 bp, Homo sapiens
cggccgcgggcgccggggccggcgaaacagcggcggcggcggcggccctcggtgctctgaggcgctggcgcggcgggcgcggaacactactgagcctgtggcggccaccgagaccctggctgaggtacccgaacatgtgctgcgaggacttccggaggaagtgaggcttttcccttctgctgttgacaagacccggattggtgtctgggccactaaaccaattttaaaaggcaaaaaatttgggccatttgttggtgataagaaaaaaagatctcaggttaagaataatgtatacatgtgggaggtgtattacccaaatttgggatggatgtgcattgatgccactgatccagagaagggaaactggctgcgatatgtgaattgggcttgctcaggagaagagcaaaatttattcccactggaaatcaacagagccatttactataaaactttaaagccaatcgcgccgggcgaggagctcctggtctggtacaatggggaagacaaccctgagatagcagctgcgattgaggaagagcgagccagcgcccggagcaagcggagctcccccaagagccggaaagggaagaaaaaatcccaggaaaataaaaacaaaggaaacaaaatccaagacatacaactgaagacaagtgagccagatttcacctctgcaaatatgagagattctgcagaagctacagcctccgcttggcgtcccgatgctctccaccagcggccccgtacatcaccaggcagtataggaaggtcaaagctccggctgcagcccagttccagggaccattcttcaaagagtagacactctggctgctccctgacagcacctgaagtgacctggaatcagtgaagccaaagggactggcagtctgccctgcagggagtaccgacctatcccagttgtgtgaggctgcgagagaaagggagtgcatgtgcgcgcgtgcatgtgtgcgtgcgtgtgtgttcacgtgttctcgtgcgggcgcgtgagtggtcttcaaacgagggtcccgaaccccggggcggcaggaagggggccgactccacgctgtcctttgggatgatacttggatgcagctcttgggaccgtgttctgcagcccagccttcctgttggggtggggcctctcctactatgcaatttttcaagagctccttgaccctgctttttgcttcttgagttgtcttttgccattatggggactttggtttgacccaggggtcagccctttaggaaggccttcaggaggaggccgagttccccttcagtaccacccctctctccccaccttccctctcccggcaacatctctgggaatcaacagcatattgacacgttggagccgagcctgaacatgcccctcggccccagcacatggaaaacccccttccttgcctaaggtgtctgagtttctggctcttgaggcatttccagacttgaaattctcatcagtccattgctcttgagtctttgcagagaacctcagatcaggtgcacctgggagaaagactttgtccccacttacagatctatctcctcccttgggaagggcagggaatggggacggtgtatggaggggagggatctcctgcgcccttcattgccacacttggtgggaccatgaacatctttagtgtctgagcttctcaaattagctgcaataggaaaaaacaaattgggaaatggaaaaaaaatgggaagattaaaaagcacagggggaagaagaagagatttcggaggccatcctgccagggggggacggggctgactcctgctctctggaggacggtcagtccatgtctcggagaaacgggtgagctgagcttggcgtttggacccagttcagtgaggttcttgggttttgtgcctttggggcagactccagacaaggatgtctgagaccacttgggctctgttttctcagctccaatttcaagagtgagctatcaaacccagagcggaaggagggagctctgatgagcacggtttgtcacacgataaagggattttttttttcagggctactacggttgatcttgcaactctgtaaatatgtatgtagacacttttaaaagcacgtatttatgtccctgactgtaaatgctccatttttaaagttttataacttgtgttatttaatgagtcagtcaatcggctgcagtacgggatctgataaggatctaggagaagggtctcatgcggaccctcacatgggcagaaaaatggtggtcattggccgacatcacagttttcctgtttcccacccagctaaaaaccgttgtttgctttaaattttcataaactggaatcctttcacccgctcctacagctaaccctcacaagcatgaagtgctgtggctgttccttatcctaatgatgcgcttttgtcccgtaaatgttaacactcatgaagcataccccggcctctcagttcttgagggcctccccaccgcagcagcaaggaaagctcacgaaccccaaacctggcaagtcacctgcagcccatggtgagctctgggaagtgtggttgaggccttggggtcactccttttttgcatgtgcaaatgtgctggtcacccttcaacgctcccagacggtcaggaaaactgttccaatcatgaaaaggggggatgattttgtaaaagtggcatttcctggtcagtggtggtcttcaagacgacagctctgtatctgccatgtgaagagaattaacaataaaagtgtgaagagcgattgtgaggaacaagcctgggagtga

SEQ ID NO: 434265 - DNA, 752 bp, Homo sapiens
cggccgcgggcgccggggccggcgaaacagcggcggcggcggcggccctcggtgctctgaggcgctggcgcggcgggcgcggaacactactgagcctgtggcggccaccgagaccctggctgaggtacccgaacatgtgctgcgaggacttccggaggaagtgaggcttttcccttctgctgttgacaagacccggattggtgtctgggccactaaaccaattttaaaaggcaaaaaatttgggccatttgttggtgataagaaaaaaagatctcaggttaagaataatgtatacatgtgggaggtgtattacccaaatttgggatggatgtgcattgatgccactgatccagagaagggaaactggctgcgatatgtgaattgggcttgctcaggagaagagcaaaatttattcccactggaaatcaacagagccatttactataaaactttaaagccaatcgcgccgggcgaggagctcctggtctggtacaatggggaagacaaccctgagatagcagctgcgattgaggaagagcgagccagcgcccggagcaagcggagctcccccaagagccggaaagctacagcctccgcttggcgtcccgatgctctccaccagcggccccgtacatcaccaggcagtataggaaggtcaaagctccggctgcagcccagttccagggaccattcttcaaagagtagacactctggctgctccctgacaggtacgaggcaggatggaacagctt

SEQ ID NO: 434266 - DNA, 2780 bp, Homo sapiens
cgcggccgcgctgcccctggcttcgcggaagccctgagtagcgcagcgccctcgccgcacgcaaggctgcagtcccgctccaggccagagtcccaggagagcgtcctccgcgctcacaggcgcctttgtcttcccgcttcccccttcctttttcaaaagccaagaggtaattatttggtctttgtgcaaggcaaacctctccagatgccacttccaaatataggctctcattaacaccagaggctggcctggtgtggtgcagggcggcccttccttctcctggcggacactgtgtccccgcgcgctggcgtgcaccacatctggaagccaggcgggcagggcagagaccccggctcctgcgcccctcctagctcccagagagcgtggatcgcgggcggggctcaccgagcgaggttacctctcttgaaaatacttaaacactttttttcctctccactgaaatctcaaaaaacagcccattttgaaccagaataatttagtctgacaacagattcttcctctgttcacagctgtcccagagggaggagctgaaatctgaacctctcagctgtgattggatctttcttgcaaaagagaggaaaaaaaaaccctcccagccaaaacgggctcagttcgtaaaggagccgggtgacttcagaggcgccggcccgtccgtctgccgcacctgagcacggcccctgcccgagcctggcccgccgcgatgctgtagggaccgccgtgtcctcccgccggaccgttatccgcgccgggcgcccgccagacccgctggcaagatgccgcgctccttcctggtcaagaagcatttcaacgcctccaaaaagccaaactacagcgaactggacacacatacagtgattatttccccgtatctctatgagagttactccatgcctgtcataccacaaccagagatcctcagctcaggagcatacagccccatcactgtgtggactaccgctgctccattccacgcccagctacccaatggcctctctcctctttccggatactcctcatctttggggcgagtgagtccccctcctccatctgacacctcctccaaggaccacagtggctcagaaagccccattagtgatgaagaggaaagactacagtccaagctttcagacccccatgccattgaagctgaaaagtttcagtgcaatttatgcaataagacctattcaactttttctgggctggccaaacataagcagctgcactgcgatgcccagtctagaaaatctttcagctgtaaatactgtgacaaggaatatgtgagcctgggcgccctgaagatgcatattcggacccacacattaccttgtgtttgcaagatctgcggcaaggcgttttccagaccctggttgcttcaaggacacattagaactcacacgggggagaagcctttttcttgccctcactgcaacagagcatttgcagacaggtcaaatctgagggctcatctgcagacccattctgatgtaaagaaataccagtgcaaaaactgctccaaaaccttctccagaatgtctctcctgcacaaacatgaggaatctggctgctgtgtagcacactgagtgacgcaatcaatgtttactcgaacagaatgcatttcttcactccgaagccaaatgacaaataaagtccaaaggcattttctcctgtgctgaccaaccaaataatatgtatagacacacacacatatgcacacacacacacacacacccacagagagagagctgcaagagcatggaattcatgtgtttaaagataatcctttccatgtgaagtttaaaattactatatatttgctgatggctagattgagagaataaaagacagtaacctttctcttcaaagataaaatgaaaagcacattgcatcttttcttcctaaaaaaatgcaaagatttacattgctgccaaatcatttcaactgaaaagaacagtattgctttgtaatagagtctgtaataggatttcccataggaagagatctgccagacgcgaactcaggtgccttaaaaagtattccaagtttactccattacatgtcggttgtctggttgccattgttgaactaaagcctttttttgattacctgtagtgctttaaagtatatttttaaaagggaggaaaaaaataacaagaacaaaacacaggagaatgtattaaaagtatttttgttttgttttgtttttgccaattaacagtatgtgccttgggggaggagggaaagattagctttgaacattcctggcgcatgctccattgtcttactattttaaaacattttaataatttttgaaaattaattaaagatgggaataagtgcaaaagaggattcttacaaattcattaatgtacttaaactatttcaaatgcataccacaaatgcaataatacaataccccttccaagtgcctttttaaattgtatagttgatgagtcaatgtaaatttgtgtttatttttatatgattgaatgagttctgtatgaaactgagatgttgtctatagctatgtctataaacaacctgaagacttgtgaaatcaatgtttcttttttaaaaaacaattttcaagttttttttacaataaacagttttgatttaaaatctcgtttgtatactattttcagagactttacttgcttcatgattagtaccaaaccactgtacaaagaattgtttgttaacaagaaaaaaatgaataatgcttattatgcatctgaagtgttattttatgtgttagatta

SEQ ID NO: 434267 - DNA, 1948 bp, Homo sapiens
  misc_feature (2)..(2): n is a, c, g, or t
anttcggcacagaaactacagcgaactggacacacatacagtgattatttccccgtatctctatgagagttactccatgcctgtcataccacaaccagagatcctcagctcaggagcatacagccccatcactgtgtggactaccgctgctccattccacgcccagctacccaatggcctctctcctctttccggatactcctcatctttggggcgagtgagtccccctcctccatctgacacctcctccaaggaccacagtggctcagaaagccccattagtgatgaagaggaaagactacagtccaagctttcagacccccatgccattgaagctgaaaagtttcagtgcaatttatgcaataagacctattcaactttttctgggctggccaaacataagcagctgcactgcgatgcccagtctagaaaatctttcagctgtaaatactgtgacaaggaatatgtgagcctgggcgccctgaagatgcatattcggacccacacattaccttgtgtttgcaagatctgcggcaaggcgttttccagaccctggttgcttcaaggacacattagaactcacacgggggagaagcctttttcttgccctcactgcaacagagcatttgcagacaggtcaaatctgagggctcatctgcagacccattctgatgtaaagaaataccagtgcaaaaactgctccaaaaccttctccagaatgtctctcctgcacaaacatgaggaatctggctgctgtgtagcacactgagtgacgcaatcaatgtttactcgaacagaatgcatttcttcactccgaagccaaatgacaaataaagtccaaaggcattttctcctgtgctgaccaaccaaataatatgtatagacacacacacatatgcacacacacacacacacacccacagagagagagctgcaagagcatggaattcatgtgtttaaagataatcctttccatgtgaagtttaaaattactatatatttgctgatggctagattgagagaataaaagacagtaacctttctcttcaaagataaaatgaaaagcacattgcatcttttcttcctaaaaaaatgcaaagatttacattgctgccaaatcatttcaactgaaaagaacagtattgctttgtaatagagtctgtaataggatttcccataggaagagatctgccagacgcgaactcaggtgccttaaaaagtattccaagtttactccattacatgtcggttgtctggttgccattgttgaactaaagcctttttttgattacctgtagtgctttaaagtatatttttaaaagggaggaaaaaaataacaagaacaaaacacaggagaatgtattaaaagtatttttgttttgttttgtttttgccaattaacagtatgtgccttgggggaggagggaaagattagctttgaacattcctggcgcatgctccattgtcttactattttaaaacattttaataatttttgaaaattaattaaagatgggaataagtgcaaaagaggattcttacaaattcattaatgtacttaaactatttcaaatgcataccacaaatgcaataatacaataccccttccaagtgcctttttaaattgtatagttgatgagtcaatgtaaatttgtgtttatttttatatgattgaatgagttctgtatgaaactgagatgttgtctatagctatgtctataaacaacctgaagacttgtgaaatcaatgtttcttttttaaaaaacaattttcaagttttttttacaataaacagttttgatttaaaatctcgtttgtatactattttcagagactttacttgcttcatgattagtaccaaaccactgtacaaagaattgtttgttaacaagaaaaaaatgaataatgcttattatgcatctgaagtgttattttatgtgttagatta

SEQ ID NO: 434268 - DNA, 523 bp, Homo sapiens
tgctggggccctgctttctctcccagccgattttgattacaagaactccttcaagccctttttgttctttttaagaatatgagtttagagggacagaggcaacaaatctgtattcattgctcaccgtagttcctgaatgaggccccacataatgtggagaccagctcatatcttgatctttgcttgtgaatgcctttacctttattaacaaactgagaaggggcagctgttggaagatttagagtgtggaaccacatttaccttttctcttccgctcagatgcctctgcctctggagcctggagatgtttcccctggttttgccttcgataccctctgtgatcttggattggtccttcgtctgtttccaccctccccctaccagcctcatatttctccttctgttaccttctgtatgctgtattggctctaaggtcttttcaattaataataaattggtgtatgtgcttctttgaatattctcatttagaagatgaatatatgttgacccccaacgatactga

SEQ ID NO: 434269 - DNA, 4392 bp, Homo sapiens
ggggggggcggaggctccgtggaaatgtgtcggtgacattgaatggggagaccgagcgcgagcgaggcgcgcgcgcgcacacgcgcactcacggccccgctcgctccgagatccccggccacgtaagtaactattaataccgcctcgccgggggatgcgggcgtgctgagcgcggggattggcctcgggcaccgtcggccgtcccctttaatttttaaatacacggtcccctcttttctctggggggggcaagcaagaaatcaaagaaggaggagacaagccgtcaattttctccaaaacaaaccccaccgggcaatttggtctcggggtagggggagacggggtgattgcaaattattccaggacgagatccagttctccagcgggaaaggggcaaaggaacgccgcgcgttggaagggccagggacgcagctccccttgcagcgcccgcaggacccccgcaagctcgtgccggcgaaatcggagaccgccgatctgtcctcgttctctcctgcacgtctggctgcattcggaggaagacctggggcgcgagcgagcggcgacagcatgagcctgtgctgacctccgcgcggcgggccgagcccagggctttgtcgcggtacctgcgcccagcccgcgccgcaactctgtgcccagcttttgcaatcttttgttggcagcgctgaccgcaccaagttaaatgctcccttgcaatttttcttttttttgtttgtttgtttaatttttggagagctcgcgatcttggaaaagcctcagacgccatctacagttaaaacgtaggtaactgccctctcccgcaccccccccttacacgccccccaccctttccaccaaaaaaagggggtgcagcgcggattctggctgccgtgcgtcgccagccggtagacccgtgcttgtttcctttctctttttgtttggcttctaacgcgttgggactgagtcgccgccgtgagctccccgaagactgcacaaactaccgcgggctcctccgccccgtctgcgattcggaagccggcctgggggtcgcgtcgggagccctggcgctgcagctccgcaccttagcagcccgggtactcatccagatccacgccggggacacacacacagagtaactaaaagtgcggcgattctgcacatcgccgactgctttggggtaacaaaaagacccgagttgcctgccgaccgaggacccccgggagccgggctcggagcagacgaggtatccggcggcgcccatttgggggcttctaactctttctccacgcagcccctcttctgtcccctcccctctcgctcccttttaaaatcagtggcaccgaggcgcctgcagccgcactcgccagcgactcatctctccagcgggtttttttttgtttgtcgtgtgcgatcctcacactcatgaacatacacaggtctacccccatcacaatagcgagatatgggagatcgcggaacaaaacccaggatttcgaagagttgtcgtctataaggtccgcggagcccagccagagtttcagcccgaacctcggctccccgagcccgcccgagactccgaacttgtcgcattgcgtttcttgtatcgggaaatacttattgttggaacctctggagggagaccacgtttttcgtgccgtgcatctgcacagcggagaggagctggtgtgcaaggtgtttgatatcagctgctaccaggaatccctggcaccgtgcttttgcctgtctgctcatagtaacatcaaccaaatcactgaaattatcctgggtgagaccaaagcctatgtgttctttgagcgaagctatggggacatgcattccttcgtccgcacctgcaagaagctgagagaggaggaggcagccagactgttctaccagattgcctcggcagtggcccactgccatgacggggggctggtgctgcgggacctcaagctgcggaaattcatctttaaggacgaagagaggactcgggtcaagctggaaagcctggaagacgcctacattctgcggggagatgatgattccctctccgacaagcatggctgcccggcttacgtaagcccagagatcttgaacaccagtggcagctactcgggcaaagcagccgacgtgtggagcctgggggtgatgctgtacaccatgttggtggggcggtaccctttccatgacattgaacccagctccctcttcagcaagatccggcgtggccagttcaacattccagagactctgtcgcccaaggccaagtgcctcatccgaagcattctgcgtcgggagccctcagagcggctgacctcgcaggaaattctggaccatccttggttttctacagattttagcgtctcgaattcagcatatggtgctaaggaagtgtctgaccagctggtgccggacgtcaacatggaagagaacttggaccctttctttaactgagctcatgccccacggagacttagcaggttccaggagtgagcgagggcagcggaaaggagttcttccgggggacacgaattgcctggctgagtagcaagaaagacacactcttaagtttcttggttcagagcaggaaaaccttcaaggagctgactgaccacgtagcatgggggcaagaggcgtgggatggggattggggtgagatggatgggagcccgctggagcttgtcttccctaacatagcctgggagaccaccccttgccacttgggccacttccgcctaccccacttttcattttgttccaaaatagttgcagatcctgacagaatcaaaactctctgcctcaaacacacatcctggcatcgcactgttagcatttaacttcttgttaggattcagggaaggaacagttggccaagaattttttttcttttaaacaagccaaccacctagctggtaattaatgaggttcacttaaaaaaaaaattcggtgcacacagactgacatgaaacctgggtgctacagtaaaagaaaacaaaagtccagtttgtgtctcttaatcgctcacttcaactcatttcttctaaataaactatttaatatcctggtcaggaaatgacatgttaatgctttgctccctgaagggggaaaaaatctgtcctttaacaagctattctgttttgtgtcaattggttcgtggcaggaagctattagaagtcaaacgtccagatgcattactgctatcttagtttaaagggggaaagaaaagggaagaagaaaggaaaagagaaatccaactcctttttcatgttttgcttttgaacaatgagggtttgtgtgacaggcattcctctatgctgagatgatagcaatggcctgagattttagcaagctcctggagtctgatgcttttgcagtactctgatcgcaactaaacatttgtctttgttttattagaaactagtgaaacaaagcaggttgtcccacatgtataaaatacagggcagctatttagttttctttacagagaatgatccttttaaggcttgtaaggccctctggtttggacaaaaaccctcagtagagacaagcgggaaggataattagctgaaagctatgatgatataaataaaaacagctctctatcccaatacgcacctttgtattttcaagaactcttctatttattaaggaaaatgtcacattgtgatgtattaagccagtacttcaattacgggttgacttgggatgacatattacatgctgtagttaacatttataattctttttccttgtttgagtatttctgtctctgaaataaccttttacttggcttttctagatagctttatttgatttcgagtggcaaaatgttttttattacggcttttctattgctgtatgatacagaactcttttggcataaatatttgtgttcccagtacctcacttgttcggatttgactgcctgtatatgttttgtgaaatggtcctgtttttgggtaggtgacacgtggactctagtatgtaaatgttacttgaatctgtgcttcataatagtgtgtggcatgtatgtgcagactcttggatgctttatgcctgcgcagcaggagccctgtcctcacgttcccaggagggcggcttcacccttcgtaaccaggagacaaggcggccatggatttgcccttgattctattttgctaatggaagatagaaaggagagaaggtttttttttttttttaacattctgaagatggtgctgtgtcaagaaggaccttttttttcccctctcccctattttttaagtaccttggaggaggagaggttggtgacatgcatggtggggatctatggcctctggtgctttgtcctgtatttggtttaatgtttttgtcctaatctcttcaatcaataaaattgtgcgtatttaactaaaa

SEQ ID NO: 434270 - DNA, 4151 bp, Homo sapiens
ggggggggcggaggctccgtggaaatgtgtcggtgacattgaatggggagaccgagcgcgagcgaggcgcgcgcgcgcacacgcgcactcacggccccgctcgctccgagatccccggccacgacgagatccagttctccagcgggaaaggggcaaaggaacgccgcgcgttggaagggccagggacgcagctccccttgcagcgcccgcaggacccccgcaagctcgtgccggcgaaatcggagaccgccgatctgtcctcgttctctcctgcacgtctggctgcattcggaggaagacctggggcgcgagcgagcggcgacagcatgagcctgtgctgacctccgcgcggcgggccgagcccagggctttgtcgcggtacctgcgcccagcccgcgccgcaactctgtgcccagcttttgcaatcttttgttggcagcgctgaccgcaccaagttaaatgctcccttgcaatttttcttttttttgtttgtttgtttaatttttggagagctcgcgatcttggaaaagcctcagacgccatctacagttaaaacgtaggtaactgccctctcccgcaccccccccttacacgccccccaccctttccaccaaaaaaagggggtgcagcgcggattctggctgccgtgcgtcgccagccggtagacccgtgcttgtttcctttctctttttgtttggcttctaacgcgttgggactgagtcgccgccgtgagctccccgaagactgcacaaactaccgcgggctcctccgccccgtctgcgattcggaagccggcctgggggtcgcgtcgggagccctggcgctgcagctccgcaccttagcagcccgggtactcatccagatccacgccggggacacacacacagagtaactaaaagtgcggcgattctgcacatcgccgactgctttggggtaacaaaaagacccgagttgcctgccgaccgaggacccccgggagccgggctcggagcagacgaggtatccggcggcgcccatttgggggcttctaactctttctccacgcagcccctcttctgtcccctcccctctcgctcccttttaaaatcagtggcaccgaggcgcctgcagccgcactcgccagcgactcatctctccagcgggtttttttttgtttgtcgtgtgcgatcctcacactcatgaacatacacaggtctacccccatcacaatagcgagatatgggagatcgcggaacaaaacccaggatttcgaagagttgtcgtctataaggtccgcggagcccagccagagtttcagcccgaacctcggctccccgagcccgcccgagactccgaacttgtcgcattgcgtttcttgtatcgggaaatacttattgttggaacctctggagggagaccacgtttttcgtgccgtgcatctgcacagcggagaggagctggtgtgcaaggtgtttgatatcagctgctaccaggaatccctggcaccgtgcttttgcctgtctgctcatagtaacatcaaccaaatcactgaaattatcctgggtgagaccaaagcctatgtgttctttgagcgaagctatggggacatgcattccttcgtccgcacctgcaagaagctgagagaggaggaggcagccagactgttctaccagattgcctcggcagtggcccactgccatgacggggggctggtgctgcgggacctcaagctgcggaaattcatctttaaggacgaagagaggactcgggtcaagctggaaagcctggaagacgcctacattctgcggggagatgatgattccctctccgacaagcatggctgcccggcttacgtaagcccagagatcttgaacaccagtggcagctactcgggcaaagcagccgacgtgtggagcctgggggtgatgctgtacaccatgttggtggggcggtaccctttccatgacattgaacccagctccctcttcagcaagatccggcgtggccagttcaacattccagagactctgtcgcccaaggccaagtgcctcatccgaagcattctgcgtcgggagccctcagagcggctgacctcgcaggaaattctggaccatccttggttttctacagattttagcgtctcgaattcagcatatggtgctaaggaagtgtctgaccagctggtgccggacgtcaacatggaagagaacttggaccctttctttaactgagctcatgccccacggagacttagcaggttccaggagtgagcgagggcagcggaaaggagttcttccgggggacacgaattgcctggctgagtagcaagaaagacacactcttaagtttcttggttcagagcaggaaaaccttcaaggagctgactgaccacgtagcatgggggcaagaggcgtgggatggggattggggtgagatggatgggagcccgctggagcttgtcttccctaacatagcctgggagaccaccccttgccacttgggccacttccgcctaccccacttttcattttgttccaaaatagttgcagatcctgacagaatcaaaactctctgcctcaaacacacatcctggcatcgcactgttagcatttaacttcttgttaggattcagggaaggaacagttggccaagaattttttttcttttaaacaagccaaccacctagctggtaattaatgaggttcacttaaaaaaaaaattcggtgcacacagactgacatgaaacctgggtgctacagtaaaagaaaacaaaagtccagtttgtgtctcttaatcgctcacttcaactcatttcttctaaataaactatttaatatcctggtcaggaaatgacatgttaatgctttgctccctgaagggggaaaaaatctgtcctttaacaagctattctgttttgtgtcaattggttcgtggcaggaagctattagaagtcaaacgtccagatgcattactgctatcttagtttaaagggggaaagaaaagggaagaagaaaggaaaagagaaatccaactcctttttcatgttttgcttttgaacaatgagggtttgtgtgacaggcattcctctatgctgagatgatagcaatggcctgagattttagcaagctcctggagtctgatgcttttgcagtactctgatcgcaactaaacatttgtctttgttttattagaaactagtgaaacaaagcaggttgtcccacatgtataaaatacagggcagctatttagttttctttacagagaatgatccttttaaggcttgtaaggccctctggtttggacaaaaaccctcagtagagacaagcgggaaggataattagctgaaagctatgatgatataaataaaaacagctctctatcccaatacgcacctttgtattttcaagaactcttctatttattaaggaaaatgtcacattgtgatgtattaagccagtacttcaattacgggttgacttgggatgacatattacatgctgtagttaacatttataattctttttccttgtttgagtatttctgtctctgaaataaccttttacttggcttttctagatagctttatttgatttcgagtggcaaaatgttttttattacggcttttctattgctgtatgatacagaactcttttggcataaatatttgtgttcccagtacctcacttgttcggatttgactgcctgtatatgttttgtgaaatggtcctgtttttgggtaggtgacacgtggactctagtatgtaaatgttacttgaatctgtgcttcataatagtgtgtggcatgtatgtgcagactcttggatgctttatgcctgcgcagcaggagccctgtcctcacgttcccaggagggcggcttcacccttcgtaaccaggagacaaggcggccatggatttgcccttgattctattttgctaatggaagatagaaaggagagaaggtttttttttttttttaacattctgaagatggtgctgtgtcaagaaggaccttttttttcccctctcccctattttttaagtaccttggaggaggagaggttggtgacatgcatggtggggatctatggcctctggtgctttgtcctgtatttggtttaatgtttttgtcctaatctcttcaatcaataaaattgtgcgtatttaactaaaa

SEQ ID NO: 434271 - DNA, 4355 bp, Homo sapiens
ggggggggcggaggctccgtggaaatgtgtcggtgacattgaatggggagaccgagcgcgagcgaggcgcgcgcgcgcacacgcgcactcacggccccgctcgctccgagatccccggccacgtaagtaactattaataccgcctcgccgggggatgcgggcgtgctgagcgcggggattggcctcgggcaccgtcggccgtcccctttaatttttaaatacacggtcccctcttttctctggggggggcaagcaagaaatcaaagaaggaggagacaagccgtcaattttctccaaaacaaaccccaccgggcaatttggtctcggggtagggggagacggggtgattgcaaattattccaggacgagatccagttctccagcgggaaaggggcaaaggaacgccgcgcgttggaagggccagggacgcagctccccttgcagcgcccgcaggacccccgcaagctcgtgccggcgaaatcggagaccgccgatctgtcctcgttctctcctgcacgtctggctgcattcggaggaagacctggggcgcgagcgagcggcgacagcatgagcctgtgctgacctccgcgcggcgggccgagcccagggctttgtcgcggtacctgcgcccagcccgcgccgcaactctgtgcccagcttttgcaatcttttgttggcagcgctgaccgcaccaagttaaatgctcccttgcaatttttcttttttttgtttgtttgtttaatttttggagagctcgcgatcttggaaaagcctcagacgccatctacagttaaaacgtaggtaactgccctctcccgcaccccccccttacacgccccccaccctttccaccaaaaaaagggggtgcagcgcggattctggctgccgtgcgtcgccagccggtagacccgtgcttgtttcctttctctttttgtttggcttctaacgcgttgggactgagtcgccgccgtgagctccccgaagactgcacaaactaccgcgggctcctccgccccgtctgcgattcggaagccggcctgggggtcgcgtcgggagccctggcgctgcagctccgcaccttagcagcccgggtactcatccagatccacgccggggacacacacacagagtaactaaaagtgcggcgattctgcacatcgccgactgctttggggtaacaaaaagacccgagttgcctgccgaccgaggacccccgggagccgggctcggagcagacgaggtatccggcggcgcccatttgggggcttctaactcttttcccttttaaaatcagtggcaccgaggcgcctgcagccgcactcgccagcgactcatctctccagcgggtttttttttgtttgtcgtgtgcgatcctcacactcatgaacatacacaggtctacccccatcacaatagcgagatatgggagatcgcggaacaaaacccaggatttcgaagagttgtcgtctataaggtccgcggagcccagccagagtttcagcccgaacctcggctccccgagcccgcccgagactccgaacttgtcgcattgcgtttcttgtatcgggaaatacttattgttggaacctctggagggagaccacgtttttcgtgccgtgcatctgcacagcggagaggagctggtgtgcaaggtgtttgatatcagctgctaccaggaatccctggcaccgtgcttttgcctgtctgctcatagtaacatcaaccaaatcactgaaattatcctgggtgagaccaaagcctatgtgttctttgagcgaagctatggggacatgcattccttcgtccgcacctgcaagaagctgagagaggaggaggcagccagactgttctaccagattgcctcggcagtggcccactgccatgacggggggctggtgctgcgggacctcaagctgcggaaattcatctttaaggacgaagagaggactcgggtcaagctggaaagcctggaagacgcctacattctgcggggagatgatgattccctctccgacaagcatggctgcccggcttacgtaagcccagagatcttgaacaccagtggcagctactcgggcaaagcagccgacgtgtggagcctgggggtgatgctgtacaccatgttggtggggcggtaccctttccatgacattgaacccagctccctcttcagcaagatccggcgtggccagttcaacattccagagactctgtcgcccaaggccaagtgcctcatccgaagcattctgcgtcgggagccctcagagcggctgacctcgcaggaaattctggaccatccttggttttctacagattttagcgtctcgaattcagcatatggtgctaaggaagtgtctgaccagctggtgccggacgtcaacatggaagagaacttggaccctttctttaactgagctcatgccccacggagacttagcaggttccaggagtgagcgagggcagcggaaaggagttcttccgggggacacgaattgcctggctgagtagcaagaaagacacactcttaagtttcttggttcagagcaggaaaaccttcaaggagctgactgaccacgtagcatgggggcaagaggcgtgggatggggattggggtgagatggatgggagcccgctggagcttgtcttccctaacatagcctgggagaccaccccttgccacttgggccacttccgcctaccccacttttcattttgttccaaaatagttgcagatcctgacagaatcaaaactctctgcctcaaacacacatcctggcatcgcactgttagcatttaacttcttgttaggattcagggaaggaacagttggccaagaattttttttcttttaaacaagccaaccacctagctggtaattaatgaggttcacttaaaaaaaaaattcggtgcacacagactgacatgaaacctgggtgctacagtaaaagaaaacaaaagtccagtttgtgtctcttaatcgctcacttcaactcatttcttctaaataaactatttaatatcctggtcaggaaatgacatgttaatgctttgctccctgaagggggaaaaaatctgtcctttaacaagctattctgttttgtgtcaattggttcgtggcaggaagctattagaagtcaaacgtccagatgcattactgctatcttagtttaaagggggaaagaaaagggaagaagaaaggaaaagagaaatccaactcctttttcatgttttgcttttgaacaatgagggtttgtgtgacaggcattcctctatgctgagatgatagcaatggcctgagattttagcaagctcctggagtctgatgcttttgcagtactctgatcgcaactaaacatttgtctttgttttattagaaactagtgaaacaaagcaggttgtcccacatgtataaaatacagggcagctatttagttttctttacagagaatgatccttttaaggcttgtaaggccctctggtttggacaaaaaccctcagtagagacaagcgggaaggataattagctgaaagctatgatgatataaataaaaacagctctctatcccaatacgcacctttgtattttcaagaactcttctatttattaaggaaaatgtcacattgtgatgtattaagccagtacttcaattacgggttgacttgggatgacatattacatgctgtagttaacatttataattctttttccttgtttgagtatttctgtctctgaaataaccttttacttggcttttctagatagctttatttgatttcgagtggcaaaatgttttttattacggcttttctattgctgtatgatacagaactcttttggcataaatatttgtgttcccagtacctcacttgttcggatttgactgcctgtatatgttttgtgaaatggtcctgtttttgggtaggtgacacgtggactctagtatgtaaatgttacttgaatctgtgcttcataatagtgtgtggcatgtatgtgcagactcttggatgctttatgcctgcgcagcaggagccctgtcctcacgttcccaggagggcggcttcacccttcgtaaccaggagacaaggcggccatggatttgcccttgattctattttgctaatggaagatagaaaggagagaaggtttttttttttttttaacattctgaagatggtgctgtgtcaagaaggaccttttttttcccctctcccctattttttaagtaccttggaggaggagaggttggtgacatgcatggtggggatctatggcctctggtgctttgtcctgtatttggtttaatgtttttgtcctaatctcttcaatcaataaaattgtgcgtatttaactaaaa

SEQ ID NO: 434272 - DNA, 4338 bp, Homo sapiens
ggggggggcggaggctccgtggaaatgtgtcggtgacattgaatggggagaccgagcgcgagcgaggcgcgcgcgcgcacacgcgcactcacggccccgctcgctccgagatccccggccacgtaagtaactattaataccgcctcgccgggggatgcgggcgtgctgagcgcggggattggcctcgggcaccgtcggccgtcccctttaatttttaaatacacggtcccctcttttctctggggggggcaagcaagaaatcaaagaaggaggagacaagccgtcaattttctccaaaacaaaccccaccgggcaatttggtctcggggtagggggagacggggtgattgcaaattattccaggacgagatccagttctccagcgggaaaggggcaaaggaacgccgcgcgttggaagggccagggacgcagctccccttgcagcgcccgcaggacccccgcaagctcgtgccggcgaaatcggagaccgccgatctgtcctcgttctctcctgcacgtctggctgcattcggaggaagacctggggcgcgagcgagcggcgacagcatgagcctgtgctgacctccgcgcggcgggccgagcccagggctttgtcgcggtacctgcgcccagcccgcgccgcaactctgtgcccagcttttgcaatcttttgttggcagcgctgaccgcaccaagttaaatgctcccttgcaatttttcttttttttgtttgtttgtttaatttttggagagctcgcgatcttggaaaagcctcagacgccatctacagttaaaacgtaggtaactgccctctcccgcaccccccccttacacgccccccaccctttccaccaaaaaaagggggtgcagcgcggattctggctgccgtgcgtcgccagccggtagacccgtgcttgtttcctttctctttttgtttggcttctaacgcgttgggactgagtcgccgccgtgagctccccgaagactgcacaaactaccgcgggctcctccgccccgtctgcgattcggaagccggcctgggggtcgcgtcgggagccctggcgctgcagctccgcaccttagcagcccgggtactcatccagatccacgccggggacacacacacagagtaactaaaagtgcggcgattctgcacatcgccgactgctttggggtaacaaaaagacccgagttgcctgccgaccgaggacccccgggagccgggctcggagcagacgaggtatccggcggcgcccatttgggggcttctaactctttctccacgcagcccctcttctgtcccctcccctctcgctcccttttaaaatcagtggcaccgaggcgcctgcagccgcactcgccagcgactcatctctccagcgggtttttttttgtttgtcgtgtgcgatcctcacactcatgaacatacacaggtctacccccatcacaatagcgagatatgggagatcgcggaacaaaacccaggatttcgaagagttgtcgtctataaggtccgcggagcccagccagagtttcagcccgaacctcggctccccgagcccgcccgagactccgaacttgtcgcattgcgtttcttgtatcgggaaatacttattgttggaacctctggagggagaccacgtttttcgtgccgtgcatctgcacagcggagaggagctggtgtgcaaggtgtttgatatcagctgctaccaggaatccctggcaccgtgcttttgcctgtctgctcatagtaacatcaaccaaatcactgaaattatcctgggtgagaccaaagcctatgtgttctttgagcgaagctatggggacatgcattccttcgtccgcacctgcaagaagctgagagaggaggaggcagccagactgttctaccagattgcctcggcagtggcccactgccatgacggggggctggtgctgcgggacctcaagctgcggaaattcatctttaaggacgaagagaggactcgggtcaagctggaaagcctggaagacgcctacattctgcggggagatgatgattccctctccgacaagcatggctgcccggcttacgtaagcccagagatcttgaacaccagtggcagctactcgggcaaagcagccgacgtgtggagcctgggggtgatgctgtacaccatgttggtggggcggtaccctttccatgacattgaacccagctccctcttcagcaagatccggcgtggccagttcaacattccagagactctgtcgcccaaggccaagtgcctcatccgaagcattctgcgtcgggagccctcagagcggctgacctcgcaggaaattctggaccatccttggttttctacagattttagcgtctcgaattcagcatatggtgctaaggaagtgtctgaccagctggtgccggacgtcaacatggaagagaacttggaccctttctttaactgagctcatgccccacggagacttagcaggttccaggagtgagcgagggcagcggaaaggagttcttccgggggacacgaattgcctggctgagtagcaagaaagacacactcttaagtttcttggttcagagcaggaaaaccttcaaggagctgactgaccacgtagcatgggggcaagaggcgtgggatggggattggggtgagatggatgggagcccgctggagcttgtcttccctaacatagcctgggagaccaccccttgccacttgggccacttccgcctaccccacttttcattttgttccaaaatagttgcagatcctgacagaatcaaaactctctgcctcaaacacacatcctggcatcgcactgttagcatttaacttcttgttaggattcagggaaggaacagttggccaagaattttttttcttttaaacaagccaaccacctagctggtaattaatgaggttcacttaaaaaaaaaattcggtgcacacagactgacatgaaacctgggtgctacagtaaaagaaaacaaaagtccagtttgtgtctcttaatcgctcacttcaactcatttcttctaaataaactatttaatatcctggtcaggaaatgacatgttaatgctttgctccctgaagggggaaaaaatctgtcctttaacaagctattctgttttgtgtcaattggttcgtggcaggaagctattagaagtcaaacgtccagatgcattactgctatcttagtttaaagggggaaagaaaagggaagaagaaaggtgtgacaggcattcctctatgctgagatgatagcaatggcctgagattttagcaagctcctggagtctgatgcttttgcagtactctgatcgcaactaaacatttgtctttgttttattagaaactagtgaaacaaagcaggttgtcccacatgtataaaatacagggcagctatttagttttctttacagagaatgatccttttaaggcttgtaaggccctctggtttggacaaaaaccctcagtagagacaagcgggaaggataattagctgaaagctatgatgatataaataaaaacagctctctatcccaatacgcacctttgtattttcaagaactcttctatttattaaggaaaatgtcacattgtgatgtattaagccagtacttcaattacgggttgacttgggatgacatattacatgctgtagttaacatttataattctttttccttgtttgagtatttctgtctctgaaataaccttttacttggcttttctagatagctttatttgatttcgagtggcaaaatgttttttattacggcttttctattgctgtatgatacagaactcttttggcataaatatttgtgttcccagtacctcacttgttcggatttgactgcctgtatatgttttgtgaaatggtcctgtttttgggtaggtgacacgtggactctagtatgtaaatgttacttgaatctgtgcttcataatagtgtgtggcatgtatgtgcagactcttggatgctttatgcctgcgcagcaggagccctgtcctcacgttcccaggagggcggcttcacccttcgtaaccaggagacaaggcggccatggatttgcccttgattctattttgctaatggaagatagaaaggagagaaggtttttttttttttttaacattctgaagatggtgctgtgtcaagaaggaccttttttttcccctctcccctattttttaagtaccttggaggaggagaggttggtgacatgcatggtggggatctatggcctctggtgctttgtcctgtatttggtttaatgtttttgtcctaatctcttcaatcaataaaattgtgcgtatttaactaaaa

SEQ ID NO: 434273 - DNA, 2825 bp, Homo sapiens
ggggggggcggaggctccgtggaaatgtgtcggtgacattgaatggggagaccgagcgcgagcgaggcgcgcgcgcgcacacgcgcactcacggccccgctcgctccgagatccccggccacgtgtttgatatcagctgctaccaggaatccctggcaccgtgcttttgcctgtctgctcatagtaacatcaaccaaatcactgaaattatcctgggtgagaccaaagcctatgtgttctttgagcgaagctatggggacatgcattccttcgtccgcacctgcaagaagctgagagaggaggaggcagccagactgttctaccagattgcctcggcagtggcccactgccatgacggggggctggtgctgcgggacctcaagctgcggaaattcatctttaaggacgaagagaggactcgggtcaagctggaaagcctggaagacgcctacattctgcggggagatgatgattccctctccgacaagcatggctgcccggcttacgtaagcccagagatcttgaacaccagtggcagctactcgggcaaagcagccgacgtgtggagcctgggggtgatgctgtacaccatgttggtggggcggtaccctttccatgacattgaacccagctccctcttcagcaagatccggcgtggccagttcaacattccagagactctgtcgcccaaggccaagtgcctcatccgaagcattctgcgtcgggagccctcagagcggctgacctcgcaggaaattctggaccatccttggttttctacagattttagcgtctcgaattcagcatatggtgctaaggaagtgtctgaccagctggtgccggacgtcaacatggaagagaacttggaccctttctttaactgagctcatgccccacggagacttagcaggttccaggagtgagcgagggcagcggaaaggagttcttccgggggacacgaattgcctggctgagtagcaagaaagacacactcttaagtttcttggttcagagcaggaaaaccttcaaggagctgactgaccacgtagcatgggggcaagaggcgtgggatggggattggggtgagatggatgggagcccgctggagcttgtcttccctaacatagcctgggagaccaccccttgccacttgggccacttccgcctaccccacttttcattttgttccaaaatagttgcagatcctgacagaatcaaaactctctgcctcaaacacacatcctggcatcgcactgttagcatttaacttcttgttaggattcagggaaggaacagttggccaagaattttttttcttttaaacaagccaaccacctagctggtaattaatgaggttcacttaaaaaaaaaattcggtgcacacagactgacatgaaacctgggtgctacagtaaaagaaaacaaaagtccagtttgtgtctcttaatcgctcacttcaactcatttcttctaaataaactatttaatatcctggtcaggaaatgacatgttaatgctttgctccctgaagggggaaaaaatctgtcctttaacaagctattctgttttgtgtcaattggttcgtggcaggaagctattagaagtcaaacgtccagatgcattactgctatcttagtttaaagggggaaagaaaagggaagaagaaaggaaaagagaaatccaactcctttttcatgttttgcttttgaacaatgagggtttgtgtgacaggcattcctctatgctgagatgatagcaatggcctgagattttagcaagctcctggagtctgatgcttttgcagtactctgatcgcaactaaacatttgtctttgttttattagaaactagtgaaacaaagcaggttgtcccacatgtataaaatacagggcagctatttagttttctttacagagaatgatccttttaaggcttgtaaggccctctggtttggacaaaaaccctcagtagagacaagcgggaaggataattagctgaaagctatgatgatataaataaaaacagctctctatcccaatacgcacctttgtattttcaagaactcttctatttattaaggaaaatgtcacattgtgatgtattaagccagtacttcaattacgggttgacttgggatgacatattacatgctgtagttaacatttataattctttttccttgtttgagtatttctgtctctgaaataaccttttacttggcttttctagatagctttatttgatttcgagtggcaaaatgttttttattacggcttttctattgctgtatgatacagaactcttttggcataaatatttgtgttcccagtacctcacttgttcggatttgactgcctgtatatgttttgtgaaatggtcctgtttttgggtaggtgacacgtggactctagtatgtaaatgttacttgaatctgtgcttcataatagtgtgtggcatgtatgtgcagactcttggatgctttatgcctgcgcagcaggagccctgtcctcacgttcccaggagggcggcttcacccttcgtaaccaggagacaaggcggccatggatttgcccttgattctattttgctaatggaagatagaaaggagagaaggtttttttttttttttaacattctgaagatggtgctgtgtcaagaaggaccttttttttcccctctcccctattttttaagtaccttggaggaggagaggttggtgacatgcatggtggggatctatggcctctggtgctttgtcctgtatttggtttaatgtttttgtcctaatctcttcaatcaataaaattgtgcgtatttaactaaaa

SEQ ID NO: 434274 - DNA, 2790 bp, Homo sapiens
tgaattctgtggtgccctatcattatgcaaatgtgactttgagaaagctagttaatctcttgttccctcatcgcaggggtgatgatgatgtgattcatggttcgctaaggtgctcaaggtttgagctccccagtggattatcagctgcatgaaaagaccttgtcagtcttgttcacccatgtgggtgtcctcagccctggaatagtagctggcagctagaaggtgctcagtgagtaatgtttggctggtcagatgaatgcgtgaatgaatgaatgtgaatgaggagtcttcagaaacactatagtcggttatgttatgatgctggtggtaacgtgtctctgagcaccctcaggagcttatgttttcctcctttcttgcaggactcgggtcaagctggaaagcctggaagacgcctacattctgcggggagatgatgattccctctccgacaagcatggctgcccggcttacgtaagcccagagatcttgaacaccagtggcagctactcgggcaaagcagccgacgtgtggagcctgggggtgatgctgtacaccatgttggtggggcggtaccctttccatgacattgaacccagctccctcttcagcaagatccggcgtggccagttcaacattccagagactctgtcgcccaaggccaagtgcctcatccgaagcattctgcgtcgggagccctcagagcggctgacctcgcaggaaattctggaccatccttggttttctacagattttagcgtctcgaattcagcatatggtgctaaggaagtgtctgaccagctggtgccggacgtcaacatggaagagaacttggaccctttctttaactgagctcatgccccacggagacttagcaggttccaggagtgagcgagggcagcggaaaggagttcttccgggggacacgaattgcctggctgagtagcaagaaagacacactcttaagtttcttggttcagagcaggaaaaccttcaaggagctgactgaccacgtagcatgggggcaagaggcgtgggatggggattggggtgagatggatgggagcccgctggagcttgtcttccctaacatagcctgggagaccaccccttgccacttgggccacttccgcctaccccacttttcattttgttccaaaatagttgcagatcctgacagaatcaaaactctctgcctcaaacacacatcctggcatcgcactgttagcatttaacttcttgttaggattcagggaaggaacagttggccaagaattttttttcttttaaacaagccaaccacctagctggtaattaatgaggttcacttaaaaaaaaaattcggtgcacacagactgacatgaaacctgggtgctacagtaaaagaaaacaaaagtccagtttgtgtctcttaatcgctcacttcaactcatttcttctaaataaactatttaatatcctggtcaggaaatgacatgttaatgctttgctccctgaagggggaaaaaatctgtcctttaacaagctattctgttttgtgtcaattggttcgtggcaggaagctattagaagtcaaacgtccagatgcattactgctatcttagtttaaagggggaaagaaaagggaagaagaaaggaaaagagaaatccaactcctttttcatgttttgcttttgaacaatgagggtttgtgtgacaggcattcctctatgctgagatgatagcaatggcctgagattttagcaagctcctggagtctgatgcttttgcagtactctgatcgcaactaaacatttgtctttgttttattagaaactagtgaaacaaagcaggttgtcccacatgtataaaatacagggcagctatttagttttctttacagagaatgatccttttaaggcttgtaaggccctctggtttggacaaaaaccctcagtagagacaagcgggaaggataattagctgaaagctatgatgatataaataaaaacagctctctatcccaatacgcacctttgtattttcaagaactcttctatttattaaggaaaatgtcacattgtgatgtattaagccagtacttcaattacgggttgacttgggatgacatattacatgctgtagttaacatttataattctttttccttgtttgagtatttctgtctctgaaataaccttttacttggcttttctagatagctttatttgatttcgagtggcaaaatgttttttattacggcttttctattgctgtatgatacagaactcttttggcataaatatttgtgttcccagtacctcacttgttcggatttgactgcctgtatatgttttgtgaaatggtcctgtttttgggtaggtgacacgtggactctagtatgtaaatgttacttgaatctgtgcttcataatagtgtgtggcatgtatgtgcagactcttggatgctttatgcctgcgcagcaggagccctgtcctcacgttcccaggagggcggcttcacccttcgtaaccaggagacaaggcggccatggatttgcccttgattctattttgctaatggaagatagaaaggagagaaggtttttttttttttttaacattctgaagatggtgctgtgtcaagaaggaccttttttttcccctctcccctattttttaagtaccttggaggaggagaggttggtgacatgcatggtggggatctatggcctctggtgctttgtcctgtatttggtttaatgtttttgtcctaatctcttcaatcaataaaattgtgcgtatttaactaaaa

SEQ ID NO: 434275 - DNA, 4627 bp, Homo sapiens
ggggggggcggaggctccgtggaaatgtgtcggtgacattgaatggggagaccgagcgcgagcgaggcgcgcgcgcgcacacgcgcactcacggccccgctcgctccgagatccccggccacgtaagtaactattaataccgcctcgccgggggatgcgggcgtgctgagcgcggggattggcctcgggcaccgtcggccgtcccctttaatttttaaatacacggtcccctcttttctctggggggggcaagcaagaaatcaaagaaggaggagacaagccgtcaattttctccaaaacaaaccccaccgggcaatttggtctcggggtagggggagacggggtgattgcaaattattccaggacgagatccagttctccagcgggaaaggggcaaaggaacgccgcgcgttggaagggccagggacgcagctccccttgcagcgcccgcaggacccccgcaagctcgtgccggcgaaatcggagaccgccgatctgtcctcgttctctcctgcacgtctggctgcattcggaggaagacctggggcgcgagcgagcggcgacagcatgagcctgtgctgacctccgcgcggcgggccgagcccagggctttgtcgcggtacctgcgcccagcccgcgccgcaactctgtgcccagcttttgcaatcttttgttggcagcgctgaccgcaccaagttaaatgctcccttgcaatttttcttttttttgtttgtttgtttaatttttggagagctcgcgatcttggaaaagcctcagacgccatctacagttaaaacgtaggtaactgccctctcccgcaccccccccttacacgccccccaccctttccaccaaaaaaagggggtgcagcgcggattctggctgccgtgcgtcgccagccggtagacccgtgcttgtttcctttctctttttgtttggcttctaacgcgttgggactgagtcgccgccgtgagctccccgaagactgcacaaactaccgcgggctcctccgccccgtctgcgattcggaagccggcctgggggtcgcgtcgggagccctggcgctgcagctccgcaccttagcagcccgggtactcatccagatccacgccggggacacacacacagagtaactaaaagtgcggcgattctgcacatcgccgactgctttggggtaacaaaaagacccgagttgcctgccgaccgaggacccccgggagccgggctcggagcagacgaggtatccggcggcgcccatttgggggcttctaactctttctccacgcagcccctcttctgtcccctcccctctcgctcccttttaaaatcagtggcaccgaggcgcctgcagccgcactcgccagcgactcatctctccagcgggtttttttttgtttgtcgtgtgcgatcctcacactcatgaacatacacaggtctacccccatcacaatagcgagatatgggagatcgcggaacaaaacccaggatttcgaagagttgtcgtctataaggtccgcggagcccagccagagtttcagcccgaacctcggctccccgagcccgcccgagactccgaacttgtcgcattgcgtttcttgtatcgggaaatacttattgttggaacctctggagggagaccacgtttttcgtgccgtgcatctgcacagcggagaggagctggtgtgcaaggtgtttgatatcagctgctaccaggaatccctggcaccgtgcttttgcctgtctgctcatagtaacatcaaccaaatcactgaaattatcctgggtgagaccaaagcctatgtgttctttgagcgaagctatggggacatgcattccttcgtccgcacctgcaagaagctgagagaggaggaggcagccagactgttctaccagattgcctcggcagtggcccactgccatgacggggggctggtgctgcgggacctcaagctgcggaaattcatctttaaggacgaagagaggactcgggtcaagctggaaagcctggaagacgcctacattctgcggggagatgatgattccctctccgacaagcatggctgcccggcttacgtaagcccagagatcttgaacaccagtggcagctactcgggcaaagcagccgacgtgtggagcctgggggtgatgctgtacaccatgttggtggggcggtaccctttccatgacattgaacccagctccctcttcagcaagatccggcgtggccagttcaacattccagagactctgtcgcccaaggccaagtgcctcatccgaagcattctgcgtcgggagccctcagagcggctgacctcgcaggaaattctggaccatccttggttttctacagattttagcgtctcgaattcagcatatggtgctaaggaagtgtctgaccagctggtgccggacgtcaacatggaagagaacttggaccctttctttaactgagctcatgccccacggagacttagcaggttccaggagtgagcgagggcagcggaaaggagttcttccgggggacacgaattgcctggctgagtagcaagaaagacacactcttaagtttcttggttcagagcaggaaaaccttcaaggagctgactgaccacgtagcatgggggcaagaggcgtgggatggggattggggtgagatggatgggagcccgctggagcttgtcttccctaacatagcctgggagaccaccccttgccacttgggccacttccgcctaccccacttttcattttgttccaaaatagttgcagatcctgacagaatcaaaactctctgcctcaaacacacatcctggcatcgcactgttagcatttaacttcttgttaggattcagggaaggaacagttggccaagaattttttttcttttaaacaagccaaccacctagctggtaattaatgaggttcacttaaaaaaaaaattcggtgcacacagactgacatgaaacctgggtgctacagtaaaagaaaacaaaagtccagtttgtgtctcttaatcgctcacttcaactcatttcttctaaataaactatttaatatcctggtcaggaaatgacatgttaatgctttgctccctgaagggggaaaaaatctgtcctttaacaagctattctgttttgtgtcaattggttcgtggcaggaagctattagaagtcaaacgtccagatgcattactgctatcttagtttaaagggggaaagaaaagggaagaagaaaggaaaagagaaatccaactcctttttcatgttttgcttttgaacaatgagggtttgtgtgacaggcattcctctatgctgagatgatagcaatggcctgagattttagcaagctcctggagtctgatgcttttgcagtactctgatcgcaactaaacatttgtctttgttttattagaaactagtgaaacaaagcaggttgtcccacatgtataaaatacagggcagctatttagttttctttacagagaatgatccttttaaggcttgtaaggccctctggtttggacaaaaaccctcagtagagacaagcgggaaggataattagctgaaagctatgatgatataaataaaaacagctctctatcccaatacgcacctttgtattttcaagaactcttctatttattaaggaaaatgtcacattgtgatgtattaagccagtacttcaattacgggttgacttgggatgacatattacatgctgtagttaacatttataattctttttccttgtttgagtatttctgtctctgaaataaccttttacttggcttttctagatagctttatttgatttcgagtggcaaaatgttttttattacggcttttctattgctgtatgatacagaactcttttggcataaatatttgtgttcccagtacctcacttgttcggatttgactgcctgtatatgttttgtgaaatggtcctgtttttgggtaggtgacacgtggactctagtatgtaaatgttacttgaatctgtgcttcataatagtgtgtggcatgtatgtgcagactcttggatgctttatgcctgcgcagcaggagccctgtcctcacgttcccaggagggcggcttcacccttcgtaaccaggagacaaggcggccatggatttgcccttgattctattttgctaatggaagatagaaaggagagaaggtttttttttttttttaacattctgaagatggtgctgtgtcaagaaggaccttttttttcccctctcccctattttttaagtaccttggaggaggagaggttggtgacatgcatggtggggatctatggcctctggtgctttgtcctgtatttggtttaatgtttttgtcctaatctcttcaatcaataaaattgtgcgtatttaactaaaaaaaaaaaaaaaaaaaaaaaaaaaaaacggcacgagctttgtcaagccagcagtcgtgacggtggggacttcccggaggaggactacgggttggacgagatatgacacctaaggaattcccctgcttcagctcctagctcagccactgactgcccctcctgtgtgtgccatggcccttttctcctgaccccattttaattttattcattttttcctttgccattgatttttgagac

SEQ ID NO: 434276 - DNA, 4339 bp, Homo sapiens
ggggggggcggaggctccgtggaaatgtgtcggtgacattgaatggggagaccgagcgcgagcgaggcgcgcgcgcgcacacgcgcactcacggccccgctcgctccgagatccccggccacgtaagtaactattaataccgcctcgccgggggatgcgggcgtgctgagcgcggggattggcctcgggcaccgtcggccgtcccctttaatttttaaatacacggtcccctcttttctctggggggggcaagcaagaaatcaaagaaggaggagacaagccgtcaattttctccaaaacaaaccccaccgggcaatttggtctcggggtagggggagacggggtgattgcaaattattccaggacgagatccagttctccagcgggaaaggggcaaaggaacgccgcgcgttggaagggccagggacgcagctccccttgcagcgcccgcaggacccccgcaagctcgtgccggcgaaatcggagaccgccgatctgtcctcgttctctcctgcacgtctggctgcattcggaggaagacctggggcgcgagcgagcggcgacagcatgagcctgtgctgacctccgcgcggcgggccgagcccagggctttgtcgcggtacctgcgcccagcccgcgccgcaactctgtgcccagcttttgcaatcttttgttggcagcgctgaccgcaccaagttaaatgctcccttgcaatttttcttttttttgtttgtttgtttaatttttggagagctcgcgatcttggaaaagcctcagacgccatctacagttaaaacgtaggtaactgccctctcccgcaccccccccttacacgccccccaccctttccaccaaaaaaagggggtgcagcgcggattctggctgccgtgcgtcgccagccggtagacccgtgcttgtttcctttctctttttgtttggcttctaacgcgttgggactgagtcgccgccgtgagctccccgaagactgcacaaactaccgcgggctcctccgccccgtctgcgattcggaagccggcctgggggtcgcgtcgggagccctggcgctgcagctccgcaccttagcagcccgggtactcatccagatccacgccggggacacacacacagagtaactaaaagtgcggcgattctgcacatcgccgactgctttggggtaacaaaaagacccgagttgcctgccgaccgaggacccccgggagccgggctcggagcagacgaggtatccggcggcgcccatttgggggcttctaactctttctccacgcagcccctcttctgtcccctcccctctcgctcccttttaaaatcagtggcaccgaggcgcctgcagccgcactcgccagcgactcatctctccagcgggtttttttttgtttgtcgtgtgcgatcctcacactcatgaacatacacaggtctacccccatcacaatagcgagatatgggagatcgcggaacaaaacccaggatttcgaagagttgtcgtctataaggtccgcggagcccagccagagtttcagcccgaacctcggctccccgagcccgcccgagactccgaacttgtcgcattgcgtttcttgtatcgggaaatacttattgttggaacctctggagggagaccacgtttttcgtgccgtgcatctgcacagcggagaggagctggtgtgcaaggtgtttgatatcagctgctaccaggaatccctggcaccgtgcttttgcctgtctgctcatagtaacatcaaccaaatcactgaaattatcctgggtgagaccaaagcctatgtgttctttgagcgaagctatggggacatgcattccttcgtccgcacctgcaagaagctgagagaggaggaggcagccagactgttctaccagattgcctcggcagtggcccactgccatgacggggggctggtgctgcgggacctcaagctgcggaaattcatctttaaggacgaagagaggactcgggtcaagctggaaagcctggaagacgcctacattctgcggggagatgatgattccctctccgacaagcatggctgcccggcttacgtaagcccagagatcttgaacaccagtggcagctactcgggcaaagcagccgacgtgtggagcctgggggtgatgctgtacaccatgttggtggggcggtaccctttccatgacattgaacccagctccctcttcagcaagatccggcgtggccagttcaacattccagagactctgtcgcccaaggccaagtgcctcatccgaagcattctgcgtcgggagccctcagagcggctgacctcgcaggaaattctggaccatccttggttttctacagattttagcgtctcgaattcagcatatggtgctaaggaagtgtctgaccagctggtgccggacgtcaacatggaagagaacttggaccctttctttaactgagctcatgccccacggagacttagcaggttccaggagtgagcgagggcagcggaaaggagttcttccgggggacacgaattgcctggctgagtagcaagaaagacacactcttaagtttcttggttcagagcaggaaaaccttcaaggagctgactgaccacgtagcatgggggcaagaggcgtgggatggggattggggtgagatggatgggagcccgctggagcttgtcttccctaacatagcctgggagaccaccccttgccacttgggccacttccgcctaccccacttttcattttgttccaaaatagttgcagatcctgacagaatcaaaactctctgcctcaaacacacatcctggcatcgcactgttagcatttaacttcttgttaggattcagggaaggaacagttggccaagaattttttttcttttaaacaagccaaccacctagctggtaattaatgaggttcacttaaaaaaaaaattcggtgcacacagactgacatgaaacctgggtgctacagtaaaagaaaacaaaagtccagtttgtgtctcttaatcgctcacttcaactcatttcttctaaataaactatttaatatcctggtcaggaaatgacatgttaatgctttgctccctgaagggggaaaaaatctgtcctttaacaagctattctgttttgtgtcaattggttcgtggcaggaagctattagaagtcaaacgtccagatgcattactgctatcttagtttaaagggggaaagaaaagggaagaagaaaggaaaagagaaatccaactcctttttcatgttttgcttttgaacaatgagggtttgtgtgacaggcattcctctatgctgagatgatagcaatggcctgagattttagcaagctcctggagtctgatgcttttgcagtactctgatcgcaactaaacatttgtctttgttttattagaaactagtgaaacaaagcaggttgtcccacatgtataaaatacagggcagctatttagttttctttacagagaatgatccttttaaggcttgtaaggccctctggtttggacaaaaaccctcagtagagacaagcgggaaggataattagctgaaagctatgatgatataaataaaaacagctctctatcccaatacgcacctttgtattttcaagaactcttctatttattaaggaaaatgtcacattgtgatgtattaagccagtacttcaattacgggttgacttgggatgacatattacatgctgtagttaacatttataattctttttccttgtttgagtatttctgtctctgaaataaccttttacttggcttttctagatagctttatttgatttcgagtggcaaaatgttttttattacggcttttctattgctgtatgatacagaactcttttggcataaatatttgtgttcccagtacctcacttgttcggatttgactgcctgtatatgttttgtgaaatggtcctgtttttgggtaggtgacacgtggactctagtatgtaaatgttacttgaatctgtgcttcataatagtgtgtggcatgtatgtgcagactcttggatgctttatgcctgcgcagcaggagccctgtcctcacgttcccaggagggcggcttcacctaatggaagatagaaaggagagaaggtttttttttttttttaacattctgaagatggtgctgtgtcaagaaggaccttttttttcccctctcccctattttttaagtaccttggaggaggagaggttggtgacatgcatggtggggatctatggcctctggtgctttgtcctgtatttggtttaatgtttttgtcctaatctcttcaatcaataaaattgtgcgtatttaactaaaa

SEQ ID NO: 434277 - DNA, 1926 bp, Homo sapiens
ctttctagagcatacgtttggcgcgcgggtccagatatgtatatgtgaacataggtcagtagctgctttcactagagacgtagtacctgagtcactgtactagttggcgtgtgcgattacgtcagctcgaagtatagagagagactgcgccggtgaggatagcgaggcgatctgaatcgaaagtccagtatggcacgcttctgatggtcatgtagctggggactctactctatgcaggatgtcgcaagacgtatgctcgatatcacaatttacgcactccgtcgctctgcaaaatagttgcagatcctgacagaatcaaaactctctgcctcaaacacacatcctggcatcgcactgttagcatttaacttcttgttaggattcagggaaggaacagttggccaagaattttttttcttttaaacaagccaaccacctagctggtaattaatgaggttcacttaaaaaaaaaattcggtgcacacagactgacatgaaacctgggtgctacagtaaaagaaaacaaaagtccagtttgtgtctcttaatcgctcacttcaactcatttcttctaaataaactatttaatatcctggtcaggaaatgacatgttaatgctttgctccctgaagggggaaaaaatctgtcctttaacaagctattctgttttgtgtcaattggttcgtggcaggaagctattagaagtcaaacgtccagatgcattactgctatcttagtttaaagggggaaagaaaagggaagaagaaaggaaaagagaaatccaactcctttttcatgttttgcttttgaacaatgagggtttgtgtgacaggcattcctctatgctgagatgatagcaatggcctgagattttagcaagctcctggagtctgatgcttttgcagtactctgatcgcaactaaacatttgtctttgttttattagaaactagtgaaacaaagcaggttgtcccacatgtataaaatacagggcagctatttagttttctttacagagaatgatccttttaaggcttgtaaggccctctggtttggacaaaaaccctcagtagagacaagcgggaaggataattagctgaaagctatgatgatataaataaaaacagctctctatcccaatacgcacctttgtattttcaagaactcttctatttattaaggaaaatgtcacattgtgatgtattaagccagtacttcaattacgggttgacttgggatgacatattacatgctgtagttaacatttataattctttttccttgtttgagtatttctgtctctgaaataaccttttacttggcttttctagatagctttatttgatttcgagtggcaaaatgttttttattacggcttttctattgctgtatgatacagaactcttttggcataaatatttgtgttcccagtacctcacttgttcggatttgactgcctgtatatgttttgtgaaatggtcctgtttttgggtaggtgacacgtggactctagtatgtaaatgttacttgaatctgtgcttcataatagtgtgtggcatgtatgtgcagactcttggatgctttatgcctgcgcagcaggagccctgtcctcacgttcccaggagggcggcttcacccttcgtaaccaggagacaaggcggccatggatttgcccttgattctattttgctaatggaagatagaaaggagagaaggtttttttttttttttaacattctgaagatggtgctgtgtcaagaaggaccttttttttcccctctcccctattttttaagtaccttggaggaggagaggttggtgacatgcatggtggggatctatggcctctggtgctttgtcctgtatttggtttaatgtttttgtcctaatctcttcaatcaataaaattgtgcgtatttaactaaaa

SEQ ID NO: 434278 - DNA, 3061 bp, Homo sapiens
ggggggggcggaggctccgtggaaatgtgtcggtgacattgaatggggagaccgagcgcgagcgaggcgcgcgcgcgcacacgcgcactcacggccccgctcgctccgagatccccggccacgtaagtaactattaataccgcctcgccgggggatgcgggcgtgctgagcgcggggattggcctcgggcaccgtcggccgtcccctttaatttttaaatacacggtcccctcttttctctggggggggcaagcaagaaatcaaagaaggaggagacaagccgtcaattttctccaaaacaaaccccaccgggcaatttggtctcggggtagggggagacggggtgattgcaaattattccaggacgagatccagttctccagcgggaaaggggcaaaggaacgccgcgcgttggaagggccagggacgcagctccccttgcagcgcccgcaggacccccgcaagctcgtgccggcgaaatcggagaccgccgatctgtcctcgttctctcctgcacgtctggctgcattcggaggaagacctggggcgcgagcgagcggcgacagcatgagcctgtgctgacctccgcgcggcgggccgagcccagggctttgtcgcggtacctgcgcccagcccgcgccgcaactctgtgcccagcttttgcaatcttttgttggcagcgctgaccgcaccaagttaaatgctcccttgcaatttttcttttttttgtttgtttgtttaatttttggagagctcgcgatcttggaaaagcctcagacgccatctacagttaaaacgtaggtaactgccctctcccgcaccccccccttacacgccccccaccctttccaccaaaaaaagggggtgcagcgcggattctggctgccgtgcgtcgccagccggtagacccgtgcttgtttcctttctctttttgtttggcttctaacgcgttgggactgagtcgccgccgtgagctccccgaagactgcacaaactaccgcgggctcctccgccccgtctgcgattcggaagccggcctgggggtcgcgtcgggagccctggcgctgcagctccgcaccttagcagcccgggtactcatccagatccacgccggggacacacacacagagtaactaaaagtgcggcgattctgcacatcgccgactgctttggggtaacaaaaagacccgagttgcctgccgaccgaggacccccgggagccgggctcggagcagacgaggtatccggcggcgcccatttgggggcttctaactctttctccacgcagcccctcttctgtcccctcccctctcgctcccttttaaaatcagtggcaccgaggcgcctgcagccgcactcgccagcgactcatctctccagcgggtttttttttgtttgtcgtgtgcgatcctcacactcatgaacatacacaggtctacccccatcacaatagcgagatatgggagatcgcggaacaaaacccaggatttcgaagagttgtcgtctataaggtccgcggagcccagccagagtttcagcccgaacctcggctccccgagcccgcccgagactccgaacttgtcgcattgcgtttcttgtatcgggaaatacttattgttggaacctctggagggagaccacgtttttcgtgccgtgcatctgcacagcggagaggagctggtgtgcaaggtgtttgatatcagctgctaccaggaatccctggcaccgtgcttttgcctgtctgctcatagtaacatcaaccaaatcactgaaattatcctgggtgagaccaaagcctatgtgttctttgagcgaagctatggggacatgcattccttcgtccgcacctgcaagaagctgagagaggaggaggcagccagactgttctaccagattgcctcggcagtggcccactgccatgacggggggctggtgctgcgggacctcaagctgcggaaattcatctttaaggacgaagagaggactcgggtcaagctggaaagcctggaagacgcctacattctgcggggagatgatgattccctctccgacaagcatggctgcccggcttacgtaagcccagagatcttgaacaccagtggcagctactcgggcaaagcagccgacgtgtggagcctgggggtgatgctgtacaccatgttggtggggcggtaccctttccatgacattgaacccagctccctcttcagcaagatccggcgtggccagttcaacattccagagactctgtcgcccaaggccaagtgcctcatccgaagcattctgcgtcgggagccctcagagcggctgacctcgcaggaaattctggaccatccttggttttctacagattttagcgtctcgaattcagcatatggtgctaaggaagtgtctgaccagctggtgccggacgtcaacatggaagagaacttggaccctttctttaactgagctcatgccccacggagacttagcaggttccaggagtgagcgagggcagcggaaaggagttcttccgggggacacgaattgcctggctgagtagcaagaaagacacactcttaagtttcttggttcagagcaggaaaaccttcaaggagctgactgaccacgtagcatgggggcaagaggcgtgggatggggattggggtgagatggatgggagcccgctggagcttgtcttccctaacatagcctgggagaccaccccttgccacttgggccacttccgcctaccccacttttcattttgttccaaaatagttgcagatcctgacagaatcaaaactctctgcctcaaacacacatcctggcatcgcactgttagcatttaacttcttgttaggattcagggaaggaacagttggccaagaattttttttcttttaaacaagccaaccacctagctggtaattaatgaggttcacttaaaaaaaaaattcggtgcacacagactgacatgaaacctgggtgctacagtaaaagaaaacaaaagtccagtttgtgtctcttaatcgctcacttcaactcatttcttctaaataaactatttaatatcctg

SEQ ID NO: 434279 - DNA, 2221 bp, Homo sapiens
ggggggggcggaggctccgtggaaatgtgtcggtgacattgaatggggagaccgagcgcgagcgaggcgcgcgcgcgcacacgcgcactcacggccccgctcgctccgagatccccggccacgtaagtaactattaataccgcctcgccgggggatgcgggcgtgctgagcgcggggattggcctcgggcaccgtcggccgtcccctttaatttttaaatacacggtcccctcttttctctggggggggcaagcaagaaatcaaagaaggaggagacaagccgtcaattttctccaaaacaaaccccaccgggcaatttggtctcggggtagggggagacggggtgattgcaaattattccaggacgagatccagttctccagcgggaaaggggcaaaggaacgccgcgcgttggaagggccagggacgcagctccccttgcagcgcccgcaggacccccgcaagctcgtgccggcgaaatcggagaccgccgatctgtcctcgttctctcctgcacgtctggctgcattcggaggaagacctggggcgcgagcgagcggcgacagcatgagcctgtgctgacctccgcgcggcgggccgagcccagggctttgtcgcggtacctgcgcccagcccgcgccgcaactctgtgcccagcttttgcaatcttttgttggcagcgctgaccgcaccaagttaaatgctcccttgcaatttttcttttttttgtttgtttgtttaatttttggagagctcgcgatcttggaaaagcctcagacgccatctacagttaaaacgtaggtaactgccctctcccgcaccccccccttacacgccccccaccctttccaccaaaaaaagggggtgcagcgcggattctggctgccgtgcgtcgccagccggtagacccgtgcttgtttcctttctctttttgtttggcttctaacgcgttgggactgagtcgccgccgtgagctccccgaagactgcacaaactaccgcgggctcctccgccccgtctgcgattcggaagccggcctgggggtcgcgtcgggagccctggcgctgcagctccgcaccttagcagcccgggtactcatccagatccacgccggggacacacacacagagtaactaaaagtgcggcgattctgcacatcgccgactgctttggggtaacaaaaagacccgagttgcctgccgaccgaggacccccgggagccgggctcggagcagacgaggtatccggcggcgcccatttgggggcttctaactctttctccacgcagcccctcttctgtcccctcccctctcgctcccttttaaaatcagtggcaccgaggcgcctgcagccgcactcgccagcgactcatctctccagcgggtttttttttgtttgtcgtgtgcgatcctcacactcatgaacatacacaggtctacccccatcacaatagcgagatatgggagatcgcggaacaaaacccaggatttcgaagagttgtcgtctataaggtccgcggagcccagccagagtttcagcccgaacctcggctccccgagcccgcccgagactccgaacttgtcgcattgcgtttcttgtatcgggaaatacttattgttggaacctctggagggagaccacgtttttcgtgccgtgcatctgcacagcggagaggagctggtgtgcaaggtgtttgatatcagctgctaccaggaatccctggcaccgtgcttttgcctgtctgctcatagtaacatcaaccaaatcactgaaattatcctgggtgagaccaaagcctatgtgttctttgagcgaagctatggggacatgcattccttcgtccgcacctgcaagaagctgagagaggaggaggcagccagactgttctaccagattgcctcggcagtggcccactgccatgacggggggctggtgctgcgggacctcaagctgcggaaattcatctttaaggacgaagagagtctgcctctggagcctggagatgtttcccctggttttgccttcgataccctctgtgatcttggattggtccttcgtctgtttccaccctccccctaccagcctcatatttctccttctgttaccttctgtatgctgtattggctctaaggtcttttcaattaataataaattggtgtatgtgcttctttgaatattctcatttagaagatgaatatatgttgacccccaacgatactga

SEQ ID NO: 434280 - DNA, 2491 bp, Homo sapiens
ggggggggcggaggctccgtggaaatgtgtcggtgacattgaatggggagaccgagcgcgagcgaggcgcgcgcgcgcacacgcgcactcacggccccgctcgctccgagatccccggccacgtaagtaactattaataccgcctcgccgggggatgcgggcgtgctgagcgcggggattggcctcgggcaccgtcggccgtcccctttaatttttaaatacacggtcccctcttttctctggggggggcaagcaagaaatcaaagaaggaggagacaagccgtcaattttctccaaaacaaaccccaccgggcaatttggtctcggggtagggggagacggggtgattgcaaattattccaggacgagatccagttctccagcgggaaaggggcaaaggaacgccgcgcgttggaagggccagggacgcagctccccttgcagcgcccgcaggacccccgcaagctcgtgccggcgaaatcggagaccgccgatctgtcctcgttctctcctgcacgtctggctgcattcggaggaagacctggggcgcgagcgagcggcgacagcatgagcctgtgctgacctccgcgcggcgggccgagcccagggctttgtcgcggtacctgcgcccagcccgcgccgcaactctgtgcccagcttttgcaatcttttgttggcagcgctgaccgcaccaagttaaatgctcccttgcaatttttcttttttttgtttgtttgtttaatttttggagagctcgcgatcttggaaaagcctcagacgccatctacagttaaaacgtaggtaactgccctctcccgcaccccccccttacacgccccccaccctttccaccaaaaaaagggggtgcagcgcggattctggctgccgtgcgtcgccagccggtagacccgtgcttgtttcctttctctttttgtttggcttctaacgcgttgggactgagtcgccgccgtgagctccccgaagactgcacaaactaccgcgggctcctccgccccgtctgcgattcggaagccggcctgggggtcgcgtcgggagccctggcgctgcagctccgcaccttagcagcccgggtactcatccagatccacgccggggacacacacacagagtaactaaaagtgcggcgattctgcacatcgccgactgctttggggtaacaaaaagacccgagttgcctgccgaccgaggacccccgggagccgggctcggagcagacgaggtatccggcggcgcccatttgggggcttctaactctttctccacgcagcccctcttctgtcccctcccctctcgctcccttttaaaatcagtggcaccgaggcgcctgcagccgcactcgccagcgactcatctctccagcgggtttttttttgtttgtcgtgtgcgatcctcacactcatgaacatacacaggtctacccccatcacaatagcgagatatgggagatcgcggaacaaaacccaggatttcgaagagttgtcgtctataaggtccgcggagcccagccagagtttcagcccgaacctcggctccccgagcccgcccgagactccgaacttgtcgcattgcgtttcttgtatcgggaaatacttattgttggaacctctggagggagaccacgtttttcgtgccgtgcatctgcacagcggagaggagctggtgtgcaaggtgtttgatatcagctgctaccaggaatccctggcaccgtgcttttgcctgtctgctcatagtaacatcaaccaaatcactgaaattatcctgggtgagaccaaagcctatgtgttctttgagcgaagctatggggacatgcattccttcgtccgcacctgcaagaagctgagagaggaggaggcagccagactgttctaccagattgcctcggcagtggcccactgccatgacggggggctggtgctgcgggacctcaagctgcggaaattcatctttaaggacgaagagagtgaatgctccactcatgctccacttgctactagaccgagcagctccaaagctgcaacgctggctgaacgctcccaaagcttacggacaaggacaagcagcacgcaagctaaaggccacactcccacctaccactcgggctccccgcctggcaaaagcctggacaccacgccctacatctctgcgcgcggcagactgactgattcccctcttccgaccaagccctggcctgccccggcttaccgctcagcccccagacgactctctgcaccacccagttgtgcccgccttcactccgcggcatgacgccacccccgacgtgctgcgacgccctgcgccgcgctgactcgctggccccccaccctgcttgcgctggcggccgcgctcaccccttctccgttgcacctttgaccccagttcccctcattcagccagtcatccggcgctcggccccctcccccttccccgcaccacccggtccccccggcccaccgccttccccgacgccttg

SEQ ID NO: 434281 - DNA, 2080 bp, Homo sapiens
ggggggggcggaggctccgtggaaatgtgtcggtgacattgaatggggagaccgagcgcgagcgaggcgcgcgcgcgcacacgcgcactcacggccccgctcgctccgagatccccggccacgtaagtaactattaataccgcctcgccgggggatgcgggcgtgctgagcgcggggattggcctcgggcaccgtcggccgtcccctttaatttttaaatacacggtcccctcttttctctggggggggcaagcaagaaatcaaagaaggaggagacaagccgtcaattttctccaaaacaaaccccaccgggcaatttggtctcggggtagggggagacggggtgattgcaaattattccaggacgagatccagttctccagcgggaaaggggcaaaggaacgccgcgcgttggaagggccagggacgcagctccccttgcagcgcccgcaggacccccgcaagctcgtgccggcgaaatcggagaccgccgatctgtcctcgttctctcctgcacgtctggctgcattcggaggaagacctggggcgcgagcgagcggcgacagcatgagcctgtgctgacctccgcgcggcgggccgagcccagggctttgtcgcggtacctgcgcccagcccgcgccgcaactctgtgcccagcttttgcaatcttttgttggcagcgctgaccgcaccaagttaaatgctcccttgcaatttttcttttttttgtttgtttgtttaatttttggagagctcgcgatcttggaaaagcctcagacgccatctacagttaaaacgtaggtaactgccctctcccgcaccccccccttacacgccccccaccctttccaccaaaaaaagggggtgcagcgcggattctggctgccgtgcgtcgccagccggtagacccgtgcttgtttcctttctctttttgtttggcttctaacgcgttgggactgagtcgccgccgtgagctccccgaagactgcacaaactaccgcgggctcctccgccccgtctgcgattcggaagccggcctgggggtcgcgtcgggagccctggcgctgcagctccgcaccttagcagcccgggtactcatccagatccacgccggggacacacacacagagtaactaaaagtgcggcgattctgcacatcgccgactgctttggggtaacaaaaagacccgagttgcctgccgaccgaggacccccgggagccgggctcggagcagacgaggtatccggcggcgcccatttgggggcttctaactctttctccacgcagcccctcttctgtcccctcccctctcgctcccttttaaaatcagtggcaccgaggcgcctgcagccgcactcgccagcgactcatctctccagcgggtttttttttgtttgtcgtgtgcgatcctcacactcatgaacatacacaggtctacccccatcacaatagcgagatatgggagatcgcggaacaaaacccaggatttcgaagagttgtcgtctataaggtccgcggagcccagccagagtttcagcccgaacctcggctccccgagcccgcccgagactccgaacttgtcgcattgcgtttcttgtatcgggaaatacttattgttggaacctctggagggagaccacgtttttcgtgccgtgcatctgcacagcggagaggagctggtgtgcaaggtgtttgatatcagctgctaccaggaatccctggcaccgtgcttttgcctgtctgctcatagtaacatcaaccaaatcactgaaattatcctgggtgagaccaaagcctatgtgttctttgagcgaagctatggggacatgcattccttcgtccgcacctgcaagaagctgagagaggaggaggcagccagactgttctaccagattgcctcggcagtggcccactgccatgacggggggctggtgctgcgggacctcaagctgcggaaattcatctttaaggacgaagagaggtaggtctcatcctgtccagacctgggtactgtgatggactgctcctaacaacagcttcctagaaaagtcttgaatggacgtttttttgccgtctgtg

SEQ ID NO: 434282 - DNA, 2137 bp, Homo sapiens
ggggggggcggaggctccgtggaaatgtgtcggtgacattgaatggggagaccgagcgcgagcgaggcgcgcgcgcgcacacgcgcactcacggccccgctcgctccgagatccccggccacgtaagtaactattaataccgcctcgccgggggatgcgggcgtgctgagcgcggggattggcctcgggcaccgtcggccgtcccctttaatttttaaatacacggtcccctcttttctctggggggggcaagcaagaaatcaaagaaggaggagacaagccgtcaattttctccaaaacaaaccccaccgggcaatttggtctcggggtagggggagacggggtgattgcaaattattccaggacgagatccagttctccagcgggaaaggggcaaaggaacgccgcgcgttggaagggccagggacgcagctccccttgcagcgcccgcaggacccccgcaagctcgtgccggcgaaatcggagaccgccgatctgtcctcgttctctcctgcacgtctggctgcattcggaggaagacctggggcgcgagcgagcggcgacagcatgagcctgtgctgacctccgcgcggcgggccgagcccagggctttgtcgcggtacctgcgcccagcccgcgccgcaactctgtgcccagcttttgcaatcttttgttggcagcgctgaccgcaccaagttaaatgctcccttgcaatttttcttttttttgtttgtttgtttaatttttggagagctcgcgatcttggaaaagcctcagacgccatctacagttaaaacgtaggtaactgccctctcccgcaccccccccttacacgccccccaccctttccaccaaaaaaagggggtgcagcgcggattctggctgccgtgcgtcgccagccggtagacccgtgcttgtttcctttctctttttgtttggcttctaacgcgttgggactgagtcgccgccgtgagctccccgaagactgcacaaactaccgcgggctcctccgccccgtctgcgattcggaagccggcctgggggtcgcgtcgggagccctggcgctgcagctccgcaccttagcagcccgggtactcatccagatccacgccggggacacacacacagagtaactaaaagtgcggcgattctgcacatcgccgactgctttggggtaacaaaaagacccgagttgcctgccgaccgaggacccccgggagccgggctcggagcagacgaggtatccggcggcgcccatttgggggcttctaactctttctccacgcagcccctcttctgtcccctcccctctcgctcccttttaaaatcagtggcaccgaggcgcctgcagccgcactcgccagcgactcatctctccagcgggtttttttttgtttgtcgtgtgcgatcctcacactcatgaacatacacaggtctacccccatcacaatagcgagatatgggagatcgcggaacaaaacccaggatttcgaagagttgtcgtctataaggtccgcggagcccagccagagtttcagcccgaacctcggctccccgagcccgcccgagactccgaacttgtcgcattgcgtttcttgtatcgggaaatacttattgttggaacctctggagggagaccacgtttttcgtgccgtgcatctgcacagcggagaggagctggtgtgcaaggtgtttgatatcagctgctaccaggaatccctggcaccgtgcttttgcctgtctgctcatagtaacatcaaccaaatcactgaaattatcctgggtgagaccaaagcctatgtgttctttgagcgaagctatggggacatgcattccttcgtccgcacctgcaagaagctgagagaggaggaggcagccagactgttctaccagattgctctgcctctggagcctggagatgtttcccctggttttgccttcgataccctctgtgatcttggattggtccttcgtctgtttccaccctccccctaccagcctcatatttctccttctgttaccttctgtatgctgtattggctctaaggtcttttcaattaataataaattggtgtatgtgcttctttgaatattctcatttagaagatgaatatatgttgacccccaacgatactga

SEQ ID NO: 434283 - DNA, 1797 bp, Homo sapiens
  misc_feature (1729)..(1729): n is a, c, g, or t
ggggggggcggaggctccgtggaaatgtgtcggtgacattgaatggggagaccgagcgcgagcgaggcgcgcgcgcgcacacgcgcactcacggccccgctcgctccgagatccccggccacgtaagtaactattaataccgcctcgccgggggatgcgggcgtgctgagcgcggggattggcctcgggcaccgtcggccgtcccctttaatttttaaatacacggtcccctcttttctctggggggggcaagcaagaaatcaaagaaggaggagacaagccgtcaattttctccaaaacaaaccccaccgggcaatttggtctcggggtagggggagacggggtgattgcaaattattccaggacgagatccagttctccagcgggaaaggggcaaaggaacgccgcgcgttggaagggccagggacgcagctccccttgcagcgcccgcaggacccccgcaagctcgtgccggcgaaatcggagaccgccgatctgtcctcgttctctcctgcacgtctggctgcattcggaggaagacctggggcgcgagcgagcggcgacagcatgagcctgtgctgacctccgcgcggcgggccgagcccagggctttgtcgcggtacctgcgcccagcccgcgccgcaactctgtgcccagcttttgcaatcttttgttggcagcgctgaccgcaccaagttaaatgctcccttgcaatttttcttttttttgtttgtttgtttaatttttggagagctcgcgatcttggaaaagcctcagacgccatctacagttaaaacgtaggtaactgccctctcccgcaccccccccttacacgccccccaccctttccaccaaaaaaagggggtgcagcgcggattctggctgccgtgcgtcgccagccggtagacccgtgcttgtttcctttctctttttgtttggcttctaacgcgttgggactgagtcgccgccgtgagctccccgaagactgcacaaactaccgcgggctcctccgccccgtctgcgattcggaagccggcctgggggtcgcgtcgggagccctggcgctgcagctccgcaccttagcagcccgggtactcatccagatccacgccggggacacacacacagagtaactaaaagtgcggcgattctgcacatcgccgactgctttggggtaacaaaaagacccgagttgcctgccgaccgaggacccccgggagccgggctcggagcagacgaggtatccggcggcgcccatttgggggcttctaactctttctccacgcagcccctcttctgtcccctcccctctcgctcccttttaaaatcagtggcaccgaggcgcctgcagccgcactcgccagcgactcatctctccagcgggtttttttttgtttgtcgtgtgcgatcctcacactcatgaacatacacaggtctacccccatcacaatagcgagatatgggagatcgcggaacaaaacccaggatttcgaagagttgtcgtctataaggtccgcggagcccagccagagtttcagcccgaacctcggctccccgagcccgcccgagactccgaacttgtcgcattgcgtttcttgtatcgggaaatacttattgttggaacctctggagggagaccacgtttttcgtgccgtgcatctgcacagcggagaggagctggtgtgcaagtgttgatacagtgtaccagaatcctggcacgtgctttgcngtctgccaagtacatcaccaatcatgaatacctgggaacgctagtgtctttaggacatgggcagctct

SEQ ID NO: 434284 - DNA, 890 bp, Homo sapiens
  misc_feature (822)..(822): n is a, c, g, or t
  misc_feature (829)..(831): n is a, c, g, or t
  misc_feature (836)..(836): n is a, c, g, or t
ggggggggcggaggctccgtggaaatgtgtcggtgacattgaatggggagaccgagcgcgagcgaggcgcgcgcgcgcacacgcgcactcacggccccgctcgctccgagatccccggccacgtaagtaactattaataccgcctcgccgggggatgcgggcgtgctgagcgcggggattggcctcgggcaccgtcggccgtcccctttaatttttaaatacacggtcccctcttttctctggggggggcaagcaagaaatcaaagaaggaggagacaagccgtcaattttctccaaaacaaaccccaccgggcaatttggtctcggggtagggggagacggggtgattgcaaattattccaggacgagatccagttctccagcgggaaaggggcaaaggaacgccgcgcgttggaagggccagggacgcagctccccttgcagcgcccgcaggacccccgcaagctcgtgccggcgaaatcggagaccgccgatctgtcctcgttctctcctgcacgtctggctgcattcggaggaagacctggggcgcgagcgagcggcgacagcatgagcctgtgctgacctccgcgcggcgggccgagcccagggctttgtcgcggtacctgcgcccagcccgcgccgcaactctgtgcccagcttttgcaatcttttgttggcagcgctgaccgcaccaagttaaatgctcccttgcaatttttcttttttttgtttgtttgtttaatttttggagagctcgcgatcttggaaaagcctcagacgccatctacagttaaaacgtaggtaactgggtcgatggcgtcngaggccnnnccaangatcgcgaggccctccacaaccctaacccacgcgcacccacccccacggaaaca

SEQ ID NO: 434285 - DNA, 4608 bp, Homo sapiens
tctcactctgtcgcccaggctggagtgcagtgtcatgatctccgctcactgcaatctctgcctcccggattcaagcgattctcctgcctgtctcccgagtagctgggattactggcgcccgttaccacgcccggctaatttttacgtttttagcagagacggggtttcaccacgttggccaggctggtctcaaactactgacctcaagtgatccgcccgccttgacctcccaaagtgctgggattacaggcgtgagccactgtgcctggcctatagttaagatttttatattcatttttagtgaatgttataccgtataccgtaagtactctccccccacaatccttctgcctctcatcttcccttttccattttcctaatacctcctactgcctcctctcaactacccttgtgtgtttcttcatctttctccgtgcttattcaaaaatatcctgccacacacacacacacaggcttctctttttgttattcagacatttaaaaaaattaattcttgatcattcaacttgattatttagacatttctgtacagccatcttttctcgtttaccaccacatcatggctgtctgcccctctacatccgcacacggagctctaacgcatgcttgttaaacagccttcgtaatagtctttaaagatcaaccacactgttcccacgtaaccctacctcccaggtagggttcccccagtaacactttcacacataacttatttactgttccttttacttctggaagattccgagaggaaagattgctgggtcaaaggtcacacgcgttttcaattttaatagctattcctggattacctcctcaaagggctctaacaactcgcattgctctcagcgtgtgagagggtcctttgctctgaagggtcttctaaaatatttgttcaatcgttacttagcaggggctgggagtaacggattttattttattttattttattttttgagacggagtctcgctctgtcgcccaggctggagtgcagtcgcgcaatctcggctcacggatttgctcttttaaaggacatacccttttatgtttaaatgaaggaactcattgatgcaccgaggcgaaaggaacctttaattaagtgcgtcttctatgcggagtgatcgcttttgtcacttgttcgaggggtgagagctcccgtcagttgtccctgtttctgtgagccgtctacgaagcccgggcttggcctgggcgacgctgagcggctttaaccggcggcgtccagccggctccgccagcgctgccgccgccctcgaggctccctctgactgaaggcgcgctgagcatcgcggcattaggggctcctggtccctcaaacatccagggaagccattttcagggactaggtactgacccccgcgagccgccacagccacagcccgcgctccgggccgaacgcccgagctcaagagctcccgagcttccgtcgggcggcggcctcacagctgggggccctgaggcggaaggcgcagccgctcagctgcggaccgggggcgtggcgagggcgcacaggttctgtttttcgccggcccggggccgctttcggtttcgtttcccgccggcgtctccaccctgcgagagccgcccgccagccagcgtccgccgccgtccgcgtcgcgccacccgcggtccgacgggagcaggcccagcggccatggcccaggccggcgtcgtcggtgaggtcacccaggtgctgtgcgcggccgggggcgccctggagttgcccgagctgcggcgccgcttgcggatgggcttgagcgccgacgcgctggagcggctgctgcggcagcgtgggcgcttcgtggtggcggtgcgggcgggcggcgcagccgcggccccggagcgcgtggtgctggccgcctcgccgctgcgcctgtgtcgcgcgcaccagggctccaagccgggctgcgtggggctctgcgcgcagctccacctctgcaggttcatggtctacggcgcctgcaagttcctgagagccgggaagaactgtaggaatagtcacagcttgacaaccgaacacaacctgagtgtgctgagaactcatggcgttgaccacctgagctataatgagctatgccaactcttgtttcagaacgacccctggcttttgccagaaatttgccaacattacaacaaaggagatggaccccacggctcttgtgcctttcaaaagcagtgcatcaagctccatatctgccagtattttttacagggggaatgcaagtttggcactagctgtaagagatcccatgatttctctaattctgagaatctggaaaaattggagaagttgggtatgagctcagacctggtgagcaggctgcctaccatttatagaaatgcacatgacatcaagaataagagctctgcccccagcagagtgcctcctctttttgtcccacaggggacttctgaaagaaaagacagttcaggttctgtgtccccaaacactcttagccaggaggagggtgatcagatctgtttgtaccatatccggaaaagttgtagctttcaagataagtgccatagagttcatttccatttgccgtatcgatggcaattcttggatagaggcaaatgggaggatttggacaacatggaacttattgaagaggcatattgcaatcccaaaatagaaaggatcctgtgctctgagtcagccagtacctttcactctcattgtctgaactttaacgccatgacttacggtgctacccaggctcgccgcctctccacggcctcctctgtcaccaaacctccacacttcatcctcaccactgactggatttggtactggagtgatgagtttggttcttggcaggaatatggaagacagggcacggtgcaccctgtgaccactgtcagcagtagcgacgtggagaaggcctacctggcctactgtacaccggggtctgacggccaggcagccaccttgaagttccaggccggaaagcacaactacgagttagatttcaaagccttcgttcagaaaaacctggtctatggcacaactaaaaaggtttgccgcagacccaaatacgtgtctccccaggatgtgacgaccatgcaaacctgcaataccaagtttccaggcccgaagagcatcccagactattgggactcctctgccctgccagacccaggctttcagaagatcacccttagttcttcctcggaagagtatcagaaggtctggaacctctttaaccgcacgctgcctttctactttgttcagaagattgagcgagtacagaacctggccctctgggaagtctaccagtggcaaaaaggacagatgcagaagcagaacggagggaaggccgtggacgagcggcagctgttccacggcaccagcgccatttttgtggacgccatctgccagcagaactttgactggcgggtctgtggtgttcatggcacttcctacggcaaggggagctactttgcccgagatgctgcatattcccaccactacagcaaatccgacacgcagacccacacgatgttcctggcccgggtgctggtgggcgagttcgtcaggggcaatgcctcctttgtccgtccgccggccaaggagggctggagcaacgccttctatgatagctgcgtgaacagtgtgtccgacccctccatctttgtgatctttgagaaacaccaggtctacccagagtatgtcatccagtacaccacctcctccaagccctcggtcacaccctccatcctgctggccttgggctccctgttcagcagccgacagtgagcgcacaggagtgttccaggcctttcacctgctctgccttgaaatggctatttgggcctttccttttctttttaaacagaaacttttaatgaactgttctcttaacattgacctctcaatgaagttatgttcttaatctcttgctaataatgatttttacttttaagtcacttttgggttcactagtggattaaccagaagtgattgtagttgagtccagttttgctttttaataatgtgttgaagttttagtttttactctttgttgactttgctgcttattggcaccagggacagagtttctagatacaattttatggattggttttaatttttatgagtttgtctctgcagtgattcggtttctcagagtctcatggcatcatagtttttccagaatgacacagtagccaccggtggatgacagcccacgggcggcacagtcacttctgcctgttgctctgacaccaacccaggcagctctgctgtggcttctcctgggctctggcattagttggtctgtgtcacattgtcagaacaggtggctgctgtgtggtgccatcgagtccctgctggttccccttgtcctgggagggtcacccattgcccaaggaagtgcatccacctggcaggtgacctggaggagtagcttccccgaggacccccaggcttggcctgtgattgcgcaaacccacatttcctaagcacactggacacccttcgagtgtgggttttaacatccctgtgagattgaatacttgtgccacacatgtcacaaaagagtatggaaataaaagaaaatttatccgaa

SEQ ID NO: 434286 - DNA, 807 bp, Homo sapiens
gaaaaattgccaagcaaaataatggtttaaacaagattggaaggaacaatttaaaagcactcatgtgtaattgatatgtcaattactaatcattcctctattcattaaacccagtctcctaaggatacctattttctttatgaatatttgaaatgtgtaaaatggccctatttttaacagactgattctgggttttacacatttggataagctttcaaatctatctaatttgtgtttataaaacattgccatcctgtgtgtatgtatatgtatatgtatattttttcactggttatgttttttttcagccttcgttcagaaaaacctggtctatggcacaactaaaaaggtttgccgcagacccaaatacgtgtctccccaggatgtgacgaccatgcaaacctggtaggttgcagtggggggcttggtacttaggatgtaaccagctggggtgtgctctgcagtggtgacagaaaacctgcctcagacagcacccgggcaccgttggcttgtacaacgaagtgctcccacactctgttatcgtttgtcttctactagttggaccagagtgggaattaccctgtgggtagaagcttcgtgatgcataattagaaggctgcctgttgtgatctgcgatgattctctggagaagacagactctgaaggcgagtctagacttgaagccaacccatccgtttgtcttttctgtggaatcattgagtcatagacttgaattttttaaatgttgaaataatgaaataatgatggaattacaccaataaaaactcatgtattttagtatttgaa

SEQ ID NO: 434287 - DNA, 477 bp, Homo sapiens
  misc_feature (10)..(10): n is a, c, g, or t
  misc_feature (12)..(12): n is a, c, g, or t
  misc_feature (14)..(14): n is a, c, g, or t
gacttttcangngngggtgatcagatctgtttgtaccatatccggaaaagttgtagctttcaaggaagaactgtaggaatagtcacagcttgacaaccgaacacaacctgagtgtgctgagaactcatggcgttgaccacctgagctataatgagctatgccaactcttgtttcagaacgacccctggcttttgccagaaaaatttggaatgtggagcagaaggagcagtgaagttcaagggccagctttgccaacaacccagttccacaaacatcacacagatgccatggatagctgtgcgactagggctgattctttaacttctctgagcctctcagtgtgctccattgagaaatgaaagggtggtatttggccttctctaagatgctttaagccctcagagcctctttgactttgaattgtagaaaagagagctcagagaaaactggggcttggggaagggagagttgatgagt

SEQ ID NO: 434288 - DNA, 4201 bp, Homo sapiens
tctcactctgtcgcccaggctggagtgcagtgtcatgatctccgctcactgcaatctctgcctcccggattcaagcgattctcctgcctgtctcccgagtagctgggattactggcgcccgttaccacgcccggctaatttttacgtttttagcagagacggggtttcaccacgttggccaggctggtctcaaactactgacctcaagtgatccgcccgccttgacctcccaaagtgctgggattacaggcgtgagccactgtgcctggcctatagttaagatttttatattcatttttagtgaatgttataccgtataccgtaagtactctccccccacaatccttctgcctctcatcttcccttttccattttcctaatacctcctactgcctcctctcaactacccttgtgtgtttcttcatctttctccgtgcttattcaaaaatatcctgccacacacacacacacaggcttctctttttgttattcagacatttaaaaaaattaattcttgatcattcaacttgattatttagacatttctgtacagccatcttttctcgtttaccaccacatcatggctgtctgcccctctacatccgcacacggagctctaacgcatgcttgttaaacagccttcgtaatagtctttaaagatcaaccacactgttcccacgtaaccctacctcccaggtagggttcccccagtaacactttcacacataacttatttactgttccttttacttctggaagattccgagaggaaagattgctgggtcaaaggtcacacgcgttttcaattttaatagctattcctggattacctcctcaaagggctctaacaactcgcattgctctcagcgtgtgagagggtcctttgctctgaagggtcttctaaaatatttgttcaatcgttacttagcaggggctgggagtaacggattttattttattttattttattttttgagacggagtctcgctctgtcgcccaggctggagtgcagtcgcgcaatctcggctcacggatttgctcttttaaaggacatacccttttatgtttaaatgaaggaactcattgatgcaccgaggcgaaaggaacctttaattaagtgcgtcttctatgcggagtgatcgcttttgtcacttgttcgaggggtgagagctcccgtcagttgtccctgtttctgtgagccgtctacgaagcccgggcttggcctgggcgacgctgagcggctttaaccggcggcgtccagccggctccgccagcgctgccgccgccctcgaggctccctctgactgaaggcgcgctgagcatcgcggcattaggggctcctggtccctcaaacatccagggaagccattttcagggactaggtactgacccccgcgagccgccacagccacagcccgcgctccgggccgaacgcccgagctcaagagctcccgagcttccgtcgggcggcggcctcacagctgggggccctgaggcggaaggcgcagccgctcagctgcggaccgggggcgtggcgagggcgcacaggttctgtttttcgccggcccggggccgctttcggtttcgtttcccgccggcgtctccaccctgcgagagccgcccgccagccagcgtccgccgccgtccgcgtcgcgccacccgcggtccgacgggagcaggcccagcggccatggcccaggccggcgtcgtcggtgaggtcacccaggtgctgtgcgcggccgggggcgccctggagttgcccgagctgcggcgccgcttgcggatgggcttgagcgccgacgcgctggagcggctgctgcggcagcgtgggcgcttcgtggtggcggtgcgggcgggcggcgcagccgcggccccggagcgcgtggtgctggccgcctcgccgctgcgcctgtgtcgcgcgcaccagggctccaagccgggctgcgtggggctctgcgcgcagctccacctctgcaggttcatggtctacggcgcctgcaagttcctgagagccgggaagaactgtaggaatagtcacagcttgacaaccgaacacaacctgagtgtgctgagaactcatggcgttgaccacctgagctataatgagctatgccaactcttgtttcagaacgacccctggcttttgccagaaatttgccaacattacaacaaaggagatggaccccacggctcttgtgcctttcaaaagcagtgcatcaagctccatatctgccagtattttttacagggggaatgcaagtttggcactagctgtaagagatcccatgatttctctaattctgagaatctggaaaaattggagaagttgggtatgagctcagacctggtgagcaggctgcctaccatttatagaaatgcacatgacatcaagaataagagctctgcccccagcagagtgcctcctctttttgtcccacaggggacttctgaaagaaaagacagttcaggttctgtgtccccaaacactcttagccaggaggagggtgatcagatctgtttgtaccatatccggaaaagttgtagctttcaagataagtgccatagagttcatttccatttgccgtatcgatggcaattcttggatagaggcaaatgggaggatttggacaacatggaaaactaaaaaggtttgccgcagacccaaatacgtgtctccccaggatgtgacgaccatgcaaacctgcaataccaagtttccaggcccgaagagcatcccagactattgggactcctctgccctgccagacccaggctttcagaagatcacccttagttcttcctcggaagagtatcagaaggtctggaacctctttaaccgcacgctgcctttctactttgttcagaagattgagcgagtacagaacctggccctctgggaagtctaccagtggcaaaaaggacagatgcagaagcagaacggagggaaggccgtggacgagcggcagctgttccacggcaccagcgccatttttgtggacgccatctgccagcagaactttgactggcgggtctgtggtgttcatggcacttcctacggcaaggggagctactttgcccgagatgctgcatattcccaccactacagcaaatccgacacgcagacccacacgatgttcctggcccgggtgctggtgggcgagttcgtcaggggcaatgcctcctttgtccgtccgccggccaaggagggctggagcaacgccttctatgatagctgcgtgaacagtgtgtccgacccctccatctttgtgatctttgagaaacaccaggtctacccagagtatgtcatccagtacaccacctcctccaagccctcggtcacaccctccatcctgctggccttgggctccctgttcagcagccgacagtgagcgcacaggagtgttccaggcctttcacctgctctgccttgaaatggctatttgggcctttccttttctttttaaacagaaacttttaatgaactgttctcttaacattgacctctcaatgaagttatgttcttaatctcttgctaataatgatttttacttttaagtcacttttgggttcactagtggattaaccagaagtgattgtagttgagtccagttttgctttttaataatgtgttgaagttttagtttttactctttgttgactttgctgcttattggcaccagggacagagtttctagatacaattttatggattggttttaatttttatgagtttgtctctgcagtgattcggtttctcagagtctcatggcatcatagtttttccagaatgacacagtagccaccggtggatgacagcccacgggcggcacagtcacttctgcctgttgctctgacaccaacccaggcagctctgctgtggcttctcctgggctctggcattagttggtctgtgtcacattgtcagaacaggtggctgctgtgtggtgccatcgagtccctgctggttccccttgtcctgggagggtcacccattgcccaaggaagtgcatccacctggcaggtgacctggaggagtagcttccccgaggacccccaggcttggcctgtgattgcgcaaacccacatttcctaagcacactggacacccttcgagtgtgggttttaacatccctgtgagattgaatacttgtgccacacatgtcacaaaagagtatggaaataaaagaaaatttatccgaa

SEQ ID NO: 434289 - DNA, 2248 bp, Homo sapiens
  misc_feature (10)..(10): n is a, c, g, or t
  misc_feature (12)..(12): n is a, c, g, or t
  misc_feature (14)..(14): n is a, c, g, or t
gacttttcangngngggtgatcagatctgtttgtaccatatccggaaaagttgtagctttcaaggaagaactgtaggaatagtcacagcttgacaaccgaacacaacctgagtgtgctgagaactcatggcgttgaccacctgagctataatgagctatgccaactcttgtttcagaacgacccctggcttttgccagaaatttgccaacattacaacaaaggagatggaccccacggctcttgtgcctttcaaaagcagtgcatcaagctccatatctgccagtattttttacagggggaatgcaagtttggcactagctgtaagagatcccatgatttctctaattctgagaatctggaaaaattggagaagttgggtatgagctcagacctggtgagcaggctgcctaccatttatagaaatgcacatgacatcaagaataagagctctgcccccagcagagtgcctcctctttttgtcccacaggggacttctgaaagaaaagacagttcaggttctgtgtccccaaacactcttagccaggaggagggtgatcagatctgtttgtaccatatccggaaaagttgtagctttcaagataagtgccatagagttcatttccatttgccgtatcgatggcaattcttggatagaggcaaatgggaggatttggacaacatggaaaactaaaaaggtttgccgcagacccaaatacgtgtctccccaggatgtgacgaccatgcaaacctgcaataccaagtttccaggcccgaagagcatcccagactattgggactcctctgccctgccagacccaggctttcagaagatcacccttagttcttcctcggaagagtatcagaaggtctggaacctctttaaccgcacgctgcctttctactttgttcagaagattgagcgagtacagaacctggccctctgggaagtctaccagtggcaaaaaggacagatgcagaagcagaacggagggaaggccgtggacgagcggcagctgttccacggcaccagcgccatttttgtggacgccatctgccagcagaactttgactggcgggtctgtggtgttcatggcacttcctacggcaaggggagctactttgcccgagatgctgcatattcccaccactacagcaaatccgacacgcagacccacacgatgttcctggcccgggtgctggtgggcgagttcgtcaggggcaatgcctcctttgtccgtccgccggccaaggagggctggagcaacgccttctatgatagctgcgtgaacagtgtgtccgacccctccatctttgtgatctttgagaaacaccaggtctacccagagtatgtcatccagtacaccacctcctccaagccctcggtcacaccctccatcctgctggccttgggctccctgttcagcagccgacagtgagcgcacaggagtgttccaggcctttcacctgctctgccttgaaatggctatttgggcctttccttttctttttaaacagaaacttttaatgaactgttctcttaacattgacctctcaatgaagttatgttcttaatctcttgctaataatgatttttacttttaagtcacttttgggttcactagtggattaaccagaagtgattgtagttgagtccagttttgctttttaataatgtgttgaagttttagtttttactctttgttgactttgctgcttattggcaccagggacagagtttctagatacaattttatggattggttttaatttttatgagtttgtctctgcagtgattcggtttctcagagtctcatggcatcatagtttttccagaatgacacagtagccaccggtggatgacagcccacgggcggcacagtcacttctgcctgttgctctgacaccaacccaggcagctctgctgtggcttctcctgggctctggcattagttggtctgtgtcacattgtcagaacaggtggctgctgtgtggtgccatcgagtccctgctggttccccttgtcctgggagggtcacccattgcccaaggaagtgcatccacctggcaggtgacctggaggagtagcttccccgaggacccccaggcttggcctgtgattgcgcaaacccacatttcctaagcacactggacacccttcgagtgtgggttttaacatccctgtgagattgaatacttgtgccacacatgtcacaaaagagtatggaaataaaagaaaatttatccgaa

SEQ ID NO: 434290 - DNA, 2603 bp, Homo sapiens
tagagtgagggatgtaatagctgtgttctgtgtggatgatggaatcacagcttgtgaagcccctttctcaccagtggactggccactggggaggtggtgtcgtgtgagaccttcctgaactggtggttttttccctctctgtcaacagatttgccaacattacaacaaaggagatggaccccacggctcttgtgcctttcaaaagcagtgcatcaagctccatatctgccagtattttttacagggggaatgcaagtttggcactagctgtaagagatcccatgatttctctaattctgagaatctggaaaaattggagaagttgggtatgagctcagacctggtgagcaggctgcctaccatttatagaaatgcacatgacatcaagaataagagctctgcccccagcagagtgcctcctctttttgtcccacaggggacttctgaaagaaaagacagttcaggttctgtgtccccaaacactcttagccaggaggagggtgatcagatctgtttgtaccatatccggaaaagttgtagctttcaagataagtgccatagagttcatttccatttgccgtatcgatggcaattcttggatagaggcaaatgggaggatttggacaacatggaacttattgaagaggcatattgcaatcccaaaatagaaaggatcctgtgctctgagtcagccagtacctttcactctcattgtctgaactttaacgccatgacttacggtgctacccaggctcgccgcctctccacggcctcctctgtcaccaaacctccacacttcatcctcaccactgactggatttggtactggagtgatgagtttggttcttggcaggaatatggaagacagggcacggtgcaccctgtgaccactgtcagcagtagcgacgtggagaaggcctacctggcctactgtacaccggggtctgacggccaggcagccaccttgaagttccaggccggaaagcacaactacgagttagatttcaaagccttcgttcagaaaaacctggtctatggcacaactaaaaaggtttgccgcagacccaaatacgtgtctccccaggatgtgacgaccatgcaaacctgcaataccaagtttccaggcccgaagagcatcccagactattgggactcctctgccctgccagacccaggctttcagaagatcacccttagttcttcctcggaagagtatcagaaggtctggaacctctttaaccgcacgctgcctttctactttgttcagaagattgagcgagtacagaacctggccctctgggaagtctaccagtggcaaaaaggacagatgcagaagcagaacggagggaaggccgtggacgagcggcagctgttccacggcaccagcgccatttttgtggacgccatctgccagcagaactttgactggcgggtctgtggtgttcatggcacttcctacggcaaggggagctactttgcccgagatgctgcatattcccaccactacagcaaatccgacacgcagacccacacgatgttcctggcccgggtgctggtgggcgagttcgtcaggggcaatgcctcctttgtccgtccgccggccaaggagggctggagcaacgccttctatgatagctgcgtgaacagtgtgtccgacccctccatctttgtgatctttgagaaacaccaggtctacccagagtatgtcatccagtacaccacctcctccaagccctcggtcacaccctccatcctgctggccttgggctccctgttcagcagccgacagtgagcgcacaggagtgttccaggcctttcacctgctctgccttgaaatggctatttgggcctttccttttctttttaaacagaaacttttaatgaactgttctcttaacattgacctctcaatgaagttatgttcttaatctcttgctaataatgatttttacttttaagtcacttttgggttcactagtggattaaccagaagtgattgtagttgagtccagttttgctttttaataatgtgttgaagttttagtttttactctttgttgactttgctgcttattggcaccagggacagagtttctagatacaattttatggattggttttaatttttatgagtttgtctctgcagtgattcggtttctcagagtctcatggcatcatagtttttccagaatgacacagtagccaccggtggatgacagcccacgggcggcacagtcacttctgcctgttgctctgacaccaacccaggcagctctgctgtggcttctcctgggctctggcattagttggtctgtgtcacattgtcagaacaggtggctgctgtgtggtgccatcgagtccctgctggttccccttgtcctgggagggtcacccattgcccaaggaagtgcatccacctggcaggtgacctggaggagtagcttccccgaggacccccaggcttggcctgtgattgcgcaaacccacatttcctaagcacactggacacccttcgagtgtgggttttaacatccctgtgagattgaatacttgtgccacacatgtcacaaaagagtatggaaataaaagaaaatttatccgaa

SEQ ID NO: 434291 - DNA, 4157 bp, Homo sapiens
tctcactctgtcgcccaggctggagtgcagtgtcatgatctccgctcactgcaatctctgcctcccggattcaagcgattctcctgcctgtctcccgagtagctgggattactggcgcccgttaccacgcccggctaatttttacgtttttagcagagacggggtttcaccacgttggccaggctggtctcaaactactgacctcaagtgatccgcccgccttgacctcccaaagtgctgggattacaggcgtgagccactgtgcctggcctatagttaagatttttatattcatttttagtgaatgttataccgtataccgtaagtactctccccccacaatccttctgcctctcatcttcccttttccattttcctaatacctcctactgcctcctctcaactacccttgtgtgtttcttcatctttctccgtgcttattcaaaaatatcctgccacacacacacacacaggcttctctttttgttattcagacatttaaaaaaattaattcttgatcattcaacttgattatttagacatttctgtacagccatcttttctcgtttaccaccacatcatggctgtctgcccctctacatccgcacacggagctctaacgcatgcttgttaaacagccttcgtaatagtctttaaagatcaaccacactgttcccacgtaaccctacctcccaggtagggttcccccagtaacactttcacacataacttatttactgttccttttacttctggaagattccgagaggaaagattgctgggtcaaaggtcacacgcgttttcaattttaatagctattcctggattacctcctcaaagggctctaacaactcgcattgctctcagcgtgtgagagggtcctttgctctgaagggtcttctaaaatatttgttcaatcgttacttagcaggggctgggagtaacggattttattttattttattttattttttgagacggagtctcgctctgtcgcccaggctggagtgcagtcgcgcaatctcggctcacggatttgctcttttaaaggacatacccttttatgtttaaatgaaggaactcattgatgcaccgaggcgaaaggaacctttaattaagtgcgtcttctatgcggagtgatcgcttttgtcacttgttcgaggggtgagagctcccgtcagttgtccctgtttctgtgagccgtctacgaagcccgggcttggcctgggcgacgctgagcggctttaaccggcggcgtccagccggctccgccagcgctgccgccgccctcgaggctccctctgactgaaggcgcgctgagcatcgcggcattaggggctcctggtccctcaaacatccagggaagccattttcagggactaggtactgacccccgcgagccgccacagccacagcccgcgctccgggccgaacgcccgagctcaagagctcccgagcttccgtcgggcggcggcctcacagctgggggccctgaggcggaaggcgcagccgctcagctgcggaccgggggcgtggcgagggcgcacaggttctgtttttcgccggcccggggccgctttcggtttcgtttcccgccggcgtctccaccctgcgagagccgcccgccagccagcgtccgccgccgtccgcgtcgcgccacccgcggtccgacgggagcaggcccagcggccatggcccaggccggcgtcgtcggtgaggtcacccaggtgctgtgcgcggccgggggcgccctggagttgcccgagctgcggcgccgcttgcggatgggcttgagcgccgacgcgctggagcggctgctgcggcagcgtgggcgcttcgtggtggcggtgcgggcgggcggcgcagccgcggccccggagcgcgtggtgctggccgcctcgccgctgcgcctgtgtcgcgcgcaccagggctccaagccgggctgcgtggggctctgcgcgcagctccacctctgcaggttcatggtctacggcgcctgcaagttcctgagagccgggaagaactgtaggaatagtcacagcttgacaaccgaacacaacctgagtgtgctgagaactcatggcgttgaccacctgagctataatgagctatgccaactcttgtttcagaacgacccctggcttttgccagaaatttgccaacattacaacaaaggagatggaccccacggctcttgtgcctttcaaaagcagtgcatcaagctccatatctgccagtattttttacagggggaatgcaagtttggcactagctgtaagagatcccatgatttctctaattctgagaatctggaaaaattggagaagttgggtatgagctcagacctggtgagcaggctgcctaccatttatagaaatgcacatgacatcaagaataagagctctgcccccagcagagtgcctcctctttttgtcccacaggggacttctgaaagaaaagacagttcaggttctgtgtccccaaacactcttagccaggaggagggtgatcagatctgtttgtaccatatccggaaaagttgtagctttcaagggcacggtgcaccctgtgaccactgtcagcagtagcgacgtggagaaggcctacctggcctactgtacaccggggtctgacggccaggcagccaccttgaagttccaggccggaaagcacaactacgagttagatttcaaagccttcgttcagaaaaacctggtctatggcacaactaaaaaggtttgccgcagacccaaatacgtgtctccccaggatgtgacgaccatgcaaacctgcaataccaagtttccaggcccgaagagcatcccagactattgggactcctctgccctgccagacccaggctttcaggcaaaaaggacagatgcagaagcagaacggagggaaggccgtggacgagcggcagctgttccacggcaccagcgccatttttgtggacgccatctgccagcagaactttgactggcgggtctgtggtgttcatggcacttcctacggcaaggggagctactttgcccgagatgctgcatattcccaccactacagcaaatccgacacgcagacccacacgatgttcctggcccgggtgctggtgggcgagttcgtcaggggcaatgcctcctttgtccgtccgccggccaaggagggctggagcaacgccttctatgatagctgcgtgaacagtgtgtccgacccctccatctttgtgatctttgagaaacaccaggtctacccagagtatgtcatccagtacaccacctcctccaagccctcggtcacaccctccatcctgctggccttgggctccctgttcagcagccgacagtgagcgcacaggagtgttccaggcctttcacctgctctgccttgaaatggctatttgggcctttccttttctttttaaacagaaacttttaatgaactgttctcttaacattgacctctcaatgaagttatgttcttaatctcttgctaataatgatttttacttttaagtcacttttgggttcactagtggattaaccagaagtgattgtagttgagtccagttttgctttttaataatgtgttgaagttttagtttttactctttgttgactttgctgcttattggcaccagggacagagtttctagatacaattttatggattggttttaatttttatgagtttgtctctgcagtgattcggtttctcagagtctcatggcatcatagtttttccagaatgacacagtagccaccggtggatgacagcccacgggcggcacagtcacttctgcctgttgctctgacaccaacccaggcagctctgctgtggcttctcctgggctctggcattagttggtctgtgtcacattgtcagaacaggtggctgctgtgtggtgccatcgagtccctgctggttccccttgtcctgggagggtcacccattgcccaaggaagtgcatccacctggcaggtgacctggaggagtagcttccccgaggacccccaggcttggcctgtgattgcgcaaacccacatttcctaagcacactggacacccttcgagtgtgggttttaacatccctgtgagattgaatacttgtgccacacatgtcacaaaagagtatggaaataaaagaaaatttatccgaa

SEQ ID NO: 434292 - DNA, 4766 bp, Homo sapiens
tctcactctgtcgcccaggctggagtgcagtgtcatgatctccgctcactgcaatctctgcctcccggattcaagcgattctcctgcctgtctcccgagtagctgggattactggcgcccgttaccacgcccggctaatttttacgtttttagcagagacggggtttcaccacgttggccaggctggtctcaaactactgacctcaagtgatccgcccgccttgacctcccaaagtgctgggattacaggcgtgagccactgtgcctggcctatagttaagatttttatattcatttttagtgaatgttataccgtataccgtaagtactctccccccacaatccttctgcctctcatcttcccttttccattttcctaatacctcctactgcctcctctcaactacccttgtgtgtttcttcatctttctccgtgcttattcaaaaatatcctgccacacacacacacacaggcttctctttttgttattcagacatttaaaaaaattaattcttgatcattcaacttgattatttagacatttctgtacagccatcttttctcgtttaccaccacatcatggctgtctgcccctctacatccgcacacggagctctaacgcatgcttgttaaacagccttcgtaatagtctttaaagatcaaccacactgttcccacgtaaccctacctcccaggtagggttcccccagtaacactttcacacataacttatttactgttccttttacttctggaagattccgagaggaaagattgctgggtcaaaggtcacacgcgttttcaattttaatagctattcctggattacctcctcaaagggctctaacaactcgcattgctctcagcgtgtgagagggtcctttgctctgaagggtcttctaaaatatttgttcaatcgttacttagcaggggctgggagtaacggattttattttattttattttattttttgagacggagtctcgctctgtcgcccaggctggagtgcagtcgcgcaatctcggctcacggatttgctcttttaaaggacatacccttttatgtttaaatgaaggaactcattgatgcaccgaggcgaaaggaacctttaattaagtgcgtcttctatgcggagtgatcgcttttgtcacttgttcgaggggtgagagctcccgtcagttgtccctgtttctgtgagccgtctacgaagcccgggcttggcctgggcgacgctgagcggctttaaccggcggcgtccagccggctccgccagcgctgccgccgccctcgaggctccctctgactgaaggcgcgctgagcatcgcggcattaggggctcctggtccctcaaacatccagggaagccattttcagggactaggtactgacccccgcgagccgccacagccacagcccgcgctccgggccgaacgcccgagctcaagagctcccgagcttccgtcgggcggcggcctcacagctgggggccctgaggcggaaggcgcagccgctcagctgcggaccgggggcgtggcgagggcgcacaggttctgtttttcgccggcccggggccgctttcggtttcgtttcccgccggcgtctccaccctgcgagagccgcccgccagccagcgtccgccgccgtccgcgtcgcgccacccgcggtccgacgggagcaggcccagcggccatggcccaggccggcgtcgtcggtgaggtcacccaggtgctgtgcgcggccgggggcgccctggagttgcccgagctgcggcgccgcttgcggatgggcttgagcgccgacgcgctggagcggctgctgcggcagcgtgggcgcttcgtggtggcggtgcgggcgggcggcgcagccgcggccccggagcgcgtggtgctggccgcctcgccgctgcgcctgtgtcgcgcgcaccagggctccaagccgggctgcgtggggctctgcgcgcagctccacctctgcaggttcatggtctacggcgcctgcaagttcctgagagccgggaagaactgtaggaatagtcacagcttgacaaccgaacacaacctgagtgtgctgagaactcatggcgttgaccacctgagctataatgagctatgccaactcttgtttcagaacgacccctggcttttgccagaaatttgccaacattacaacaaaggagatggaccccacggctcttgtgcctttcaaaagcagtgcatcaagctccatatctgccagtattttttacagggggaatgcaagtttggcactagctgtaagagatcccatgatttctctaattctgagaatctggaaaaattggagaagttgggtatgagctcagacctggtgagcaggctgcctaccatttatagaaatgcacatgacatcaagaataagagctctgcccccagcagagtgcctcctctttttgtcccacaggggacttctgaaagaaaagacagttcaggttctgtgtccccaaacactcttagccaggaggagggtgatcagatctgtttgtaccatatccggaaaagttgtagctttcaagataagtgccatagagttcatttccatttgccgtatcgatggcaattcttggatagaggcaaatgggaggatttggacaacatggaacttattgaagaggcatattgcaatcccaaaatagaaaggatcctgtgctctgagtcagccagtacctttcactctcattgtctgaactttaacgccatgacttacggtgctacccaggctcgccgcctctccacggcctcctctgtcaccaaacctccacacttcatcctcaccactgactggatttggtactggagtgatgagtttggttcttggcaggaatatggaagacagggcacggtgcaccctgtgaccactgtcagcagtagcgacgtggagaaggcctacctggcctactgtacaccggggtctgacggccaggcagccaccttgaagttccaggccggaaagcacaactacgagttagatttcaaagccttcgttcagaaaaacctggtctatggcacaactaaaaaggtttgccgcagacccaaatacgtgtctccccaggatgtgacgaccatgcaaacctgcaataccaagtttccaggcccgaagagcatcccagactattgggactcctctgccctgccagacccaggctttcagaagatcacccttagttcttcctcggaagagtatcagaaggtctggaacctctttaaccgcacgctgcctttctactttgttcagaagattgagcgagtacagaacctggccctctgggaagtctaccagtggcaaaaaggacagatgcagaagcagaacggagggaaggccgtggacgagcggcagctgttccacggcaccagcgccatttttgtggacgccatctgccagcagaactttgactggcgggtctgtggtgttcatggcacttcctacggcaaggggagctactttgcccgagatgctgcatattcccaccactacagcaaatccgacacgcagacccacacgatgttcctggcccgggtgctggtgggcgagttcgtcaggggcaatgcctcctttgtccgtccgccggccaaggagggctggagcaacgccttctatgatagctgcgtgaacagtgtgtccgacccctccatctttgtgatctttgagaaacaccaggtctacccagagtatgtcatccagtacaccacctcctccaagccctcggtcacaccctccatcctgctggccttgggctccctgttcagcagccgacagtgagcgcacaggagtgttccaggcctttcacctgctctgccttgaaatggctatttgggcctttccttttctttttaaacagaaacttttaatgaactgttctcttaacattgacctctcaatgaagttatgttcttaatctcttgctaataatgatttttacttttaagtcacttttgggttcactagtggattaaccagaagtgattgtagttgagtccagttttgctttttaataatgtgttgaagttttagtttttactctttgttgactttgctgcttattggcaccagggacagagtttctagatacaattttatggattggttttaatttttatgagtttgtctctgcagtgattcggtttctcagagtctcatggcatcatagtttttccagaatgacacagtagccaccggtggatgacagcccacgggcggcacagtcacttctgcctgttgctctgacaccaacccaggcagctctgctgtggcttctcctgggctctggcattagttggtctgtgtcacattgtcagaacaggtggctgctgtgtggtgccatcgagtccctgctggttccccttgtcctgggagggtcacccattgcccaaggaagtgcatccacctggcaggtgacctggaggagtagcttccccgaggacccccaggcttggcctgtgattgcgcaaacccacatttcctaagcacactggacacccttcgagtgtgggttttaacatccctgtgagattgaatacttgtgccacacatgtcacaaaagagtatggaaataaaagaaaatttatccgaaaaaaaaaaaaaaaaaaaagggggggggctaaaaatccccgggggcccagttaccgtgccgtttctggcaaggggcccaaaggggtataagaagcagggcgggtaacaccgtgggaacggctggcttgggggccctggggtggaaccccaaagcggaat

SEQ ID NO: 434293 - DNA, 1901 bp, Homo sapiens
gaaaaattgccaagcaaaataatggtttaaacaagattggaaggaacaatttaaaagcactcatgtgtaattgatatgtcaattactaatcattcctctattcattaaacccagtctcctaaggatacctattttctttatgaatatttgaaatgtgtaaaatggccctatttttaacagactgattctgggttttacacatttggataagctttcaaatctatctaatttgtgtttataaaacattgccatcctgtgtgtatgtatatgtatatgtatattttttcactggttatgttttttttcagccttcgttcagaaaaacctggtctatggcacaactaaaaaggtttgccgcagacccaaatacgtgtctccccaggatgtgacgaccatgcaaacctgcaataccaagtttccaggcccgaagagcatcccagactattgggactcctctgccctgccagacccaggctttcagaagatcacccttagttcttcctcggaagagtatcagaaggtctggaacctctttaaccgcacgctgcctttctactttgttcagaagattgagcgagtacagaacctggccctctgggaagtctaccagtggcaaaaaggacagatgcagaagcagaacggagggaaggccgtggacgagcggcagctgttccacggcaccagcgccatttttgtggacgccatctgccagcagaactttgactggcgggtctgtggtgttcatggcacttcctacggcaaggggagctactttgcccgagatgctgcatattcccaccactacagcaaatccgacacgcagacccacacgatgttcctggcccgggtgctggtgggcgagttcgtcaggggcaatgcctcctttgtccgtccgccggccaaggagggctggagcaacgccttctatgatagctgcgtgaacagtgtgtccgacccctccatctttgtgatctttgagaaacaccaggtctacccagagtatgtcatccagtacaccacctcctccaagccctcggtcacaccctccatcctgctggccttgggctccctgttcagcagccgacagtgagcgcacaggagtgttccaggcctttcacctgctctgccttgaaatggctatttgggcctttccttttctttttaaacagaaacttttaatgaactgttctcttaacattgacctctcaatgaagttatgttcttaatctcttgctaataatgatttttacttttaagtcacttttgggttcactagtggattaaccagaagtgattgtagttgagtccagttttgctttttaataatgtgttgaagttttagtttttactctttgttgactttgctgcttattggcaccagggacagagtttctagatacaattttatggattggttttaatttttatgagtttgtctctgcagtgattcggtttctcagagtctcatggcatcatagtttttccagaatgacacagtagccaccggtggatgacagcccacgggcggcacagtcacttctgcctgttgctctgacaccaacccaggcagctctgctgtggcttctcctgggctctggcattagttggtctgtgtcacattgtcagaacaggtggctgctgtgtggtgccatcgagtccctgctggttccccttgtcctgggagggtcacccattgcccaaggaagtgcatccacctggcaggtgacctggaggagtagcttccccgaggacccccaggcttggcctgtgattgcgcaaacccacatttcctaagcacactggacacccttcgagtgtgggttttaacatccctgtgagattgaatacttgtgccacacatgtcacaaaagagtatggaaataaaagaaaatttatccgaa

SEQ ID NO: 434294 - DNA, 1520 bp, Homo sapiens
cactaatgggcgagcttcgtcaggcaataccaagtttccaggcccgaagagcatcccagactattgggactcctctgccctgccagacccaggctttcagaagatcacccttagttcttcctcggaagagtatcagaaggtctggaacctctttaaccgcacgctgcctttctactttgttcagaagattgagcgagtacagaacctggccctctgggaagtctaccagtggcaaaaaggacagatgcagaagcagaacggagggaaggccgtggacgagcggcagctgttccacggcaccagcgccatttttgtggacgccatctgccagcagaactttgactggcgggtctgtggtgttcatggcacttcctacggcaaggggagctactttgcccgagatgctgcatattcccaccactacagcaaatccgacacgcagacccacacgatgttcctggcccgggtgctggtgggcgagttcgtcaggggcaatgcctcctttgtccgtccgccggccaaggagggctggagcaacgccttctatgatagctgcgtgaacagtgtgtccgacccctccatctttgtgatctttgagaaacaccaggtctacccagagtatgtcatccagtacaccacctcctccaagccctcggtcacaccctccatcctgctggccttgggctccctgttcagcagccgacagtgagcgcacaggagtgttccaggcctttcacctgctctgccttgaaatggctatttgggcctttccttttctttttaaacagaaacttttaatgaactgttctcttaacattgacctctcaatgaagttatgttcttaatctcttgctaataatgatttttacttttaagtcacttttgggttcactagtggattaaccagaagtgattgtagttgagtccagttttgctttttaataatgtgttgaagttttagtttttactctttgttgactttgctgcttattggcaccagggacagagtttctagatacaattttatggattggttttaatttttatgagtttgtctctgcagtgattcggtttctcagagtctcatggcatcatagtttttccagaatgacacagtagccaccggtggatgacagcccacgggcggcacagtcacttctgcctgttgctctgacaccaacccaggcagctctgctgtggcttctcctgggctctggcattagttggtctgtgtcacattgtcagaacaggtggctgctgtgtggtgccatcgagtccctgctggttccccttgtcctgggagggtcacccattgcccaaggaagtgcatccacctggcaggtgacctggaggagtagcttccccgaggacccccaggcttggcctgtgattgcgcaaacccacatttcctaagcacactggacacccttcgagtgtgggttttaacatccctgtgagattgaatacttgtgccacacatgtcacaaaagagtatggaaataaaagaaaatttatccgaa

SEQ ID NO: 434295 - DNA, 3361 bp, Homo sapiens
tctcactctgtcgcccaggctggagtgcagtgtcatgatctccgctcactgcaatctctgcctcccggattcaagcgattctcctgcctgtctcccgagtagctgggattactggcgcccgttaccacgcccggctaatttttacgtttttagcagagacggggtttcaccacgttggccaggctggtctcaaactactgacctcaagtgatccgcccgccttgacctcccaaagtgctgggattacaggcgtgagccactgtgcctggcctatagttaagatttttatattcatttttagtgaatgttataccgtataccgtaagtactctccccccacaatccttctgcctctcatcttcccttttccattttcctaatacctcctactgcctcctctcaactacccttgtgtgtttcttcatctttctccgtgcttattcaaaaatatcctgccacacacacacacacaggcttctctttttgttattcagacatttaaaaaaattaattcttgatcattcaacttgattatttagacatttctgtacagccatcttttctcgtttaccaccacatcatggctgtctgcccctctacatccgcacacggagctctaacgcatgcttgttaaacagccttcgtaatagtctttaaagatcaaccacactgttcccacgtaaccctacctcccaggtagggttcccccagtaacactttcacacataacttatttactgttccttttacttctggaagattccgagaggaaagattgctgggtcaaaggtcacacgcgttttcaattttaatagctattcctggattacctcctcaaagggctctaacaactcgcattgctctcagcgtgtgagagggtcctttgctctgaagggtcttctaaaatatttgttcaatcgttacttagcaggggctgggagtaacggattttattttattttattttattttttgagacggagtctcgctctgtcgcccaggctggagtgcagtcgcgcaatctcggctcacggatttgctcttttaaaggacatacccttttatgtttaaatgaaggaactcattgatgcaccgaggcgaaaggaacctttaattaagtgcgtcttctatgcggagtgatcgcttttgtcacttgttcgaggggtgagagctcccgtcagttgtccctgtttctgtgagccgtctacgaagcccgggcttggcctgggcgacgctgagcggctttaaccggcggcgtccagccggctccgccagcgctgccgccgccctcgaggctccctctgactgaaggcgcgctgagcatcgcggcattaggggctcctggtccctcaaacatccagggaagccattttcagggactaggtactgacccccgcgagccgccacagccacagcccgcgctccgggccgaacgcccgagctcaagagctcccgagcttccgtcgggcggcggcctcacagctgggggccctgaggcggaaggcgcagccgctcagctgcggaccgggggcgtggcgagggcgcacaggttctgtttttcgccggcccggggccgctttcggtttcgtttcccgccggcgtctccaccctgcgagagccgcccgccagccagcgtccgccgccgtccgcgtcgcgccacccgcggtccgacgggagcaggcccagcggccatggcccaggccggcgtcgtcggtgaggtcacccaggtgctgtgcgcggccgggggcgccctggagttgcccgagctgcggcgccgcttgcggatgggcttgagcgccgacgcgctggagcggctgctgcggcagcgtgggcgcttcgtggtggcggtgcgggcgggcggcgcagccgcggccccggagcgcgtggtgctggccgcctcgccgctgcgcctgtgtcgcgcgcaccagggctccaagccgggctgcgtggggctctgcgcgcagctccacctctgcaggttcatggtctacggcgcctgcaagttcctgagagccgggaagaactgtaggaatagtcacagcttgacaaccgaacacaacctgagtgtgctgagaactcatggcgttgaccacctgagctataatgagctatgccaactcttgtttcagaacgacccctggcttttgccagaaatttgccaacattacaacaaaggagatggaccccacggctcttgtgcctttcaaaagcagtgcatcaagctccatatctgccagtattttttacagggggaatgcaagtttggcactagctgtaagagatcccatgatttctctaattctgagaatctggaaaaattggagaagttgggtatgagctcagacctggtgagcaggctgcctaccatttatagaaatgcacatgacatcaagaataagagctctgcccccagcagagtgcctcctctttttgtcccacaggggacttctgaaagaaaagacagttcaggttctgtgtccccaaacactcttagccaggaggagggtgatcagatctgtttgtaccatatccggaaaagttgtagctttcaagataagtgccatagagttcatttccatttgccgtatcgatggcaattcttggatagaggcaaatgggaggatttggacaacatggaacttattgaagaggcatattgcaatcccaaaatagaaaggatcctgtgctctgagtcagccagtacctttcactctcattgtctgaactttaacgccatgacttacggtgctacccaggctcgccgcctctccacggcctcctctgtcaccaaacctccacacttcatcctcaccactgactggatttggtactggagtgatgagtttggttcttggcaggaatatggaagacagggcacggtgcaccctgtgaccactgtcagcagtagcgacgtggagaaggcctacctggcctactgtacaccggggtctgacggccaggcagccaccttgaagttccaggccggaaagcacaactacgagttagatttcaaagccttcgttcagaaaaacctggtctatggcacaactaaaaaggtttgccgcagacccaaatacgtgtctccccaggatgtgacgaccatgcaaacctgttggaccagagtgggaattaccctgtgggtagaagcttcgtgatgcataattagaaggctgcctgttgtgatctgcgatgattctctggagaagacagactctgaaggcgagtctagacttgaagccaacccatccgtttgtcttttctgtggaatcattgagtcatagacttgaattttttaaatgttgaaataatgaaataatgatggaattacaccaataaaaactcatgtattttagtatttgaa

SEQ ID NO: 434296 - DNA, 3514 bp, Homo sapiens
tctcactctgtcgcccaggctggagtgcagtgtcatgatctccgctcactgcaatctctgcctcccggattcaagcgattctcctgcctgtctcccgagtagctgggattactggcgcccgttaccacgcccggctaatttttacgtttttagcagagacggggtttcaccacgttggccaggctggtctcaaactactgacctcaagtgatccgcccgccttgacctcccaaagtgctgggattacaggcgtgagccactgtgcctggcctatagttaagatttttatattcatttttagtgaatgttataccgtataccgtaagtactctccccccacaatccttctgcctctcatcttcccttttccattttcctaatacctcctactgcctcctctcaactacccttgtgtgtttcttcatctttctccgtgcttattcaaaaatatcctgccacacacacacacacaggcttctctttttgttattcagacatttaaaaaaattaattcttgatcattcaacttgattatttagacatttctgtacagccatcttttctcgtttaccaccacatcatggctgtctgcccctctacatccgcacacggagctctaacgcatgcttgttaaacagccttcgtaatagtctttaaagatcaaccacactgttcccacgtaaccctacctcccaggtagggttcccccagtaacactttcacacataacttatttactgttccttttacttctggaagattccgagaggaaagattgctgggtcaaaggtcacacgcgttttcaattttaatagctattcctggattacctcctcaaagggctctaacaactcgcattgctctcagcgtgtgagagggtcctttgctctgaagggtcttctaaaatatttgttcaatcgttacttagcaggggctgggagtaacggattttattttattttattttattttttgagacggagtctcgctctgtcgcccaggctggagtgcagtcgcgcaatctcggctcacggatttgctcttttaaaggacatacccttttatgtttaaatgaaggaactcattgatgcaccgaggcgaaaggaacctttaattaagtgcgtcttctatgcggagtgatcgcttttgtcacttgttcgaggggtgagagctcccgtcagttgtccctgtttctgtgagccgtctacgaagcccgggcttggcctgggcgacgctgagcggctttaaccggcggcgtccagccggctccgccagcgctgccgccgccctcgaggctccctctgactgaaggcgcgctgagcatcgcggcattaggggctcctggtccctcaaacatccagggaagccattttcagggactaggtactgacccccgcgagccgccacagccacagcccgcgctccgggccgaacgcccgagctcaagagctcccgagcttccgtcgggcggcggcctcacagctgggggccctgaggcggaaggcgcagccgctcagctgcggaccgggggcgtggcgagggcgcacaggttctgtttttcgccggcccggggccgctttcggtttcgtttcccgccggcgtctccaccctgcgagagccgcccgccagccagcgtccgccgccgtccgcgtcgcgccacccgcggtccgacgggagcaggcccagcggccatggcccaggccggcgtcgtcggtgaggtcacccaggtgctgtgcgcggccgggggcgccctggagttgcccgagctgcggcgccgcttgcggatgggcttgagcgccgacgcgctggagcggctgctgcggcagcgtgggcgcttcgtggtggcggtgcgggcgggcggcgcagccgcggccccggagcgcgtggtgctggccgcctcgccgctgcgcctgtgtcgcgcgcaccagggctccaagccgggctgcgtggggctctgcgcgcagctccacctctgcaggttcatggtctacggcgcctgcaagttcctgagagccgggaagaactgtaggaatagtcacagcttgacaaccgaacacaacctgagtgtgctgagaactcatggcgttgaccacctgagctataatgagctatgccaactcttgtttcagaacgacccctggcttttgccagaaatttgccaacattacaacaaaggagatggaccccacggctcttgtgcctttcaaaagcagtgcatcaagctccatatctgccagtattttttacagggggaatgcaagtttggcactagctgtaagagatcccatgatttctctaattctgagaatctggaaaaattggagaagttgggtatgagctcagacctggtgagcaggctgcctaccatttatagaaatgcacatgacatcaagaataagagctctgcccccagcagagtgcctcctctttttgtcccacaggggacttctgaaagaaaagacagttcaggttctgtgtccccaaacactcttagccaggaggagggtgatcagatctgtttgtaccatatccggaaaagttgtagctttcaagataagtgccatagagttcatttccatttgccgtatcgatggcaattcttggatagaggcaaatgggaggatttggacaacatggaacttattgaagaggcatattgcaatcccaaaatagaaaggatcctgtgctctgagtcagccagtacctttcactctcattgtctgaactttaacgccatgacttacggtgctacccaggctcgccgcctctccacggcctcctctgtcaccaaacctccacacttcatcctcaccactgactggatttggtactggagtgatgagtttggttcttggcaggaatatggaagacagggcacggtgcaccctgtgaccactgtcagcagtagcgacgtggagaaggcctacctggcctactgtacaccggggtctgacggccaggcagccaccttgaagttccaggccggaaagcacaactacgagttagatttcaaagccttcgttcagaaaaacctggtctatggcacaactaaaaaggtttgccgcagacccaaatacgtgtctccccaggatgtgacgaccatgcaaacctggtaggttgcagtggggggcttggtacttaggatgtaaccagctggggtgtgctctgcagtggtgacagaaaacctgcctcagacagcacccgggcaccgttggcttgtacaacgaagtgctcccacactctgttatcgtttgtcttctactagttggaccagagtgggaattaccctgtgggtagaagcttcgtgatgcataattagaaggctgcctgttgtgatctgcgatgattctctggagaagacagactctgaaggcgagtctagacttgaagccaacccatccgtttgtcttttctgtggaatcattgagtcatagacttgaattttttaaatgttgaaataatgaaataatgatggaattacaccaataaaaactcatgtattttagtatttgaa

SEQ ID NO: 434297 - DNA, 2430 bp, Homo sapiens
tctcactctgtcgcccaggctggagtgcagtgtcatgatctccgctcactgcaatctctgcctcccggattcaagcgattctcctgcctgtctcccgagtagctgggattactggcgcccgttaccacgcccggctaatttttacgtttttagcagagacggggtttcaccacgttggccaggctggtctcaaactactgacctcaagtgatccgcccgccttgacctcccaaagtgctgggattacaggcgtgagccactgtgcctggcctatagttaagatttttatattcatttttagtgaatgttataccgtataccgtaagtactctccccccacaatccttctgcctctcatcttcccttttccattttcctaatacctcctactgcctcctctcaactacccttgtgtgtttcttcatctttctccgtgcttattcaaaaatatcctgccacacacacacacacaggcttctctttttgttattcagacatttaaaaaaattaattcttgatcattcaacttgattatttagacatttctgtacagccatcttttctcgtttaccaccacatcatggctgtctgcccctctacatccgcacacggagctctaacgcatgcttgttaaacagccttcgtaatagtctttaaagatcaaccacactgttcccacgtaaccctacctcccaggtagggttcccccagtaacactttcacacataacttatttactgttccttttacttctggaagattccgagaggaaagattgctgggtcaaaggtcacacgcgttttcaattttaatagctattcctggattacctcctcaaagggctctaacaactcgcattgctctcagcgtgtgagagggtcctttgctctgaagggtcttctaaaatatttgttcaatcgttacttagcaggggctgggagtaacggattttattttattttattttattttttgagacggagtctcgctctgtcgcccaggctggagtgcagtcgcgcaatctcggctcacggatttgctcttttaaaggacatacccttttatgtttaaatgaaggaactcattgatgcaccgaggcgaaaggaacctttaattaagtgcgtcttctatgcggagtgatcgcttttgtcacttgttcgaggggtgagagctcccgtcagttgtccctgtttctgtgagccgtctacgaagcccgggcttggcctgggcgacgctgagcggctttaaccggcggcgtccagccggctccgccagcgctgccgccgccctcgaggctccctctgactgaaggcgcgctgagcatcgcggcattaggggctcctggtccctcaaacatccagggaagccattttcagggactaggtactgacccccgcgagccgccacagccacagcccgcgctccgggccgaacgcccgagctcaagagctcccgagcttccgtcgggcggcggcctcacagctgggggccctgaggcggaaggcgcagccgctcagctgcggaccgggggcgtggcgagggcgcacaggttctgtttttcgccggcccggggccgctttcggtttcgtttcccgccggcgtctccaccctgcgagagccgcccgccagccagcgtccgccgccgtccgcgtcgcgccacccgcggtccgacgggagcaggcccagcggccatggcccaggccggcgtcgtcggtgaggtcacccaggtgctgtgcgcggccgggggcgccctggagttgcccgagctgcggcgccgcttgcggatgggcttgagcgccgacgcgctggagcggctgctgcggcagcgtgggcgcttcgtggtggcggtgcgggcgggcggcgcagccgcggccccggagcgcgtggtgctggccgcctcgccgctgcgcctgtgtcgcgcgcaccagggctccaagccgggctgcgtggggctctgcgcgcagctccacctctgcaggttcatggtctacggcgcctgcaagttcctgagagccgggaagaactgtaggaatagtcacagcttgacaaccgaacacaacctgagtgtgctgagaactcatggcgttgaccacctgagctataatgagctatgccaactcttgtttcagaacgacccctggcttttgccagaaaaatttggaatgtggagcagaaggagcagtgaagttcaagggccagctttgccaacaacccagttccacaaacatcacacagatgccatggatagctgtgcgactagggctgattctttaacttctctgagcctctcagtgtgctccattgagaaatgaaagggtggtatttggccttctctaagatgctttaagccctcagagcctctttgactttgaattgtagaaaagagagctcagagaaaactggggcttggggaagggagagttgatgagt

SEQ ID NO: 434298 - DNA, 640 bp, Homo sapiens
tttccgtctgaggcagcgatggcaaggggtcaagatggacagcagccagtggtagacttgtggatttaaatgtacaggtgacagcttctaactcagatttccatttgacaaggctcataattctatacattgggctgccagagtctacagactgcttccgtatatgggatctcattcattttccatgccaaccctgtaaggttgggctgaacagccccattttatgcctgaggaatctgaggtttgggggattaagtagtgacgtgtccacaggcctttaggtttcgtggggcagatccggaacttgaaaggaatttgctatctcagtttggtaactcctcagatgctgccactcagaagggtgttggtatcactgatgcatgtgacttcatgagggagagtggagacatggcacagagggagggagggagatgcggggtggaagagtagaggccctggcgttgcacatcaccaggacgctattcgcagtgtgctgacccttcctggctgcaggcccctccaccagctgagccctcgtgtgtcatttcagggagctactttgcccgagatgctgcatattcccaccactacagcaaatccgacacgcagacccacacgatgttcctggcccgggtgctgg

SEQ ID NO: 434299 - DNA, 245 bp, Homo sapiens
cgagtctagacttgaagccaacccatccgtttgtcttttctgtggaatcattgagtcatagacttgaattttttaaatgttgaaataatgaaataatgatggaattacaccaataaaaactcatgtattttagtatttgaatatcacggaataccaaaactctaaaaacagatattgcagtcactaatgggcgagcttcgtcagggtgagtttctttcagtcccaagatggctgccaggagccac

SEQ ID NO: 434300 - DNA, 374 bp, Homo sapiens
ctagtgtttacaagaagctttgggaagggactgatttatattctgcacgttgatggtaatgcattaaaaacatttgccccttgcagaagatcacccttagttcttcctcggaagagtatcagaaggtctggaacctctttaaccgcacgctgcctttctactttgttcagaagattgagcgagtacagaacctggccctctgggaagtctaccagtggtgcgttggggctcgctcttggtgggctggtgactctgtcccttcacaccactggctggttgccacatgtggcccgggtttccaggaaaagcagagcggcagttagggctgccatgtgctgggagctgtgtgtctgctctccttcgtccgctccccc

SEQ ID NO: 434301 - DNA, 2535 bp, Homo sapiens
tttgactggagtatggggaaaaggtggggcgttggggagacaggtctggggccagactgcaggggtgggaattggcttggtctgggaggcaatgaggggcgagtggacgggtcagaggcggcggcgcttccaccccgactggcattagagggcgtgtcctaggagaggagcatccccctccccggaccagccgccctccggagcccagagtcaccggagatgggggcacaccccggggctgcgtgtgtcgtgtcaggccgcggcagggagaggccgtcccctggtggcgccggccggaacgcccctcgtgccgcgaccgcgcgcccctctgtcctcgccgcgcgtcggcgcagagcagccacccggggcccagcaggcgcgggcttccccacgcgccccgggaagggacagctcggtgtggggtccgggaggcttgagccccgcggccgcatccggggagccctcggcagtcgcggagctgcttcccaggggtgagctctccgggaggcccacggggtggccccgggcgcctccgccctcagctgtcgctccttataaggcgggggccgggcggcgccggaggaggggccgcggcatcagcccggtcctgggctctggggcggcgctgggccgggcgagcggagtgcagcgcagccgcggggagcgaggagcgcgcggagccggccatgggcaagtcagcttccaaacagtttcataatgaggtcctgaaggcccacaatgagtaccggcagaagcacggcgtccccccactgaagctctgcaagaacctcaaccgggaggctcaacagtattctgaggccctggccagcacgaggatcctcaagcacagcccggagtccagccgtggccagtgtggggagaaccttgcatgggcatcctatgatcagacaggaaaggaggtggctgatagatggtacagtgaaatcaagaactataacttccagcagcctggcttcacctcggggactggacacttcacggccatggtatggaagaacaccaagaagatgggcgtggggaaggcgtccgcaagtgacgggtcctcctttgtggtggccagatacttcccagcggggaatgttgtcaatgagggcttcttcgaagaaaacgtcctgccgccgaagaagtaacttgttaaatgtaatgggaaggtggcagacttaagaacgtggatatgaagtgcctagaaccaccacaacctggctgtgcgtctgtccctgtgggtgtatgtgcttgtgtgtgtgatgcatgtgagcgtctctggcacacacacttggacatacagttctgtgtgcgctcattcttattacaggagtgagcaaaggaagcatttaccccgatggttacctagaccacgattatttggattggggggaggggggatccgttttttttttttaattttttgttatttctaagcaaacctcttttgtacttttcttacttctaatatccatccctggactttttgtattccaaatgtttgtgatgctgagaagtgaagttcattttatgtgatcttcatgcgtcgtaatctacttttggtagataattaagattattaaaccctcatttaaatgtgacataaaatacagctttaagcacataaatacaaagcagcttccatcaggaacatggagcaggcagggactccattttacagaattactgagatttctcagttgtaaaacatgatgtcatcctgcatgcctcctggaattctccaatggggtcgccaaacaacaaatggagaaaaaaagttttacttccttgcattcttctacctttaaatagcaaagtaccactaccaccaccacctcttgcccccttccctcttttcttaaacttctggcatttcagagctcagcaggctacccctggtttctggagagttgggctaggcctgaagctccccctcccccacctctgctaggcagcccaggcctggtctgggagacagcccctcaccctgcctgggctcttggccaagcggccttggatggatgaagtcagagaggtggggtgagggtgagcttactcagggcccccagaggaagccctcagcctctgccctccccccacacagggcgggagcccaggcctgttcctggcagctgtggctgcagctgtgctcctgctccctcctggaatgtgcgacaagcccaaatgttccggggaggcggccggggcagggggcttagaagtgctaatatggttctgtgttttgcctgaaacgataccaggttcccctgaatagcaactttacaaggtccatgtgggagggaccaacccagatgccctgctgagtgtccctgaaaccatggcagctccatctgtcaagatggcaggggccggagtgagggggctgctggcttaacagcaggcatctgggcaggccagtcctcaaagcagctcctgaaggtctgtgttgcactgtcaccagtctcaagctatgcctctaatttcaccagggatattgactaagaagacaataaaatctttttctttgtgtaa

SEQ ID NO: 434302 - DNA, 2621 bp, Homo sapiens
tttgactggagtatggggaaaaggtggggcgttggggagacaggtctggggccagactgcaggggtgggaattggcttggtctgggaggcaatgaggggcgagtggacgggtcagaggcggcggcgcttccaccccgactggcattagagggcgtgtcctaggagaggagcatccccctccccggaccagccgccctccggagcccagagtcaccggagatgggggcacaccccggggctgcgtgtgtcgtgtcaggccgcggcagggagaggccgtcccctggtggcgccggccggaacgcccctcgtgccgcgaccgcgcgcccctctgtcctcgccgcgcgtcggcgcagagcagccacccggggcccagcaggcgcgggcttccccacgcgccccgggaagggacagctcggtgtggggtccgggaggcttgagccccgcggccgcatccggggagccctcggcagtcgcggagctgcttcccaggggtgagctctccgggaggcccacggggtggccccgggcgcctccgccctcagctgtcgctccttataaggcgggggccgggcggcgccggaggaggggccgcggcatcagcccggtcctgggctctggggcggcgctgggccgggcgagcggagtgcagcgcagccgcggggagcgaggagcgcgcggagccggccatgggcaagtcaggtgagcccgcgggctcgcccgctgcggaatggttcggaaccccgcgctcccggacctcgccgtctccctcgtccgccgcaagccagcttccaaacagtttcataatgaggtcctgaaggcccacaatgagtaccggcagaagcacggcgtccccccactgaagctctgcaagaacctcaaccgggaggctcaacagtattctgaggccctggccagcacgaggatcctcaagcacagcccggagtccagccgtggccagtgtggggagaaccttgcatgggcatcctatgatcagacaggaaaggaggtggctgatagatggtacagtgaaatcaagaactataacttccagcagcctggcttcacctcggggactggacacttcacggccatggtatggaagaacaccaagaagatgggcgtggggaaggcgtccgcaagtgacgggtcctcctttgtggtggccagatacttcccagcggggaatgttgtcaatgagggcttcttcgaagaaaacgtcctgccgccgaagaagtaacttgttaaatgtaatgggaaggtggcagacttaagaacgtggatatgaagtgcctagaaccaccacaacctggctgtgcgtctgtccctgtgggtgtatgtgcttgtgtgtgtgatgcatgtgagcgtctctggcacacacacttggacatacagttctgtgtgcgctcattcttattacaggagtgagcaaaggaagcatttaccccgatggttacctagaccacgattatttggattggggggaggggggatccgttttttttttttaattttttgttatttctaagcaaacctcttttgtacttttcttacttctaatatccatccctggactttttgtattccaaatgtttgtgatgctgagaagtgaagttcattttatgtgatcttcatgcgtcgtaatctacttttggtagataattaagattattaaaccctcatttaaatgtgacataaaatacagctttaagcacataaatacaaagcagcttccatcaggaacatggagcaggcagggactccattttacagaattactgagatttctcagttgtaaaacatgatgtcatcctgcatgcctcctggaattctccaatggggtcgccaaacaacaaatggagaaaaaaagttttacttccttgcattcttctacctttaaatagcaaagtaccactaccaccaccacctcttgcccccttccctcttttcttaaacttctggcatttcagagctcagcaggctacccctggtttctggagagttgggctaggcctgaagctccccctcccccacctctgctaggcagcccaggcctggtctgggagacagcccctcaccctgcctgggctcttggccaagcggccttggatggatgaagtcagagaggtggggtgagggtgagcttactcagggcccccagaggaagccctcagcctctgccctccccccacacagggcgggagcccaggcctgttcctggcagctgtggctgcagctgtgctcctgctccctcctggaatgtgcgacaagcccaaatgttccggggaggcggccggggcagggggcttagaagtgctaatatggttctgtgttttgcctgaaacgataccaggttcccctgaatagcaactttacaaggtccatgtgggagggaccaacccagatgccctgctgagtgtccctgaaaccatggcagctccatctgtcaagatggcaggggccggagtgagggggctgctggcttaacagcaggcatctgggcaggccagtcctcaaagcagctcctgaaggtctgtgttgcactgtcaccagtctcaagctatgcctctaatttcaccagggatattgactaagaagacaataaaatctttttctttgtgtaa

SEQ ID NO: 434303 - DNA, 2457 bp, Homo sapiens
tttgactggagtatggggaaaaggtggggcgttggggagacaggtctggggccagactgcaggggtgggaattggcttggtctgggaggcaatgaggggcgagtggacgggtcagaggcggcggcgcttccaccccgactggcattagagggcgtgtcctaggagaggagcatccccctccccggaccagccgccctccggagcccagagtcaccggagatgggggcacaccccggggctgcgtgtgtcgtgtcaggccgcggcagggagaggccgtcccctggtggcgccggccggaacgcccctcgtgccgcgaccgcgcgcccctctgtcctcgccgcgcgtcggcgcagagcagccacccggggcccagcaggcgcgggcttccccacgcgccccgggaagggacagctcggtgtggggtccgggaggcttgagccccgcggccgcatccggggagccctcggcagtcgcggagctgcttcccaggggtgagctctccgggaggcccacggggtggccccgggcgcctccgccctcagctgtcgctccttataaggcgggggccgggcggcgccggaggaggggccgcggcatcagcccggtcctgggctctggggcggcgctgggccgggcgagcggagtgcagcgcagccgcggggagcgaggagcgcgcggagccggccatgggcaagtcagcttccaaacagtttcataatgaggtcctgaaggcccacaatgagtaccggcagaagcacggcgtccccccactgaagctctgcaagaacctcaaccgggaggctcaacagtattctgaggccctggccagcacgaggatcctcaagcacagcccggagtccagccgtggccagtgtggggagaaccttgcatgggcatcctatgatcagacaggacacttcacggccatggtatggaagaacaccaagaagatgggcgtggggaaggcgtccgcaagtgacgggtcctcctttgtggtggccagatacttcccagcggggaatgttgtcaatgagggcttcttcgaagaaaacgtcctgccgccgaagaagtaacttgttaaatgtaatgggaaggtggcagacttaagaacgtggatatgaagtgcctagaaccaccacaacctggctgtgcgtctgtccctgtgggtgtatgtgcttgtgtgtgtgatgcatgtgagcgtctctggcacacacacttggacatacagttctgtgtgcgctcattcttattacaggagtgagcaaaggaagcatttaccccgatggttacctagaccacgattatttggattggggggaggggggatccgttttttttttttaattttttgttatttctaagcaaacctcttttgtacttttcttacttctaatatccatccctggactttttgtattccaaatgtttgtgatgctgagaagtgaagttcattttatgtgatcttcatgcgtcgtaatctacttttggtagataattaagattattaaaccctcatttaaatgtgacataaaatacagctttaagcacataaatacaaagcagcttccatcaggaacatggagcaggcagggactccattttacagaattactgagatttctcagttgtaaaacatgatgtcatcctgcatgcctcctggaattctccaatggggtcgccaaacaacaaatggagaaaaaaagttttacttccttgcattcttctacctttaaatagcaaagtaccactaccaccaccacctcttgcccccttccctcttttcttaaacttctggcatttcagagctcagcaggctacccctggtttctggagagttgggctaggcctgaagctccccctcccccacctctgctaggcagcccaggcctggtctgggagacagcccctcaccctgcctgggctcttggccaagcggccttggatggatgaagtcagagaggtggggtgagggtgagcttactcagggcccccagaggaagccctcagcctctgccctccccccacacagggcgggagcccaggcctgttcctggcagctgtggctgcagctgtgctcctgctccctcctggaatgtgcgacaagcccaaatgttccggggaggcggccggggcagggggcttagaagtgctaatatggttctgtgttttgcctgaaacgataccaggttcccctgaatagcaactttacaaggtccatgtgggagggaccaacccagatgccctgctgagtgtccctgaaaccatggcagctccatctgtcaagatggcaggggccggagtgagggggctgctggcttaacagcaggcatctgggcaggccagtcctcaaagcagctcctgaaggtctgtgttgcactgtcaccagtctcaagctatgcctctaatttcaccagggatattgactaagaagacaataaaatctttttctttgtgtaa

SEQ ID NO: 434304 - DNA, 2330 bp, Homo sapiens
tttgactggagtatggggaaaaggtggggcgttggggagacaggtctggggccagactgcaggggtgggaattggcttggtctgggaggcaatgaggggcgagtggacgggtcagaggcggcggcgcttccaccccgactggcattagagggcgtgtcctaggagaggagcatccccctccccggaccagccgccctccggagcccagagtcaccggagatgggggcacaccccggggctgcgtgtgtcgtgtcaggccgcggcagggagaggccgtcccctggtggcgccggccggaacgcccctcgtgccgcgaccgcgcgcccctctgtcctcgccgcgcgtcggcgcagagcagccacccggggcccagcaggcgcgggcttccccacgcgccccgggaagggacagctcggtgtggggtccgggaggcttgagccccgcggccgcatccggggagccctcggcagtcgcggagctgcttcccaggggtgagctctccgggaggcccacggggtggccccgggcgcctccgccctcagctgtcgctccttataaggcgggggccgggcggcgccggaggaggggccgcggcatcagcccggtcctgggctctggggcggcgctgggccgggcgagcggagtgcagcgcagccgcggggagcgaggagcgcgcggagccggccatgggcaagtcaggtgagcccgcgggctcgcccgctgcggaatggttcggaaccccgcgctcccggacctcgccgtctccctcgtccgccgcaagccaggacacttcacggccatggtatggaagaacaccaagaagatgggcgtggggaaggcgtccgcaagtgacgggtcctcctttgtggtggccagatacttcccagcggggaatgttgtcaatgagggcttcttcgaagaaaacgtcctgccgccgaagaagtaacttgttaaatgtaatgggaaggtggcagacttaagaacgtggatatgaagtgcctagaaccaccacaacctggctgtgcgtctgtccctgtgggtgtatgtgcttgtgtgtgtgatgcatgtgagcgtctctggcacacacacttggacatacagttctgtgtgcgctcattcttattacaggagtgagcaaaggaagcatttaccccgatggttacctagaccacgattatttggattggggggaggggggatccgttttttttttttaattttttgttatttctaagcaaacctcttttgtacttttcttacttctaatatccatccctggactttttgtattccaaatgtttgtgatgctgagaagtgaagttcattttatgtgatcttcatgcgtcgtaatctacttttggtagataattaagattattaaaccctcatttaaatgtgacataaaatacagctttaagcacataaatacaaagcagcttccatcaggaacatggagcaggcagggactccattttacagaattactgagatttctcagttgtaaaacatgatgtcatcctgcatgcctcctggaattctccaatggggtcgccaaacaacaaatggagaaaaaaagttttacttccttgcattcttctacctttaaatagcaaagtaccactaccaccaccacctcttgcccccttccctcttttcttaaacttctggcatttcagagctcagcaggctacccctggtttctggagagttgggctaggcctgaagctccccctcccccacctctgctaggcagcccaggcctggtctgggagacagcccctcaccctgcctgggctcttggccaagcggccttggatggatgaagtcagagaggtggggtgagggtgagcttactcagggcccccagaggaagccctcagcctctgccctccccccacacagggcgggagcccaggcctgttcctggcagctgtggctgcagctgtgctcctgctccctcctggaatgtgcgacaagcccaaatgttccggggaggcggccggggcagggggcttagaagtgctaatatggttctgtgttttgcctgaaacgataccaggttcccctgaatagcaactttacaaggtccatgtgggagggaccaacccagatgccctgctgagtgtccctgaaaccatggcagctccatctgtcaagatggcaggggccggagtgagggggctgctggcttaacagcaggcatctgggcaggccagtcctcaaagcagctcctgaaggtctgtgttgcactgtcaccagtctcaagctatgcctctaatttcaccagggatattgactaagaagacaataaaatctttttctttgtgtaa

SEQ ID NO: 434305 - DNA, 2481 bp, Homo sapiens
tttgactggagtatggggaaaaggtggggcgttggggagacaggtctggggccagactgcaggggtgggaattggcttggtctgggaggcaatgaggggcgagtggacgggtcagaggcggcggcgcttccaccccgactggcattagagggcgtgtcctaggagaggagcatccccctccccggaccagccgccctccggagcccagagtcaccggagatgggggcacaccccggggctgcgtgtgtcgtgtcaggccgcggcagggagaggccgtcccctggtggcgccggccggaacgcccctcgtgccgcgaccgcgcgcccctctgtcctcgccgcgcgtcggcgcagagcagccacccggggcccagcaggcgcgggcttccccacgcgccccgggaagggacagctcggtgtggggtccgggaggcttgagccccgcggccgcatccggggagccctcggcagtcgcggagctgcttcccaggggtgagctctccgggaggcccacggggtggccccgggcgcctccgccctcagctgtcgctccttataaggcgggggccgggcggcgccggaggaggggccgcggcatcagcccggtcctgggctctggggcggcgctgggccgggcgagcggagtgcagcgcagccgcggggagcgaggagcgcgcggagccggccatgggcaagtcagcttccaaacagtttcataatgaggtcctgaaggcccacaatgagtaccggcagaagcacggcgtccccccactgaagctctgcaagaacctcaaccgggaggctcaacagtattctgaggccctggccagcacgaggatcctcaagcacagcccggagtccagccgtggccagtgtggggagaaccttgcatgggcatcctatgatcagacaggaaaggaggtggctgatagatggtacagtgaaatcaagaactataacttccagcagcctggcttcacctcggggactggacacttcacggccatggtatggaagaacaccaagaagatgggcgtggggaaggcgtccgcaagtgacgggtcctcctttgtggtggccagatacttcccagcggggaatgttgtcaatgagggcttcttcgaagacttaagaacgtggatatgaagtgcctagaaccaccacaacctggctgtgcgtctgtccctgtgggtgtatgtgcttgtgtgtgtgatgcatgtgagcgtctctggcacacacacttggacatacagttctgtgtgcgctcattcttattacaggagtgagcaaaggaagcatttaccccgatggttacctagaccacgattatttggattggggggaggggggatccgttttttttttttaattttttgttatttctaagcaaacctcttttgtacttttcttacttctaatatccatccctggactttttgtattccaaatgtttgtgatgctgagaagtgaagttcattttatgtgatcttcatgcgtcgtaatctacttttggtagataattaagattattaaaccctcatttaaatgtgacataaaatacagctttaagcacataaatacaaagcagcttccatcaggaacatggagcaggcagggactccattttacagaattactgagatttctcagttgtaaaacatgatgtcatcctgcatgcctcctggaattctccaatggggtcgccaaacaacaaatggagaaaaaaagttttacttccttgcattcttctacctttaaatagcaaagtaccactaccaccaccacctcttgcccccttccctcttttcttaaacttctggcatttcagagctcagcaggctacccctggtttctggagagttgggctaggcctgaagctccccctcccccacctctgctaggcagcccaggcctggtctgggagacagcccctcaccctgcctgggctcttggccaagcggccttggatggatgaagtcagagaggtggggtgagggtgagcttactcagggcccccagaggaagccctcagcctctgccctccccccacacagggcgggagcccaggcctgttcctggcagctgtggctgcagctgtgctcctgctccctcctggaatgtgcgacaagcccaaatgttccggggaggcggccggggcagggggcttagaagtgctaatatggttctgtgttttgcctgaaacgataccaggttcccctgaatagcaactttacaaggtccatgtgggagggaccaacccagatgccctgctgagtgtccctgaaaccatggcagctccatctgtcaagatggcaggggccggagtgagggggctgctggcttaacagcaggcatctgggcaggccagtcctcaaagcagctcctgaaggtctgtgttgcactgtcaccagtctcaagctatgcctctaatttcaccagggatattgactaagaagacaataaaatctttttctttgtgtaa

SEQ ID NO: 434306 - DNA, 2586 bp, Homo sapiens
tttgactggagtatggggaaaaggtggggcgttggggagacaggtctggggccagactgcaggggtgggaattggcttggtctgggaggcaatgaggggcgagtggacgggtcagaggcggcggcgcttccaccccgactggcattagagggcgtgtcctaggagaggagcatccccctccccggaccagccgccctccggagcccagagtcaccggagatgggggcacaccccggggctgcgtgtgtcgtgtcaggccgcggcagggagaggccgtcccctggtggcgccggccggaacgcccctcgtgccgcgaccgcgcgcccctctgtcctcgccgcgcgtcggcgcagagcagccacccggggcccagcaggcgcgggcttccccacgcgccccgggaagggacagctcggtgtggggtccgggaggcttgagccccgcggccgcatccggggagccctcggcagtcgcggagctgcttcccaggggtgagctctccgggaggcccacggggtggccccgggcgcctccgccctcagctgtcgctccttataaggcgggggccgggcggcgccggaggaggggccgcggcatcagcccggtcctgggctctggggcggcgctgggccgggcgagcggagtgcagcgcagccgcggggagcgaggagcgcgcggagccggccatgggcaagtcagcttccaaacagtttcataatgaggtcctgaaggcccacaatgagtaccggcagaagcacggcgtccccccactgaagctctgcaagaacctcaaccgggaggctcaacagtattctgaggccctggccagcacgaggatcctcaagcacagcccggagtccagccgtggccagtgtggggagaaccttgcatgggcatcctatgatcagacaggaaaggaggtggctgatagatggtacagtgaaatcaagaactataacttccagcagcctggcttcacctcggggactggacacttcacggccatggtatggaagaacaccaagaagatgggcgtggggaaggcgtccgcaagtgacgggtcctcctttgtggtggccagatacttcccagcggggaatgttgtcaatgagggcttcttcgaagaaaacgtcctgccgccgaagaagtaacttgttaaatgtaatgggaaggtggcagacttaagaacgtggatatgaagtgcctagaaccaccacaacctggctgtgcgtctgtccctgtgggtgtatgtgcttgtgtgtgtgatgcatgtgagcgtctctggcacacacacttggacatacagttctgtgtgcgctcattcttattacaggagtgagcaaaggaagcatttaccccgatggttacctagaccacgattatttggattggggggaggggggatccgttttttttttttaattttttgttatttctaagcaaacctcttttgtacttttcttacttctaatatccatccctggactttttgtattccaaatgtttgtgatgctgagaagtgaagttcattttatgtgatcttcatgcgtcgtaatctacttttggtagataattaagattattaaaccctcatttaaatgtgacataaaatacagctttaagcacataaatacaaagcagcttccatcaggaacatggagcaggcagggactccattttacagaattactgagatttctcagttgtaaaacatgatgtcatcctgcatgcctcctggaattctccaatggggtcgccaaacaacaaatggagaaaaaaagttttacttccttgcattcttctacctttaaatagcaaagtaccactaccaccaccacctcttgcccccttccctcttttcttaaacttctggcatttcagagctcagcaggctacccctggtttctggagagttgggctaggcctgaagctccccctcccccacctctgctaggcagcccaggcctggtctgggagacagcccctcaccctgcctgggctcttggccaagcggccttggatggatgaagtcagagaggtggggtgagggtgagcttactcagggcccccagaggaagccctcagcctctgccctccccccacacagggcgggagcccaggcctgttcctggcagctgtggctgcagctgtgctcctgctccctcctggaatgtgcgacaagcccaaatgttccggggaggcggccggggcagggggcttagaagtgctaatatggttctgtgttttgcctgaaacgataccaggttcccctgaatagcaactttacaaggtccatgtgggagggaccaacccagatgccctgctgagtgtccctgaaaccatggcagctccatctgtcaagatggcaggggccggagtgagggggctgctggcttaacagcaggcatctgggcaggccagtcctcaaagcagctcctgaaggtctgtgttgcactgtcaccagtctcaagctatgcctctaatttcaccagggatattgactaagaagacaataaaatctttttctttgtgtaaaaaaaacacaaaccaaacaaaaaaaggggggggcgcccaaaaggtttcccg

SEQ ID NO: 434307 - DNA, 1954 bp, Homo sapiens
tttgactggagtatggggaaaaggtggggcgttggggagacaggtctggggccagactgcaggggtgggaattggcttggtctgggaggcaatgaggggcgagtggacgggtcagaggcggcggcgcttccaccccgactggcattagagggcgtgtcctaggagaggagcatccccctccccggaccagccgccctccggagcccagagtcaccggagatgggggcacaccccggggctgcgtgtgtcgtgtcaggccgcggcagggagaggccgtcccctggtggcgccggccggaacgcccctcgtgccgcgaccgcgcgcccctctgtcctcgccgcgcgtcggcgcagagcagccacccggggcccagcaggcgcgggcttccccacgcgccccgggaagggacagctcggtgtggggtccgggaggcttgagccccgcggccgcatccggggagccctcggcagtcgcggagctgcttcccaggggtgagctctccgggaggcccacggggtggccccgggcgcctccgccctcagctgtcgctccttataaggcgggggccgggcggcgccggaggaggggccgcggcatcagcccggtcctgggctctggggcggcgctgggccgggcgagcggagtgcagcgcagccgcggggagcgaggagcgcgcggagccggccatgggcaagtcagcttccaaacagtttcataatgaggtcctgaaggcccacaatgagtaccggcagaagcacggcgtccccccactgaagctctgcaagaacctcaaccgggaggctcaacagtattctgaggccctggccagcacgaggatcctcaagcacagcccggagtccagccgtggccagtgtggggagaaccttgcatgggcatcctatgatcagacaggaaaggaggtggctgatagatggtacatgaagttcattttatgtgatcttcatgcgtcgtaatctacttttggtagataattaagattattaaaccctcatttaaatgtgacataaaatacagctttaagcacataaatacaaagcagcttccatcaggaacatggagcaggcagggactccattttacagaattactgagatttctcagttgtaaaacatgatgtcatcctgcatgcctcctggaattctccaatggggtcgccaaacaacaaatggagaaaaaaagttttacttccttgcattcttctacctttaaatagcaaagtaccactaccaccaccacctcttgcccccttccctcttttcttaaacttctggcatttcagagctcagcaggctacccctggtttctggagagttgggctaggcctgaagctccccctcccccacctctgctaggcagcccaggcctggtctgggagacagcccctcaccctgcctgggctcttggccaagcggccttggatggatgaagtcagagaggtggggtgagggtgagcttactcagggcccccagaggaagccctcagcctctgccctccccccacacagggcgggagcccaggcctgttcctggcagctgtggctgcagctgtgctcctgctccctcctggaatgtgcgacaagcccaaatgttccggggaggcggccggggcagggggcttagaagtgctaatatggttctgtgttttgcctgaaacgataccaggttcccctgaatagcaactttacaaggtccatgtgggagggaccaacccagatgccctgctgagtgtccctgaaaccatggcagctccatctgtcaagatggcaggggccggagtgagggggctgctggcttaacagcaggcatctgggcaggccagtcctcaaagcagctcctgaaggtctgtgttgcactgtcaccagtctcaagctatgcctctaatttcaccagggatattgactaagaagacaataaaatctttttctttgtgtaa

SEQ ID NO: 434308 - DNA, 436 bp, Homo sapiens
cggccgcatccggggagccctcggcagtcgcggagctgcttcccaggggtgagctctccgggaggcccacggggtggccccgggcgcctccgccctcagctgtcgctccttataaggcgggggccgggcggcgccggaggaggggccgcggcatcagcccggtcctgggctctggggcggcgctgggccgggcgagcggagtgcagcgcagccgcggggagcgaggagcgcgcggagccggccatgggcaagtcaggtgagcccgcgggctcgcccgctgcggaatggttcggaaccccgcgctcccggacctcgccgtctccctcgtccgccgcaagccaggtcctggggagtgcgggagcccggggtgcgggtggagggcgcgcgggcggagcgccccggcgcggtttccggggaacccggggggaaggcgagc

SEQ ID NO: 434309 - DNA, 621 bp, Homo sapiens
aactcaacactgaacacaaatgtggtgctttgtttatgcagtgaaacattttggagacctgcaaaaggaaggagcagcatttctttctattactactatctatgctgagactggttcaggttttgtagtaccaagtgcttctgccaaagcaggtgtggaagccatgagcaagtctcttgcagctgaatggggtaaatatggaatgcgattcaatgtgattcaaccagggcctataaaaaccaaaggtgcctttagccgtctggacccaactggaacatttgagaaagaaatgattggcagaattccctgtggtcgcctggggactgtagaagaactcgcaaatcttgctgctttcctttgtagtgattatgcttcttggattaatggagcagtcattaaatttgacggtggagaggaagtacttatttcaggggaattcaacgacctgagaaaggtcaccaaggagcagtgggacaccatagaagaactcatcaggaagacaaaaggttcctaagaccactttggccttcatcttggttacagaaaagggaatagaaatgaaacaaattatctctcatcttttgactatttcaagtctaataaattcttaattaacaaaca

SEQ ID NO: 434310 - DNA, 1256 bp, Homo sapiens
acgccgcctgggtcccagtccccgtcccatcccccggcggcctaggcagcgtttccagccccgagaactttgttctttttgtcccgccccctgcgcccaaccgcctgcgccgccttccggcccgagttctggagactcaacatgaagctaccggccagggttttctttactctggggtcccggctgccctgtggcctcgctcctcggaggtttttcagttatgggacaaaaatattatatcaaaacactgaagctttgcaatctaaattcttttcacctcttcaaaaagcgatgctaccacctaatagttttcaaggaaaagtggcattcattactgggggaggtactggccttggtaaaggaatgacaactcttctgtccagcctaggtgctcagtgcgtgatagccagccggaagatggatgttttgaaagctaccgcagaacaaatttcttctcaaactggaaataaggttcatgcaattcagtgtgatgtgagggatcctgatatggttcaaaacactgtgtcagaactgatcaaagttgcaggacatcctaatattgtgataaacaatgcagcagggaattttatttctcctactgaaagactttctcctaatgcttggaaaaccataactgacatagttctaaatggcacagccttcgtgacactagaaattggaaaacaactaattaaagcacagaaaggagcagcatttctttctattactactatctatgctgagactggttcaggttttgtagtaccaagtgcttctgccaaagcaggtgtggaagccatgagcaagtctcttgcagctgaatggggtaaatatggaatgcgattcaatgtgattcaaccagggcctataaaaaccaaaggtgcctttagccgtctggacccaactggaacatttgagaaagaaatgattggcagaattccctgtggtcgcctggggactgtagaagaactcgcaaatcttgctgctttcctttgtagtgattatgcttcttggattaatggagcagtcattaaatttgacggtggagaggaagtacttatttcaggggaattcaacgacctgagaaaggtcaccaaggagcagtgggacaccatagaagaactcatcaggaagacaaaaggttcctaagaccactttggccttcatcttggttacagaaaagggaatagaaatgaaacaaattatctctcatcttttgactatttcaagtctaataaattcttaattaacaaaca

SEQ ID NO: 434311 - DNA, 1154 bp, Homo sapiens
gagactagttctctctctctctcgtgccgaattcgcggaatgaagctaccggccagggttttctttactctggggtcccggctgccctgtggcctcgctcctcggaggtttttcagttatgggacaaaaatattatatcaaaacactgaagctttgcaatctaaattcttttcacctcttcaaaaagcgatgctaccacctaatagttttcaaggaaaagtggcattcattactgggggaggtactggccttggtaaaggaatgacaactcttctgtccagcctaggtgctcagtgcgtgatagccagccggaagatggatgttttgaaagctaccgcagaacaaatttcttctcaaactggaaataaggttcatgcaattcagtgtgatgtgagggatcctgatatggttcaaaacactgtgtcagaactgatcaaagttgcaggacatcctaatattgtgataaacaatgcagcagggaattttatttctcctactgaaagactttctcctaatgcttggaaaaccataactgacatagttctaaatggcacagccttcgtgacactagaaattggaaaacaactaattaaagcacagaaaggagcagcatttctttctattactactatctatgctgagactggttcaggttttgtagtaccaagtgcttctgccaaagcaggtgtggaagccatgagcaagtctcttgcagctgaatggggtaaatatggaatgcgattcaatgtgattcaaccagggcctataaaaaccaaaggtgcctttagccgtctggacccaactggaacatttgagaaagaaatgattggcagaattccctgtggtcgcctggggactgtagaagaactcgcaaatcttgctgctttcctttgtagtgattatgcttcttggattaatggagcagtcattaaatttgacggtggagaggaagtacttatttcaggggaattcaacgacctgagaaaggtcaccaaggagcagtgggacaccatagaagaactcatcaggaagacaaaaggttcctaagaccactttggccttcatcttggttacagaaaagggaatagaaatgaaacaaattatctctcatcttttgactatttcaagtctaataaattcttaattaacaaaca

SEQ ID NO: 434312 - DNA, 709 bp, Homo sapiens
atcattaaccagtctttactactaaacttaaatggccaattgaaacaaacagttctgagaccgttcttccaccactgattaagagtgggtggcaggtattagggataatattcatttagccttctgagctttctgggcagacttggtgaccttgccagctccagcagccttcttgtccactgctttgatgacacccaccgcaactgtctgtctcatatcacgaacagcaaagcgacccaaaggtggatagtctgagaagctctcaacacacatgggcttgccaggaaccatatcaacaatggcagcatcaccagacttcaagaatttagggccatcttccagctttttaccagaacggcgatcaatcttttccttcagctcagcaaacttgcatgcaatgtgagccgtgtggcaatccaatacaggggcatagccggcgcttatttggcctggatggttcaggataatcacctgagcagtgaatgaagctaccggccagggttttctttactctggggtcccggctgccctgtggcctcgctcctcggaggtttttcagttatgggacaaaaatattatatcaaaacactgaagctttgcaatctaaattcttttcacctcttcaaaaagcgatgctaccacctaatagttttttgaagaggtgaaaagaatttagattcttttcacctcttcaaaaagcgatgctacc

SEQ ID NO: 434313 - DNA, 184 bp, Homo sapiens
aagggccggccccaggagcaggagggggtggggaggatccaaagaagcagaggaccaggaagacaaaaggttcctaagaccactttggccttcatcttggttacagaaaagggaatagaaatgaaacaaattatctctcatcttttgactatttcaagtctaataaattcttaattaacaaaca

SEQ ID NO: 434314 - DNA, 1292 bp, Homo sapiens
acgccgcctgggtcccagtccccgtcccatcccccggcggcctaggcagcgtttccagccccgagaactttgttctttttgtcccgccccctgcgcccaaccgcctgcgccgccttccggcccgagttctggagactcaacatgaagctaccggccagggttttctttactctggggtcccggctgccctgtggcctcgctcctcggaggtttttcagttatgggacaaaaatattatatcaaaacactgaagctttgcaatctaaattcttttcacctcttcaaaaagcgatgctaccacctaatagttttcaaggaaaagtggcattcattactgggggaggtactggccttggtaaaggaatgacaactcttctgtccagcctaggtgctcagtgcgtgatagccagccggaagatggatgttttgaaagctaccgcagaacaaatttcttctcaaactggaaataaggttcatgcaattcagtgtgatgtgagggatcctgatatggttcaaaacactgtgtcagaactgatcaaagttgcaggacatcctaatattgtgataaacaatgcagcagggaattttatttctcctactgaaagactttctcctaatgcttggaaaaccataactgacatagttctaaatggcacagccttcgtgacactagaaattggaaaacaactaattaaagcacagaaaggagcagcatttctttctattactactatctatgctgagactggttcaggttttgtagtaccaagtgcttctgccaaagcaggtgtggaagccatgagcaagtctcttgcagctgaatggggtaaatatggaatgcgattcaatgtgattcaaccagggcctataaaaaccaaaggtgcctttagccgtctggacccaactggaacatttgagaaagaaatgattggcagaattccctgtggtcgcctggggactgtagaagaactcgcaaatcttgctgctttcctttgtagtgattatgcttcttggattaatggagcagtcattaaatttgacggtggagaggaagtacttatttcaggggaattcaacgacctgagaaaggtcaccaaggagcagtgggacaccatagaagaactcatcaggaagacaaaaggttcctaagaccactttggccttcatcttggttacagaaaagggaatagaaatgaaacaaattatctctcatcttttgactatttcaagtctaataaattcttaattaacaaacaaaaaaaaaaacaattcccctctatatcaaaaaaaaa

SEQ ID NO: 434315 - DNA, 1881 bp, Homo sapiens
acgccgcctgggtcccagtccccgtcccatcccccggcggcctaggcagcgtttccagccccgagaactttgttctttttgtcccgccccctgcgcccaaccgcctgcgccgccttccggcccgagttctggagactcaacatgaagctaccggccagggttttctttactctggggtcccggctgccctgtggcctcgctcctcggaggtttttcagttatgggacaaaaatattatatcaaaacactgaagctttgcaatctaaattcttttcacctcttcaaaaagcgatgctaccacctaatagttttcaaggaaaagtggcattcattactgggggaggtactggccttggtaaaggaatgacaactcttctgtccagcctaggtgctcagtgcgtgatagccagccggaagatggatgttttgaaagctaccgcagaacaaatttcttctcaaactggaaataaggttcatgcaattcagtgtgatgtgagggatcctgatatggttcaaaacactgtgtcagaactgatcaaagttgcaggacatcctaatattgtgataaacaatgcagcagggaattttatttctcctactgaaagactttctcctaatgcttggaaaaccataactgacatagttctaaatggcacagccttcgtgacactagaaattggaaaacaactaattaaagcacagaaaggagcagcatttctttctattactactatctatgctgagactggttcaggttttgtagtaccaagtgcttctgccaaagcaggtgtggaagccatgagcaagtctcttgcagctgaatggggtaaatatggaatgcgattcaatgtgattcaaccagggcctataaaaaccaaaggtgcctttagccgtctggacccaactggaacatttgagaaagaaatgattggcagaattccctgtggtcgcctggggactgtagaagaactcgcaaatcttgctgctttcctttgtagtgattatgcttcttggattaatggagcagtcattaaatttgacggtggagaggaagtacttatttcaggggaattcaacgacctgagaaaggtcaccaaggagcagtgggacaccatagaagaactcatcaggaagacaaaaggttcctaagaccactttggccttcatcttggttacagaaaagggaatagaaatgaaacaaattatctctcatcttttgactatttcaagtctaataaattcttaattaacaaacaaaaaaaaaaaaaaaaaaaaaaaaaaaaaaaaaaaaaaaaaacaaaaaaaaaaaaaaaacgaacgagaaaaaaagaaagcaggagagaagcacagagagaaagagagagaaacgaaagaaagaggacgaagcaggagaaggaacaagagcagagggggcggggagggggggggggacaggaggacgggccgcgggagcgagaacgaaggaggggagacaggaaagagagagaggagaggagagagagaggagagacgaggagagaagagaggggaggagaggagaggcgaagagaggagagaggacgggagcgagtacgagagagagagacgagggggcagacggaagagggcgaaagcggaccacgacagggagaagaagaggagagggggaggggggaggaaagaagaagagaacgtgaggtgagacagagtagtcgacagaaggagcgggacgagaagacaaaggaggcggggtagtgaaagcagcgcaagaaggaaggagagggaggagtgggaagagaggaaagacgcagaagaggagaaaggaggatcaagggaaggagagaagaaagagaacagggagtaaggagtagacagagaggagaataagaggagggggaaggg

SEQ ID NO: 434316 - DNA, 1202 bp, Homo sapiens
acgccgcctgggtcccagtccccgtcccatcccccggcggcctaggcagcgtttccagccccgagaactttgttctttttgtcccgccccctgcgcccaaccgcctgcgccgccttccggcccgagttctggagactcaacatgaagctaccggccagggttttctttactctggggtcccggctgccctgtggcctcgctcctcggaggtttttcagttatgggacaaaaatattatatcaaaacactgaagctttgcaatctaaattcttttcacctcttcaaaaagcgatgctaccacctaatagttttcaaggaaaagtggcattcattactgggggaggtactggccttggtaaaggaatgacaactcttctgtccagcctaggtgctcagtgcgtgatagccagccggaagatggatgttttgaaagctaccgcagaacaaatttcttctcaaactggaaataaggttcatgcaattcagtgtgatgtgagggatcctgatatggttcaaaacactgtgtcagaactgatcaaagttgcaggacatcctaatattgtgataaacaatgcagcagggaattttatttctcctactgaaagactttctcctaatgcttggaaaaccataactgacatagttctaaatggcacagccttcgtgacactagaaattggaaaacaactaattaaagcacagaaaggagcagcatttctttctattactactatctatgctgagactggttcaggttttgtagtaccaagtgcttctgccaaagcaggtgtggaagccatgagcaagtctcttgcagctgaatggggtaaatatggaatgcgattcaatgtgattcaaccagggcctataaaaaccaaaggtgcctttagccgtctggacccaactggaacatttgagaaagaaatgattggcagaattccctgtggtcgcctggggactgtagaagaactcgcaaatcttgctgctttcctttgtagtgattatgcttcttggattaatggagcagtcattaaatttgacggtggagaggaagtacttatttcaggggaattcaacgacctgagaaaggtcaccaaggagcagtgggacaccatagaagaactcatcaggaagacaaaaggttcctaagaccactttggccttcattatttcaagtctaataaattcttaattaacaaaca

SEQ ID NO: 434317 - DNA, 1569 bp, Homo sapiens
ccacgcgtccggcttcataacattgatcaggagatgctgaagtgcattgagctggatgagcggctgaaagccatggaccaggagatcacagtgaaccctcagtttgtacaaaagagtatgggctcacaagaagatgattcaggaaacaaaccatccagttattcttgaaactaacatccatcctgagctaaacaagagaaactaccatcttggccagtgacaagtgttcggagggcagcagagaggaccaagcctgtgtcacctggagactaagaaattaagttttgttttgacatcttcagtcctgtgtgctttcagaaaaccattttctctgcaaagaaaggaaacagatttgcaaactttaaagtctgtcgtggatttatttatcctcagattattgttactgcattaaatctaccttttttttaaaacaaaaaggtagatttaatgcagcatgaagctaccggccagggttttctttactctggggtcccggctgccctgtggcctcgctcctcggaggtttttcagttatgggacaaaaatattatatcaaaacactgaagctttgcaatctaaattcttttcacctcttcaaaaagcgatgctaccacctaatagttttcaaggaaaagtggcattcattactgggggaggtactggccttggtaaaggaatgacaactcttctgtccagcctaggtgctcagtgcgtgatagccagccggaagatggatgttttgaaagctaccgcagaacaaatttcttctcaaactggaaataaggttcatgcaattcagtgtgatgtgagggatcctgatatggttcaaaacactgtgtcagaactgatcaaagttgcaggacatcctaatattgtgataaacaatgcagcagggaattttatttctcctactgaaagactttctcctaatgcttggaaaaccataactgacatagttctaaatggcacagccttcgtgacactagaaattggaaaacaactaattaaagcacagaaaggagcagcatttctttctattactactatctatgctgagactggttcaggttttgtagtaccaagtgcttctgccaaagcaggtgtggaagccatgagcaagtctcttgcagctgaatggggtaaatatggaatgcgattcaatgtgattcaaccagggcctataaaaaccaaaggtgcctttagccgtctggacccaactggaacatttgagaaagaaatgattggcagaattccctgtggtcgcctggggactgtagaagaactcgcaaatcttgctgctttcctttgtagtgattatgcttcttggattaatggagcagtcattaaatttgacggtggagaggaagtacttatttcaggggaattcaacgacctgagaaaggtcaccaaggagcagtgggacaccatagaagaactcatcaggaagacaaaaggttcctaagaccactttggccttcatcttggttacagaaaagggaatagaaatgaaacaaattatctctcatcttttgactatttcaagtctaataaattcttaattaacaaaca

SEQ ID NO: 434318 - DNA, 1896 bp, Homo sapiens
acgccgcctgggtcccagtccccgtcccatcccccggcggcctaggcagcgtttccagccccgagaactttgttctttttgtcccgccccctgcgcccaaccgcctgcgccgccttccggcccgagttctggagactcaacatgaagctaccggccagggttttctttactctggggtcccggctgccctgtggcctcgctcctcggaggtctgaaaaatgagtaaagatggaagccaaagtatcacttttattgtggtttgtgagaggaagctgggcccatcagctggatctcccgaagtaggcggacttacataactctggaggagggcagaacattgtcctctgaaggcagctggctcccaaaaggaagaagaccaaggagaactgttcatacccaacgatcctgtcaaaatttaccagtcatatcaactgtctctgcacagacagattgtacctcagtctgtgttgctataaaggaatacctgaggctgggtaatttataaagaaaagggtttgtttgactcatgattctgatgcctggacaagttcaagactgggcatctgcatctggtgacggcctaaggctgcttgcacttgtggcagaaggatgaagatggtactacgacattcatgatggatctgccaccataacccaggcacctcccattagaccccacctccaacattggggatcacatttcaacatgagttttcaagggacaaacatccaaacatccttagcaggttgactaaggggacagaaagaagcctggagttgtactacctgaacttctcacagtagggagatgtcaggactggggaagaagcatctcctgctcatgggggagtttttcagttatgggacaaaaatattatatcaaaacactgaagctttgcaatctaaattcttttcacctcttcaaaaagcgatgctaccacctaatagttttcaaggaaaagtggcattcattactgggggaggtactggccttggtaaaggaatgacaactcttctgtccagcctaggtgctcagtgcgtgatagccagccggaagatggatgttttgaaagctaccgcagaacaaatttcttctcaaactggaaataaggttcatgcaattcagtgtgatgtgagggatcctgatatggttcaaaacactgtgtcagaactgatcaaagttgcaggacatcctaatattgtgataaacaatgcagcagggaattttatttctcctactgaaagactttctcctaatgcttggaaaaccataactgacatagttctaaatggcacagccttcgtgacactagaaattggaaaacaactaattaaagcacagaaaggagcagcatttctttctattactactatctatgctgagactggttcaggttttgtagtaccaagtgcttctgccaaagcaggtgtggaagccatgagcaagtctcttgcagctgaatggggtaaatatggaatgcgattcaatgtgattcaaccagggcctataaaaaccaaaggtgcctttagccgtctggacccaactggaacatttgagaaagaaatgattggcagaattccctgtggtcgcctggggactgtagaagaactcgcaaatcttgctgctttcctttgtagtgattatgcttcttggattaatggagcagtcattaaatttgacggtggagaggaagtacttatttcaggggaattcaacgacctgagaaaggtcaccaaggagcagtgggacaccatagaagaactcatcaggaagacaaaaggttcctaagaccactttggccttcatcttggttacagaaaagggaatagaaatgaaacaaattatctctcatcttttgactatttcaagtctaataaattcttaattaacaaaca

SEQ ID NO: 434319 - DNA, 2052 bp, Homo sapiens
acgccgcctgggtcccagtccccgtcccatcccccggcggcctaggcagcgtttccagccccgagaactttgttctttttgtcccgccccctgcgcccaaccgcctgcgccgccttccggcccgagttctggagactcaacatgaagctaccggccagggttttctttactctggggtcccggctgccctgtggcctcgctcctcggagggcaccttactagggatatgaaggtgagaagaagagctgattcctgctgtcaagaagcatagagtccaatggcattatggtatgatgtgccgcatgttaggttgggtgttcttgcttttggatgggatcccaaataaatagcatccgttttttccagtctgaaaaatgagtaaagatggaagccaaagtatcacttttattgtggtttgtgagaggaagctgggcccatcagctggatctcccgaagtaggcggacttacataactctggaggagggcagaacattgtcctctgaaggcagctggctcccaaaaggaagaagaccaaggagaactgttcatacccaacgatcctgtcaaaatttaccagtcatatcaactgtctctgcacagacagattgtacctcagtctgtgttgctataaaggaatacctgaggctgggtaatttataaagaaaagggtttgtttgactcatgattctgatgcctggacaagttcaagactgggcatctgcatctggtgacggcctaaggctgcttgcacttgtggcagaaggatgaagatggtactacgacattcatgatggatctgccaccataacccaggcacctcccattagaccccacctccaacattggggatcacatttcaacatgagttttcaagggacaaacatccaaacatccttagcaggttgactaaggggacagaaagaagcctggagttgtactacctgaacttctcacagtagggagatgtcaggactggggaagaagcatctcctgctcatgggggagtttttcagttatgggacaaaaatattatatcaaaacactgaagctttgcaatctaaattcttttcacctcttcaaaaagcgatgctaccacctaatagttttcaaggaaaagtggcattcattactgggggaggtactggccttggtaaaggaatgacaactcttctgtccagcctaggtgctcagtgcgtgatagccagccggaagatggatgttttgaaagctaccgcagaacaaatttcttctcaaactggaaataaggttcatgcaattcagtgtgatgtgagggatcctgatatggttcaaaacactgtgtcagaactgatcaaagttgcaggacatcctaatattgtgataaacaatgcagcagggaattttatttctcctactgaaagactttctcctaatgcttggaaaaccataactgacatagttctaaatggcacagccttcgtgacactagaaattggaaaacaactaattaaagcacagaaaggagcagcatttctttctattactactatctatgctgagactggttcaggttttgtagtaccaagtgcttctgccaaagcaggtgtggaagccatgagcaagtctcttgcagctgaatggggtaaatatggaatgcgattcaatgtgattcaaccagggcctataaaaaccaaaggtgcctttagccgtctggacccaactggaacatttgagaaagaaatgattggcagaattccctgtggtcgcctggggactgtagaagaactcgcaaatcttgctgctttcctttgtagtgattatgcttcttggattaatggagcagtcattaaatttgacggtggagaggaagtacttatttcaggggaattcaacgacctgagaaaggtcaccaaggagcagtgggacaccatagaagaactcatcaggaagacaaaaggttcctaagaccactttggccttcatcttggttacagaaaagggaatagaaatgaaacaaattatctctcatcttttgactatttcaagtctaataaattcttaattaacaaaca

SEQ ID NO: 434320 - DNA, 1334 bp, Homo sapiens
acgccgcctgggtcccagtccccgtcccatcccccggcggcctaggcagcgtttccagccccgagaactttgttctttttgtcccgccccctgcgcccaaccgcctgcgccgccttccggcccgagttctggagactcaacatgaagctaccggccagggttttctttactctggggtcccggctgccctgtggcctcgctcctcggagggcaccttactagggatatgaaggtgagaagaagagctgattcctgctgtcaagaagcatagagtccaatggcattatgtttttcagttatgggacaaaaatattatatcaaaacactgaagctttgcaatctaaattcttttcacctcttcaaaaagcgatgctaccacctaatagttttcaaggaaaagtggcattcattactgggggaggtactggccttggtaaaggaatgacaactcttctgtccagcctaggtgctcagtgcgtgatagccagccggaagatggatgttttgaaagctaccgcagaacaaatttcttctcaaactggaaataaggttcatgcaattcagtgtgatgtgagggatcctgatatggttcaaaacactgtgtcagaactgatcaaagttgcaggacatcctaatattgtgataaacaatgcagcagggaattttatttctcctactgaaagactttctcctaatgcttggaaaaccataactgacatagttctaaatggcacagccttcgtgacactagaaattggaaaacaactaattaaagcacagaaaggagcagcatttctttctattactactatctatgctgagactggttcaggttttgtagtaccaagtgcttctgccaaagcaggtgtggaagccatgagcaagtctcttgcagctgaatggggtaaatatggaatgcgattcaatgtgattcaaccagggcctataaaaaccaaaggtgcctttagccgtctggacccaactggaacatttgagaaagaaatgattggcagaattccctgtggtcgcctggggactgtagaagaactcgcaaatcttgctgctttcctttgtagtgattatgcttcttggattaatggagcagtcattaaatttgacggtggagaggaagtacttatttcaggggaattcaacgacctgagaaaggtcaccaaggagcagtgggacaccatagaagaactcatcaggaagacaaaaggttcctaagaccactttggccttcatcttggttacagaaaagggaatagaaatgaaacaaattatctctcatcttttgactatttcaagtctaataaattcttaattaacaaaca

SEQ ID NO: 434321 - DNA, 1382 bp, Homo sapiens
acgccgcctgggtcccagtccccgtcccatcccccggcggcctaggcagcgtttccagccccgagaactttgttctttttgtcccgccccctgcgcccaaccgcctgcgccgccttccggcccgagttctggagactcaacatgaagctaccggccagggttttctttactctggggtcccggctgccctgtggcctcgctcctcggagggtgatgaacagcctccttctaaatcattgaccacatttcttattctttcctgaggataaatttcaagatatcctgaaccaactgatgacagcctatttagctacaggaatactctggaaggaaatgtttttcagttatgggacaaaaatattatatcaaaacactgaagctttgcaatctaaattcttttcacctcttcaaaaagcgatgctaccacctaatagttttcaaggaaaagtggcattcattactgggggaggtactggccttggtaaaggaatgacaactcttctgtccagcctaggtgctcagtgcgtgatagccagccggaagatggatgttttgaaagctaccgcagaacaaatttcttctcaaactggaaataaggttcatgcaattcagtgtgatgtgagggatcctgatatggttcaaaacactgtgtcagaactgatcaaagttgcaggacatcctaatattgtgataaacaatgcagcagggaattttatttctcctactgaaagactttctcctaatgcttggaaaaccataactgacatagttctaaatggcacagccttcgtgacactagaaattggaaaacaactaattaaagcacagaaaggagcagcatttctttctattactactatctatgctgagactggttcaggttttgtagtaccaagtgcttctgccaaagcaggtgtggaagccatgagcaagtctcttgcagctgaatggggtaaatatggaatgcgattcaatgtgattcaaccagggcctataaaaaccaaaggtgcctttagccgtctggacccaactggaacatttgagaaagaaatgattggcagaattccctgtggtcgcctggggactgtagaagaactcgcaaatcttgctgctttcctttgtagtgattatgcttcttggattaatggagcagtcattaaatttgacggtggagaggaagtacttatttcaggggaattcaacgacctgagaaaggtcaccaaggagcagtgggacaccatagaagaactcatcaggaagacaaaaggttcctaagaccactttggccttcatcttggttacagaaaagggaatagaaatgaaacaaattatctctcatcttttgactatttcaagtctaataaattcttaattaacaaaca

SEQ ID NO: 434322 - DNA, 1177 bp, Homo sapiens
acgccgcctgggtcccagtccccgtcccatcccccggcggcctaggcagcgtttccagccccgagaactttgttctttttgtcccgccccctgcgcccaaccgcctgcgccgccttccggcccgagttctggagactcaacatgaagctaccggccagggttttctttactctggggtcccggctgccctgtggcctcgctcctcggaggcgatgctaccacctaatagttttcaaggaaaagtggcattcattactgggggaggtactggccttggtaaaggaatgacaactcttctgtccagcctaggtgctcagtgcgtgatagccagccggaagatggatgttttgaaagctaccgcagaacaaatttcttctcaaactggaaataaggttcatgcaattcagtgtgatgtgagggatcctgatatggttcaaaacactgtgtcagaactgatcaaagttgcaggacatcctaatattgtgataaacaatgcagcagggaattttatttctcctactgaaagactttctcctaatgcttggaaaaccataactgacatagttctaaatggcacagccttcgtgacactagaaattggaaaacaactaattaaagcacagaaaggagcagcatttctttctattactactatctatgctgagactggttcaggttttgtagtaccaagtgcttctgccaaagcaggtgtggaagccatgagcaagtctcttgcagctgaatggggtaaatatggaatgcgattcaatgtgattcaaccagggcctataaaaaccaaaggtgcctttagccgtctggacccaactggaacatttgagaaagaaatgattggcagaattccctgtggtcgcctggggactgtagaagaactcgcaaatcttgctgctttcctttgtagtgattatgcttcttggattaatggagcagtcattaaatttgacggtggagaggaagtacttatttcaggggaattcaacgacctgagaaaggtcaccaaggagcagtgggacaccatagaagaactcatcaggaagacaaaaggttcctaagaccactttggccttcatcttggttacagaaaagggaatagaaatgaaacaaattatctctcatcttttgactatttcaagtctaataaattcttaattaacaaaca

SEQ ID NO: 434323 - DNA, 1053 bp, Homo sapiens
acgccgcctgggtcccagtccccgtcccatcccccggcggcctaggcagcgtttccagccccgagaactttgttctttttgtcccgccccctgcgcccaaccgcctgcgccgccttccggcccgagttctggagactcaacatgaagctaccggccagggttttctttactctggggtcccggctgccctgtggcctcgctcctcggagggaagatggatgttttgaaagctaccgcagaacaaatttcttctcaaactggaaataaggttcatgcaattcagtgtgatgtgagggatcctgatatggttcaaaacactgtgtcagaactgatcaaagttgcaggacatcctaatattgtgataaacaatgcagcagggaattttatttctcctactgaaagactttctcctaatgcttggaaaaccataactgacatagttctaaatggcacagccttcgtgacactagaaattggaaaacaactaattaaagcacagaaaggagcagcatttctttctattactactatctatgctgagactggttcaggttttgtagtaccaagtgcttctgccaaagcaggtgtggaagccatgagcaagtctcttgcagctgaatggggtaaatatggaatgcgattcaatgtgattcaaccagggcctataaaaaccaaaggtgcctttagccgtctggacccaactggaacatttgagaaagaaatgattggcagaattccctgtggtcgcctggggactgtagaagaactcgcaaatcttgctgctttcctttgtagtgattatgcttcttggattaatggagcagtcattaaatttgacggtggagaggaagtacttatttcaggggaattcaacgacctgagaaaggtcaccaaggagcagtgggacaccatagaagaactcatcaggaagacaaaaggttcctaagaccactttggccttcatcttggttacagaaaagggaatagaaatgaaacaaattatctctcatcttttgactatttcaagtctaataaattcttaattaacaaaca

SEQ ID NO: 434324 - DNA, 1078 bp, Homo sapiens
acgccgcctgggtcccagtccccgtcccatcccccggcggcctaggcagcgtttccagccccgagaactttgttctttttgtcccgccccctgcgcccaaccgcctgcgccgccttccggcccgagttctggagactcaacatgaagctaccggccagggttttctttactctggggtcccggctgccctgtggcctcgctcctcggagggtgctcagtgcgtgatagccagccggaagatggatgttttgaaagctaccgcagaacaaatttcttctcaaactggaaataaggttcatgcaattcagtgtgatgtgagggatcctgatatggttcaaaacactgtgtcagaactgatcaaagttgcaggacatcctaatattgtgataaacaatgcagcagggaattttatttctcctactgaaagactttctcctaatgcttggaaaaccataactgacatagttctaaatggcacagccttcgtgacactagaaattggaaaacaactaattaaagcacagaaaggagcagcatttctttctattactactatctatgctgagactggttcaggttttgtagtaccaagtgcttctgccaaagcaggtgtggaagccatgagcaagtctcttgcagctgaatggggtaaatatggaatgcgattcaatgtgattcaaccagggcctataaaaaccaaaggtgcctttagccgtctggacccaactggaacatttgagaaagaaatgattggcagaattccctgtggtcgcctggggactgtagaagaactcgcaaatcttgctgctttcctttgtagtgattatgcttcttggattaatggagcagtcattaaatttgacggtggagaggaagtacttatttcaggggaattcaacgacctgagaaaggtcaccaaggagcagtgggacaccatagaagaactcatcaggaagacaaaaggttcctaagaccactttggccttcatcttggttacagaaaagggaatagaaatgaaacaaattatctctcatcttttgactatttcaagtctaataaattcttaattaacaaaca

SEQ ID NO: 434325 - DNA, 1989 bp, Homo sapiens
acgccgcctgggtcccagtccccgtcccatcccccggcggcctaggcagcgtttccagccccgagaactttgttctttttgtcccgccccctgcgcccaaccgcctgcgccgccttccggcccgagttctggagactcaacatgaagctaccggccagggttttctttactctggggtcccggctgccctgtggcctcgctcctcggaggtctgaaaaatgagtaaagatggaagccaaagtatcacttttattgtggtttgtgagaggaagctgggcccatcagctggatctcccgaagtaggcggacttacataactctggaggagggcagaacattgtcctctgaaggcagctggctcccaaaaggaagaagaccaaggagaactgttcatacccaacgatcctgtcaaaatttaccagtcatatcaactgtctctgcacagacagattgtacctcagtctgtgttgctataaaggaatacctgaggctgggtaatttataaagaaaagggtttgtttgactcatgattctgatgcctggacaagttcaagactgggcatctgcatctggtgacggcctaaggctgcttgcacttgtggcagaaggatgaagatggtactacgacattcatgatggatctgccaccataacccaggcacctcccattagaccccacctccaacattggggatcacatttcaacatgagttttcaagggacaaacatccaaacatccttagcaggttgactaaggggacagaaagaagcctggagttgtactacctgaacttctcacagtagggagatgtcaggactggggaagaagcatctcctgctcatgggggagtttttcagttatgggacaaaaatattatatcaaaacactgaagctttgcaatctaaattcttttcacctcttcaaaaagcgatgctaccacctaatagttttcaaggaaaagtggcattcattactgggggaggtactggccttggtaaaggaatgacaactcttctgtccagcctaggtgctcagtgcgtgatagccagccgaaatgcttttctttaagctatggattctctgtattcttcaatttatgaaattgaaaaatataatatgaagtcatacaaggtgtttatttctaggaagatggatgttttgaaagctaccgcagaacaaatttcttctcaaactggaaataaggttcatgcaattcagtgtgatgtgagggatcctgatatggttcaaaacactgtgtcagaactgatcaaagttgcaggacatcctaatattgtgataaacaatgcagcagggaattttatttctcctactgaaagactttctcctaatgcttggaaaaccataactgacatagttctaaatggcacagccttcgtgacactagaaattggaaaacaactaattaaagcacagaaaggagcagcatttctttctattactactatctatgctgagactggttcaggttttgtagtaccaagtgcttctgccaaagcaggtgtggaagccatgagcaagtctcttgcagctgaatggggtaaatatggaatgcgattcaatgtgattcaaccagggcctataaaaaccaaaggtgcctttagccgtctggacccaactggaacatttgagaaagaaatgattggcagaattccctgtggtcgcctggggactgtagaagaactcgcaaatcttgctgctttcctttgtagtgattatgcttcttggattaatggagcagtcattaaatttgacggtggagaggaagtacttatttcaggggaattcaacgacctgagaaaggtcaccaaggagcagtgggacaccatagaagaactcatcaggaagacaaaaggttcctaagaccactttggccttcatcttggttacagaaaagggaatagaaatgaaacaaattatctctcatcttttgactatttcaagtctaataaattcttaattaacaaaca

SEQ ID NO: 434326 - DNA, 1188 bp, Homo sapiens
taaatgtagtctctttgaacccataaatttagtacaaaacctactaacattataccatgaatatattttctttgtaaacctggcttatcaaggaaataatttaaatctgtgagtagataatgttaaagtaaactggtttaaaagtgactaattcaataagttagtatcaaatatataaaaatgatctaaatttgacttttagaaaaaattcacattgatttttgtatataaataacatctatactttctcagaaatgcttttctttaagctatggattctctgtattcttcaatttatgaaattgaaaaatataatatgaagtcatacaaggtgtttatttctaggaagatggatgttttgaaagctaccgcagaacaaatttcttctcaaactggaaataaggttcatgcaattcagtgtgatgtgagggatcctgatatggttcaaaacactgtgtcagaactgatcaaagttgcaggacatcctaatattgtgataaacaatgcagcagggaattttatttctcctactgaaagactttctcctaatgcttggaaaaccataactgacatagttctaaatggcacagccttcgtgacactagaaattggaaaacaactaattaaagcacagaaaggagcagcatttctttctattactactatctatgctgagactggttcaggttttgtagtaccaagtgcttctgccaaagcaggtgtggaagccatgagcaagtctcttgcagctgaatggggtaaatatggaatgcgattcaatgtgattcaaccagggcctataaaaaccaaaggtgcctttagccgtctggacccaactggaacatttgagaaagaaatgattggcagaattccctgtggtcgcctggggactgtagaagaactcgcaaatcttgctgctttcctttgtagtgattatgcttcttggattaatggagcagtcattaaatttgacggtggagaggaagtacttatttcaggggaattcaacgacctgagaaaggtcaccaaggagcagtgggacaccatagaagaactcatcaggaagacaaaaggttcctaagaccactttggccttcatcttggttacagaaaagggaatagaaatgaaacaaattatctctcatcttttgactatttcaagtctaataaattcttaattaacaaaca

SEQ ID NO: 434327 - DNA, 1270 bp, Homo sapiens
acgccgcctgggtcccagtccccgtcccatcccccggcggcctaggcagcgtttccagccccgagaactttgttctttttgtcccgccccctgcgcccaaccgcctgcgccgccttccggcccgagttctggagactcaacatgaagctaccggccagggttttctttactctggggtcccggctgccctgtggcctcgctcctcggaggcgatgctaccacctaatagttttcaaggaaaagtggcattcattactgggggaggtactggccttggtaaaggaatgacaactcttctgtccagcctaggtgctcagtgcgtgatagccagccgaaatgcttttctttaagctatggattctctgtattcttcaatttatgaaattgaaaaatataatatgaagtcatacaaggtgtttatttctaggaagatggatgttttgaaagctaccgcagaacaaatttcttctcaaactggaaataaggttcatgcaattcagtgtgatgtgagggatcctgatatggttcaaaacactgtgtcagaactgatcaaagttgcaggacatcctaatattgtgataaacaatgcagcagggaattttatttctcctactgaaagactttctcctaatgcttggaaaaccataactgacatagttctaaatggcacagccttcgtgacactagaaattggaaaacaactaattaaagcacagaaaggagcagcatttctttctattactactatctatgctgagactggttcaggttttgtagtaccaagtgcttctgccaaagcaggtgtggaagccatgagcaagtctcttgcagctgaatggggtaaatatggaatgcgattcaatgtgattcaaccagggcctataaaaaccaaaggtgcctttagccgtctggacccaactggaacatttgagaaagaaatgattggcagaattccctgtggtcgcctggggactgtagaagaactcgcaaatcttgctgctttcctttgtagtgattatgcttcttggattaatggagcagtcattaaatttgacggtggagaggaagtacttatttcaggggaattcaacgacctgagaaaggtcaccaaggagcagtgggacaccatagaagaactcatcaggaagacaaaaggttcctaagaccactttggccttcatcttggttacagaaaagggaatagaaatgaaacaaattatctctcatcttttgactatttcaagtctaataaattcttaattaacaaaca

SEQ ID NO: 434328 - DNA, 1205 bp, Homo sapiens
acgccgcctgggtcccagtccccgtcccatcccccggcggcctaggcagcgtttccagccccgagaactttgttctttttgtcccgccccctgcgcccaaccgcctgcgccgccttccggcccgagttctggagactcaacatgaagctaccggccagggttttctttactctggggtcccggctgccctgtggcctcgctcctcggaggtttttcagttatgggacaaaaatattatatcaaaacactgaagctttgcaatctaaattcttttcacctcttcaaaaagcgatgctaccacctaatagttttcaaggaaaagtggcattcattactgggggaggtactggccttggtaaaggaatgacaactcttctgtccagcctaggtgctcagtgcgtgatagccagccggaagatggatgttttgaaagctaccgcagaacaaatttcttctcaaactggaaataaggttcatgcaattcagtgtgatgtgagggatcctgatatggttcaaaacactgtgtcagaactgatcaaagttgcaggacatcctaatattgtgataaacaatgcagcagggaattttatttctcctactgaaagactttctcctaatgcttggaaaaccataactgacatagttctaaatggcacagccttcgtgacactagaaattggtatctatgctgagactggttcaggttttgtagtaccaagtgcttctgccaaagcaggtgtggaagccatgagcaagtctcttgcagctgaatggggtaaatatggaatgcgattcaatgtgattcaaccagggcctataaaaaccaaaggtgcctttagccgtctggacccaactggaacatttgagaaagaaatgattggcagaattccctgtggtcgcctggggactgtagaagaactcgcaaatcttgctgctttcctttgtagtgattatgcttcttggattaatggagcagtcattaaatttgacggtggagaggaagtacttatttcaggggaattcaacgacctgagaaaggtcaccaaggagcagtgggacaccatagaagaactcatcaggaagacaaaaggttcctaagaccactttggccttcatcttggttacagaaaagggaatagaaatgaaacaaattatctctcatcttttgactatttcaagtctaataaattcttaattaacaaaca

SEQ ID NO: 434329 - DNA, 946 bp, Homo sapiens
  misc_feature (875)..(875): n is a, c, g, or t
  misc_feature (929)..(929): n is a, c, g, or t
  misc_feature (934)..(934): n is a, c, g, or t
acgccgcctgggtcccagtccccgtcccatcccccggcggcctaggcagcgtttccagccccgagaactttgttctttttgtcccgccccctgcgcccaaccgcctgcgccgccttccggcccgagttctggagactcaacatgaagctaccggccagggttttctttactctggggtcccggctgccctgtggcctcgctcctcggaggtttttcagttatgggacaaaaatattatatcaaaacactgaagctttgcaatctaaattcttttcacctcttcaaaaagcgatgctaccacctaatagttttcaaggaaaagtggcattcattactgggggaggtactggccttggtaaaggaatgacaactcttctgtccagcctaggtgctcagtgcgtgatagccagccggaagatggatgttttgaaagctaccgcagaacaaatttcttctcaaactggaaataaggttcatgcaattcagtgtgatgtgagggatcctgatatggttcaaaacactgtgtcagaactgatcaaagttgcaggacatcctaatattgtgataaacaatgcagcagggaattttatttctcctactgaaagactttctcctaatgcttggaaaaccataactgacatagttctaaatggcacagccttcgtgacactagaaattggaaaacaactaattaaagcacagaaaggagcagcatttctttctattactactatctatgctgagactggttcaggttttgtagtaccaagtgcttctgccaaagcaggtgtggaagccatgagcaactcttgcagctgaatgggggtaaatatgggattgcggattccaattgtggattccaaccaggggccttnttaaaaacccaaaggtgccttttagcccgtcttgggaccccaactggggaaccnttttngaggaaaaggaa

SEQ ID NO: 434330 - DNA, 1469 bp, Homo sapiens
ccacgcgtccggcttcataacattgatcaggagatgctgaagtgcattgagctggatgagcggctgaaagccatggaccaggagatcacagtgaaccctcagtttgtacaaaagagtatgggctcacaagaagatgattcaggaaacaaaccatccagttattcttgaaactaacatccatcctgagctaaacaagagaaactaccatcttggccagtgacaagtgttcggagggcagcagagaggaccaagcctgtgtcacctggagactaagaaattaagttttgttttgacatcttcagtcctgtgtgctttcagaaaaccattttctctgcaaagaaaggaaacagatttgcaaactttaaagtctgtcgtggatttatttatcctcagattattgttactgcattaaatctaccttttttttaaaacaaaaaggtagatttaatgcagcatgaagctaccggccagggttttctttactctggggtcccggctgccctgtggcctcgctcctcggaggtttttcagttatgggacaaaaatattatatcaaaacactgaagctttgcaatctaaattcttttcacctcttcaaaaagcgatgctaccacctaatagttttcaaggaaaagtggcattcattactgggggaggtactggccttggtaaaggaatgacaactcttctgtccagcctaggtgctcagtgcgtgatagccagccggaagatggatgttttgaaagctaccgcagaacaaatttcttctcaaactggaaataaggttcatgcaattcagtgtgatgtgagggatcctgatatggttcaaaacactgtgtcagaactgatcaaagttgcaggacatcctaatattgtgataaacaatgcagcagggaattttatttctcctactgaaagactttctcctaatgcttggaaaaccataactgacatagttctaaatggcacagccttcgtgacactagaaattggaaaacaactaattaaagcacagaaaggtctcttgcagctgaatggggtaaatatggaatgcgattcaatgtgattcaaccagggcctataaaaaccaaaggtgcctttagccgtctggacccaactggaacatttgagaaagaaatgattggcagaattccctgtggtcgcctggggactgtagaagaactcgcaaatcttgctgctttcctttgtagtgattatgcttcttggattaatggagcagtcattaaatttgacggtggagaggaagtacttatttcaggggaattcaacgacctgagaaaggtcaccaaggagcagtgggacaccatagaagaactcatcaggaagacaaaaggttcctaagaccactttggccttcatcttggttacagaaaagggaatagaaatgaaacaaattatctctcatcttttgactatttcaagtctaataaattcttaattaacaaaca

SEQ ID NO: 434331 - DNA, 708 bp, Homo sapiens
gtacagtagagtgactaagggtacagactgaagctagacctcttgagattgacaaattggccatatgacatagagaaaatgatttaacctctctgtgccttagttacattatctgtaatatagggaacaataatagtacctacctgttggggttgtaatctctggcatgtagtaagcatctagtgagtctcagttattactgtctttaacatatggtataatatttcagaatgtatgttgttgattttaatttttagggtctcttgcagctgaatggggtaaatatggaatgcgattcaatgtgattcaaccagggcctataaaaaccaaaggtgcctttagccgtctggacccaactggaacatttgagaaagaaatgattggcagaattccctgtggtcgcctggggactgtagaagaactcgcaaatcttgctgctttcctttgtagtgattatgcttcttggattaatggagcagtcattaaatttgacggtggagaggaagtacttatttcaggggaattcaacgacctgagaaaggtcaccaaggagcagtgggacaccatagaagaactcatcaggaagacaaaaggttcctaagaccactttggccttcatcttggttacagaaaagggaatagaaatgaaacaaattatctctcatcttttgactatttcaagtctaataaattcttaattaacaaaca

SEQ ID NO: 434332 - DNA, 1466 bp, Homo sapiens
ccacgcgtccggcttcataacattgatcaggagatgctgaagtgcattgagctggatgagcggctgaaagccatggaccaggagatcacagtgaaccctcagtttgtacaaaagagtatgggctcacaagaagatgattcaggaaacaaaccatccagttattcttgaaactaacatccatcctgagctaaacaagagaaactaccatcttggccagtgacaagtgttcggagggcagcagagaggaccaagcctgtgtcacctggagactaagaaattaagttttgttttgacatcttcagtcctgtgtgctttcagaaaaccattttctctgcaaagaaaggaaacagatttgcaaactttaaagtctgtcgtggatttatttatcctcagattattgttactgcattaaatctaccttttttttaaaacaaaaaggtagatttaatgcagcatgaagctaccggccagggttttctttactctggggtcccggctgccctgtggcctcgctcctcggaggtttttcagttatgggacaaaaatattatatcaaaacactgaagctttgcaatctaaattcttttcacctcttcaaaaagcgatgctaccacctaatagttttcaaggaaaagtggcattcattactgggggaggtactggccttggtaaaggaatgacaactcttctgtccagcctaggtgctcagtgcgtgatagccagccggaagatggatgttttgaaagctaccgcagaacaaatttcttctcaaactggaaataaggttcatgcaattcagtgtgatgtgagggatcctgatatggttcaaaacactgtgtcagaactgatcaaagttgcaggacatcctaatattgtgataaacaatgcagcagggaattttatttctcctactgaaagactttctcctaatgcttggaaaaccataactgacatagttctaaatggcacagccttcgtgacactagaaattggaaaacaactaattaaagcacagaaaggtctcttgcagctgaatggggtaaatatggaatgcgattcaatgtgattcaaccagggcctataaaaaccaaagagtgtgtttggggcagggaggtctgttgtggaaccaatcctgacaatgctgaatgtcattaaatttgacggtggagaggaagtacttatttcaggggaattcaacgacctgagaaaggtcaccaaggagcagtgggacaccatagaagaactcatcaggaagacaaaaggttcctaagaccactttggccttcatcttggttacagaaaagggaatagaaatgaaacaaattatctctcatcttttgactatttcaagtctaataaattcttaattaacaaacaattcattgaatatgtattatgtgccaggccagtgatagccattgtatattcaaagataaataaaatgaaatatagtccttcaaaacatt

SEQ ID NO: 434333 - DNA, 1624 bp, Homo sapiens
acgccgcctgggtcccagtccccgtcccatcccccggcggcctaggcagcgtttccagccccgagaactttgttctttttgtcccgccccctgcgcccaaccgcctgcgccgccttccggcccgagttctggagactcaacatgaagctaccggccagggttttctttactctggggtcccggctgccctgtggcctcgctcctcggaggtctgaaaaatgagtaaagatggaagccaaagtatcacttttattgtggtttgtgagaggaagctgggcccatcagctggatctcccgaagtaggcggacttacataactctggaggagggcagaacattgtcctctgaaggcagctggctcccaaaaggaagaagaccaaggagaactgttcatacccaacgatcctgtcaaaatttaccagtcatatcaactgtctctgcacagacagattgtacctcagtctgtgttgctataaaggaatacctgaggctgggtaatttataaagaaaagggtttgtttgactcatgattctgatgcctggacaagttcaagactgggcatctgcatctggtgacggcctaaggctgcttgcacttgtggcagaaggatgaagatggtactacgacattcatgatggatctgccaccataacccaggcacctcccattagaccccacctccaacattggggatcacatttcaacatgagttttcaagggacaaacatccaaacatccttagcaggttgactaaggggacagaaagaagcctggagttgtactacctgaacttctcacagtagggagatgtcaggactggggaagaagcatctcctgctcatgggggagtttttcagttatgggacaaaaatattatatcaaaacactgaagctttgcaatctaaattcttttcacctcttcaaaaagcgatgctaccacctaatagttttcaaggaaaagtggcattcattactgggggaggtactggccttggtaaaggaatgacaactcttctgtccagcctaggtgctcagtgcgtgatagccagccggtaagtcccttacatcaagcctattggcgacgcttttgaagaaactgttctgtgccatagtattgaaaacactgttcgccagagttgtttgattagcatcttaatcttatatgaaatactagaaatattatttagattatttaaatacatctttttggaaaaagttaggtactatttgagatgaaagaaacaatgaaaattgtggaactgatgtttgggtaaacatccgcaattttcattattttaatttctccaattcagtggtagaatatttctttttctgtacacgaagatgaagttaaaaagtacgacatggagccaggtgggatggtgtgtgcctgtaatcccagctactgggaagctgaggcaggaagatcacttgaagcccagaatttgagaccagctgggcaacatagtgagaccttgtctcaaaagaaacattttttttttaagcactatatggaggttgctttgtcttcagtgggagtgattatggttactgctttaattaataattaaccttataccaggaaaattgatgcagtactttcattttattttttattttttg

SEQ ID NO: 434334 - DNA, 489 bp, Homo sapiens
tcctgaaccaactgatgacagcctatttagctacaggaatactctggaaggaaatggtagcttctggagttttaactggagtgttaatcttgccaccatgacctaatggaatatcacataacctccctggtgtgaccattaagcttagcaggatctcagagaatagacagaggaatatgcaagctggttatcagagaaggctctggagcctgtcagtcagtttgaaccttggttctgcaactttggcaatatatatattttttatcactctgagccctttctgtacaataggataaaactaatacctatttcatgtggttgtttggaagattaaatagtttgatatgtaatcctggcaggtggtaactacttaatgaatgttagctcctattgttcattatattagatacctaaagtttgttttatgattaaatgcgagagaatggcagtgatgttcgcatgtaatgtgagtacaagctgttaacatat

SEQ ID NO: 434335 - DNA, 692 bp, Homo sapiens
gacagcaggggggagttgcccccaggttcctgaccagtcctcctacggcttatagcacgtcgacatccagaacttctcctccagctggagtgatgggatggccttctgtgccctggtgcacaacttcttccctgaggccttcgactatgggcagcttagccctcagaaccgacgccagaacttcgaggtggccttctcatctgcggagacccatgcggactgcccgcagctcctggatacagaggacatggtgcggcttcgagagcctgactggaagtgcgtgtacacgtacatccaggaattctaccgctgtctggtccagaaggggctggtaaaaaccaaaaagtcctaacccctgctcggggccccacggatgctggtggactgtgtgcccctggtggaggtggacgacatgatgatcatgggcaagaagcctgaccccaagtgtgtcttcacctatgtgcagtcgctctacaaccacctgcgacgccacgaactgcgcctgcgcggcaagaatgtctagcctgcccgcccgcatggccagccagtggcaagctgccgcccccactctccgggcaccgtctcctgcctgtgcgtccgcccaccgctgccctgtctgttgcgacaccctcccccccacatacacacgcagcgttttgataaattattggttttcaacgaaaaatgaaaaa

SEQ ID NO: 434336 - DNA, 1584 bp, Homo sapiens
cccacaactggttagggatacagtctggactaaaacagaggtgttcggtgttctgcctcccaggtttcttctctgaaggagtccaggtgagctgggggtaggcccagccctaccacagttctgagtttgtccataagggcacgagatgggaggtggtcttgggttctcaggtgtcttgagaataaggagcaattgttgccattatgccttccctgccataggaaactcattcagcaacattgaatgcttgctatgtcccaggtatggcagataggagggatcaaggcagaagaggtcttgctctgggggttgagggacaggggaaaaggagccagagagcagactccagcttcagagctctgggagctgtcagttgcttaataggcacaacccactcactccagagtggggaaaaggctttgccaacacccagaactgggggcctgggtcccatgcggcctagcctgcacttactaagccgtggggcttgaaacaaatggctcctctgctctgtgactcagtttccttatctgtgaagggcagctagcattctgaaggatggccagaagggtggtccccccgagcatggcatagatggtccattggtattggctgggatcctcatctgcctcctctgctctacccaaggcaggtgataagggttagagaacccctctgctgcccacacgttccctggcctccatctccagcagcagggttatccccaccccctgtcaaagaataggggtccctgggcctctcaacaggaagtaccagatcaggcagctagcagacaatcatcggtggaccacagggccactagagtgagacctatccatagataaagattggccagtgatgaagcccatctgggtgcaaaggccgagctgagaggcttctaccaactggagtgtgccagtgagggtgagcagaaggtggtctccagggagaacatgggcagggtttggagccagcacctccccagggttggaggaagcagacccaggacctgcctgactgggatggggctctcttctgccatctccgcctccacctgcctagctctgctcccccgccccgagagatgcctccaggcttgggtagatgaagccaggggcttcctgccttcctggaaggcttttccctgtctggagtttatgaaagaccagcaggcaatgcggcaataaaaaagaccttggggtagaggggcgccacgagaggcgggtctggcgctgacatccaaccccgtgccccctccctgcaggatgctggtggactgtgtgcccctggtggaggtggacgacatgatgatcatgggcaagaagcctgaccccaagtgtgtcttcacctatgtgcagtcgctctacaaccacctgcgacgccacgaactgcgcctgcgcggcaagaatgtctagcctgcccgcccgcatggccagccagtggcaagctgccgcccccactctccgggcaccgtctcctgcctgtgcgtccgcccaccgctgccctgtctgttgcgacaccctcccccccacatacacacgcagcgttttgataaattattggttttcaacgaaaaatgaaaaa

SEQ ID NO: 434337 - DNA, 3390 bp, Homo sapiens
tctggtatgccagaagacttagaagttattttgtttgcttgttttgtttgggtatttggggatttttaaaaaataatcaaagtggagaatccaggggacggttgctgagcgggcctgggacagcgggtcgcggcacctccggcctgcgcgtgtctaatccgtctgtcgggtcccgaaagagctaagccgagcctgcgccggacgggtgggctggactgagagaattctctgagctggtgacaggtgccacaggcactggggatctcaccagaaaggaaccgacggagctaggggccagcgagatggcggacgaggccttagctgggctggatgagggagcccttcggaagctgctggaggtcacagcagatctggcagagcggcggcgcatccgctcagccatccgggaactgcagcggcaggagctggagcgcgaggaggaggccctggcatccaagcgtttccgtgccgagcggcaggacaacaaggagaactggctgcactctcagcagcgggaagctgagcagcgggctgccctggcacggctggcagggcagctggagtccatgaacgatgtggaggaattgactgcactgttgcgaagcgctggtgagtatgaggagcgcaagctgatccgagctgccatccgccgtgtacgggctcaggagattgaggctgccaccttggctgggaggttgtacagcgggcgtcccaacagtggctcaagagaggacagcaaggggctagcggcacacaggctggaacagtgtgaggtgccagagcgagaggaacaggaacagcaggcagaggtttcaaagccaacccccacccctgaaggcaccagccaggatgtgaccacagtgacactcctgctgcgagccccacctgggagcacatccagctcacctgcctcacccagcagttcacccacccctgcctctcctgagcctccattggagcctgccgaggcccagtgccttacagctgaggttccaggcagcccagagccaccccccagcccacccaagaccaccagccctgagcctcaggagtctccaacgctccccagcactgagggccaggtggtcaacaagcttctgtctggccccaaagagacccctgctgcccagagccccaccagaggcccctctgacaccaagagagcagacgtggctggaccccgaccctgccaacgctccctgtcggtgctcagcccccgccaaccagcccagaaccgagagtccaccccccttgccagcggaccttcctcattccagcgggctggctctgtgcgggatcgtgtccacaagttcacatctgattctcctatggctgctaggctccaggatggcacaccccaggctgccctaagtcccctgacccccgcaaggctcctgggcccctccctcaccagcaccacccctgcctcctcctccagcggctcctcctctcggggccccagtgatacctcctcccggttcagcaaggagcaacgaggagtagcccagcccctggcccagcttcgaagctgcccccaggaggagggccccagggggcggggcttggctgctaggccccttgaaaacagagcaggggggcctgtggcacgttcagaggagcctggtgccccgctgcccgtggccgtcggcactgccgagccagggggcagtatgaagaccacattcaccatcgagatcaaggacggccgtggccaggcctccacaggccgggtgctgctgcccacaggcaaccagagggcagaactgacactggggctgcgggcgcccccgaccctactcagcaccagtagtgggggcaagagcaccatcacccgtgtcaacagccctgggaccctggctcggctgggcagtgtcactcatgtcaccagcttcagccatgccccccccagtagccgaggaggctgcagcatcaagatggaaccagagccagcagagcctctcgctgcagcagtggaagcggccaatggggctgagcagacccgagtgaacaaagcaccagaagggcggagccctctgagcgctgaggagctgatgactattgaggatgaaggagtcttggacaagatgctggatcagagcacggactttgaagagcggaagctcatccgggctgcacttcgtgagctccgacaaaggaagagagaccagcgggacaaggagcgggaacggcggctgcaggaggcacggggccggccaggggaggggcgcggcaacacagccactgagaccaccacgaggcacagccagcgggcagctgatggctctgctgtcagcactgttaccaagactgagcggctcgtccactccaatgatggcacacggacggcccgcaccaccacagtggagtcgagtttcgtgaggcgctcggagaatggcagtggcagcaccatgatgcaaaccaagaccttctcctcttcctcctcatccaagaagatgggcagcatcttcgaccgcgaggaccaggccagcccacgggccggcagcctggcggcgctcgagaaacggcaggccgagaagaagaaagagctgatgaaggcgcagagtctgcccaagacctcagcctcccaggcgcgcaaggccatgattgagaagctggagaaggagggcgcggccggcagccctggcggaccccgcgcagccgtgcagcgatccaccagcttcggggtccccaacgccaacagcatcaagcagatgctgctggactggtgtcgagccaagactcgcggctacgagcacgtcgacatccagaacttctcctccagctggagtgatgggatggccttctgtgccctggtgcacaacttcttccctgaggccttcgactatgggcagcttagccctcagaaccgacgccagaacttcgaggtggccttctcatctgcggagacccatgcggactgcccgcagctcctggatacagaggacatggtgcggcttcgagagcctgactggaagtgcgtgtacacgtacatccaggaattctaccgctgtctggtccagaaggggctggtaaaaaccaaaaagtcctaacccctgctcggggccccacggatgctggtggactgtgtgcccctggtggaggtggacgacatgatgatcatgggcaagaagcctgaccccaagtgtgtcttcacctatgtgcagtcgctctacaaccacctgcgacgccacgaactgcgcctgcgcggcaagaatgtctagcctgcccgcccgcatggccagccagtggcaagctgccgcccccactctccgggcaccgtctcctgcctgtgcgtccgcccaccgctgccctgtctgttgcgacaccctcccccccacatacacacgcagcgttttgataaattattggttttcaacgaaaaatgaaaaa

SEQ ID NO: 434338 - DNA, 1416 bp, Homo sapiens
gaggtggggggcaggcctggggccacacattagtcagtcaccatacattaactaagcatccacagtgtgccagaccagggcccctcaaattccagacagacattagttggggctacaggaggaaggagagatctgcgctgggaggctgggccaggatttaggggtccattttgatgggcagcactggggcaagatggggctcttgcctctgtcactgagagtgttccaggcccttgagggcactttggaagggagcttcggaagccggagatgacgaagattttgattacatccttctctgccctctaagtctttggcttcctccttgctcagtgacaaatccttggccctctccaatcttctcagtttgcctgaaatccaggggttgggcaggtcagcttctgaaagcccttccaggtggggaattgaattctgtatgaattggcaggaggtgctgggtgcctggacacctggcttcaggaggtctggacagcagagctggctccaagaatcggaagacacagtgtaccttcctatacctgggggaatgacagtggtggtggcagcaagaactacgggttcagcccacagccagaagctgagcctgcggagtgggtgggggctgggtaggccctgtggatgggtgggtggggcaggaaactggagactggagtgcaccccctggtggtaagcacagcttgggtgggtcttgccaggccctggcttctcaatccaggtccctgccctccctgttttgaggtttagacaggatgagagtccatcccaggccacacagcagactggcggccaagctggcagggctggaaccagagaccccctaccctgggtttggtgagttttccagcaaaccaccctagggcagagggcagcttccagccaggagccacattataggatgggacagtaatggacgctcctaggttagagagggaaagtaaggcacagagcctaagtgcctgtggtttctggaagccccagcatgcctgattcatgtctgtcccctgcagaaattctctgagctggtgacaggtgccacaggcactggggatctcaccagaaaggaaccgacggagctaggggccagcgagatggcggacgaggccttagctgggctggatgagggagcccttcggaagctggtaagtggccccatcacccactgtggggacaggaaagccaagccagagaggcagggtcaatccagggtacctctcagctgacaggaagaagtgatgggggaaaggtcaggaggagggggacatgggaacaggggtaggccagttccatgtggctgatgcagaggcccttgtggcatgtgcctgtccatgcctggtactgaagcctagtccctcccaaccctccacagccaccacctgtttaaacagtaactgctgt

SEQ ID NO: 434339 - DNA, 1464 bp, Homo sapiens
gaggtggggggcaggcctggggccacacattagtcagtcaccatacattaactaagcatccacagtgtgccagaccagggcccctcaaattccagacagacattagttggggctacaggaggaaggagagatctgcgctgggaggctgggccaggatttaggggtccattttgatgggcagcactggggcaagatggggctcttgcctctgtcactgagagtgttccaggcccttgagggcactttggaagggagcttcggaagccggagatgacgaagattttgattacatccttctctgccctctaagtctttggcttcctccttgctcagtgacaaatccttggccctctccaatcttctcagtttgcctgaaatccaggggttgggcaggtcagcttctgaaagcccttccaggtggggaattgaattctgtatgaattggcaggaggtgctgggtgcctggacacctggcttcaggaggtctggacagcagagctggctccaagaatcggaagacacagtgtaccttcctatacctgggggaatgacagtggtggtggcagcaagaactacgggttcagcccacagccagaagctgagcctgcggagtgggtgggggctgggtaggccctgtggatgggtgggtggggcaggaaactggagactggagtgcaccccctggtggtaagcacagcttgggtgggtcttgccaggccctggcttctcaatccaggtccctgccctccctgttttgaggtttagacaggatgagagtccatcccaggccacacagcagactggcggccaagctggcagggctggaaccagagaccccctaccctgggtttggtgagttttccagcaaaccaccctagggcagagggcagcttccagccaggagccacattataggatgggacagtaatggacgctcctaggttagagagggaaagtaaggcacagagcctaagtgcctgtggtttctggaagccccagcatgcctgattcatgtctgtcccctgcagatcttcttgagccttgtgaaccaaggggccccaaccaaggccaaccttggggagattctccaacccaaggaaagggaaccaggaccgggaggtataggggcccaagccgaagaattgccggaaccgaaggccctataccttggccttgaagaaggagaccctccgaaacttgtaagtggcgccccaacaacccaccgtggggaccaaggaaacccacacaccaagaagaggcagggtcaatccagggtacctctcagctgacaggaagaagtgatgggggaaaggtcaggaggagggggacatgggaacaggggtaggccagttccatgtggctgatgcagaggcccttgtggcatgtgcctgtccatgcctggtactgaagcctagtccctcccaaccctccacagccaccacctgtttaaacagtaactgctgt

SEQ ID NO: 434340 - DNA, 417 bp, Homo sapiens
  misc_feature (6)..(6): n is a, c, g, or t
ccctcnctaatactaactacctgactcctacccctcacaatcatggcaagccaacgccacttatccagtgaaccactatcacgaaaaaaactctacctctctatactaatctccctacaaatctccttaattataacattcacagccacagaactaatcatattttatatcttcttcgaaaccacacttatccccaccttggctatcatcacccgatgaggcaaccagccagaacgcctgaacgcaggcacatacttcctattctacaccctagtaggctcccttcccctactcatcgcactaatttacactcacaacaccctaggctcactaaacattctactactcactctcactgcccccacatacacacgcagcgttttgataaattattggttttcaacgaaaaatgaaaaa

SEQ ID NO: 434341 - DNA, 3225 bp, Homo sapiens
tctggtatgccagaagacttagaagttattttgtttgcttgttttgtttgggtatttggggatttttaaaaaataatcaaagtggagaatccaggggacggttgctgagcgggcctgggacagcgggtcgcggcacctccggcctgcgcgtgtctaatccgtctgtcgggtcccgaaagagctaagccgagcctgcgccggacgggtgggctggactgagagaattctctgagctggtgacaggtgccacaggcactggggatctcaccagaaaggaaccgacggagctaggggccagcgagatggcggacgaggccttagctgggctggatgagggagcccttcggaagctgctggaggtcacagcagatctggcagagcggcggcgcatccgctcagccatccgggaactgcagcggcaggagctggagcgcgaggaggaggccctggcatccaagcgtttccgtgccgagcggcaggacaacaaggagaactggctgcactctcagcagcgggaagctgagcagcgggctgccctggcacggctggcagggcagctggagtccatgaacgatgtggaggaattgactgcactgttgcgaagcgctggtgagtatgaggagcgcaagctgatccgagctgccatccgccgtgtacgggctcaggagattgaggctgccaccttggctgggaggttgtacagcgggcgtcccaacagtggctcaagagaggacagcaaggggctagcggcacacaggctggaacagtgtgaggtgccagagcgagaggaacaggaacagcaggcagaggtttcaaagccaacccccacccctgaaggcaccagccaggatgtgaccacagtgacactcctgctgcgagccccacctgggagcacatccagctcacctgcctcacccagcagttcacccacccctgcctctcctgagcctccattggagcctgccgaggcccagtgccttacagctgaggttccaggcagcccagagccaccccccagcccacccaagaccaccagccctgagcctcaggagtctccaacgctccccagcactgagggccaggtggtcaacaagcttctgtctggccccaaagagacccctgctgcccagagccccaccagaggcccctctgacaccaagagagcagacgtggctggaccccgaccctgccaacgctccctgtcggtgctcagcccccgccaaccagcccagaaccgagagtccaccccccttgccagcggaccttcctcattccagcgggctggctctgtgcgggatcgtgtccacaagttcacatctgattctcctatggctgctaggctccaggatggcacaccccaggctgccctaagtcccctgacccccgcaaggctcctgggcccctccctcaccagcaccacccctgcctcctcctccagcggctcctcctctcggggccccagtgatacctcctcccggttcagcaaggagcaacgaggagtagcccagcccctggcccagcttcgaagctgcccccaggaggagggccccagggggcggggcttggctgctaggccccttgaaaacagagcaggggggcctgtggcacgttcagaggagcctggtgccccgctgcccgtggccgtcggcactgccgagccagggggcagtatgaagaccacattcaccatcgagatcaaggacggccgtggccaggcctccacaggccgggtgctgctgcccacaggcaaccagagggcagaactgacactggggctgcgggcgcccccgaccctactcagcaccagtagtgggggcaagagcaccatcacccgtgtcaacagccctgggaccctggctcggctgggcagtgtcactcatgtcaccagcttcagccatgccccccccagtagccgaggaggctgcagcatcaagatggaaccagagccagcagagcctctcgctgcagcagtggaagcggccaatggggctgagcagacccgagtgaacaaagcaccagaagggcggagccctctgagcgctgaggagctgatgactattgaggatgaaggagtcttggacaagatgctggatcagagcacggactttgaagagcggaagctcatccgggctgcacttcgtgagctccgacaaaggaagagagaccagcgggacaaggagcgggaacggcggctgcaggaggcacggggccggccaggggaggggcgcggcaacacagccactgagaccaccacgaggcacagccagcgggcagctgatggctctgctgtcagcactgttaccaagactgagcggctcgtccactccaatgatggcacacggacggcccgcaccaccacagtggagtcgagtttcgtgaggcgctcggagaatggcagtggcagcaccatgatgcaaaccaagaccttctcctcttcctcctcatccaagaagatgggcagcatcttcgaccgcgaggaccaggccagcccacgggccggcagcctggcggcgctcgagaaacggcaggccgagaagaagaaagagctgatgaaggcgcagagtctgcccaagacctcagcctcccaggcgcgcaaggccatgattgagaagctggagaaggagggcgcggccggcagccctggcggaccccgcgcagccgtgcagcgatccaccagcttcggggtccccaacgccaacagcatcaagcagatgctgctggactggtgtcgagccaagactcgcggctacgagcacgtcgacatccagaacttctcctccagctggagtgatgggatggccttctgtgccctggtgcacaacttcttccctgaggccttcgactatgggcagcttagccctcagaaccgacgccagaacttcgaggtggccttctcatctgcggagatgctggtggactgtgtgcccctggtggaggtggacgacatgatgatcatgggcaagaagcctgaccccaagtgtgtcttcacctatgtgcagtcgctctacaaccacctgcgacgccacgaactgcgcctgcgcggcaagaatgtctagcctgcccgcccgcatggccagccagtggcaagctgccgcccccactctccgggcaccgtctcctgcctgtgcgtccgcccaccgctgccctgtctgttgcgacaccctcccccccacatacacacgcagcgttttgataaattattggttttcaacgaaaaatgaaaaa

SEQ ID NO: 434342 - DNA, 4593 bp, Homo sapiens
tctggtatgccagaagacttagaagttattttgtttgcttgttttgtttgggtatttggggatttttaaaaaataatcaaagtggagaatccaggggacggttgctgagcgggcctgggacagcgggtcgcggcacctccggcctgcgcgtgtctaatccgtctgtcgggtcccgaaagagctaagccgagcctgcgccggacgggtgggctggactgagagaattctctgagctggtgacaggtgccacaggcactggggatctcaccagaaaggaaccgacggagctaggggccagcgagatggcggacgaggccttagctgggctggatgagggagcccttcggaagctgctggaggtcacagcagatctggcagagcggcggcgcatccgctcagccatccgggaactgcagcggcaggagctggagcgcgaggaggaggccctggcatccaagcgtttccgtgccgagcggcaggacaacaaggagaactggctgcactctcagcagcgggaagctgagcagcgggctgccctggcacggctggcagggcagctggagtccatgaacgatgtggaggaattgactgcactgttgcgaagcgctggtgagtatgaggagcgcaagctgatccgagctgccatccgccgtgtacgggctcaggagattgaggctgccaccttggctgggaggttgtacagcgggcgtcccaacagtggctcaagagaggacagcaaggggctagcggcacacaggctggaacagtgtgaggtgccagagcgagaggaacaggaacagcaggcagaggtttcaaagccaacccccacccctgaaggcaccagccaggatgtgaccacagtgacactcctgctgcgagccccacctgggagcacatccagctcacctgcctcacccagcagttcacccacccctgcctctcctgagcctccattggagcctgccgaggcccagtgccttacagctgaggttccaggcagcccagagccaccccccagcccacccaagaccaccagccctgagcctcaggagtctccaacgctccccagcactgagggccaggtggtcaacaagcttctgtctggccccaaagagacccctgctgcccagagccccaccagaggcccctctgacaccaagagagcagacgtggctggaccccgaccctgccaacgctccctgtcggtgctcagcccccgccaaccagcccagaaccgagagtccaccccccttgccagcggaccttcctcattccagcgggctggctctgtgcgggatcgtgtccacaagttcacatctgattctcctatggctgctaggctccaggatggcacaccccaggctgccctaagtcccctgacccccgcaaggctcctgggcccctccctcaccagcaccacccctgcctcctcctccagcggctcctcctctcggggccccagtgatacctcctcccggttcagcaaggagcaacgaggagtagcccagcccctggcccagcttcgaagctgcccccaggaggagggccccagggggcggggcttggctgctaggccccttgaaaacagagcaggggggcctgtggcacgttcagaggagcctggtgccccgctgcccgtggccgtcggcactgccgagccagggggcagtatgaagaccacattcaccatcgagatcaaggacggccgtggccaggcctccacaggccgggtgctgctgcccacaggcaaccagagggcagaactgacactggggctgcgggcgcccccgaccctactcagcaccagtagtgggggcaagagcaccatcacccgtgtcaacagccctgggaccctggctcggctgggcagtgtcactcatgtcaccagcttcagccatgccccccccagtagccgaggaggctgcagcatcaagatggaaccagagccagcagagcctctcgctgcagcagtggaagcggccaatggggctgagcagacccgagtgaacaaagcaccagaagggcggagccctctgagcgctgaggagctgatgactattgaggatgaaggagtcttggacaagatggtatagccagatccggtgggctgggggttggcagaggccagcaggcaccaggtaggcaatgatgggctctatatgcagctggatcagagcacggactttgaagagcggaagctcatccgggctgcacttcgtgagctccgacaaaggaagagaggtagagagccagttgccctaccctagatccagctgccccattccccagctgctcccctcatactctggggtccatttgtggacaccccagcttaataactgccctacccagcttctccttctctagacccagcagttcccttggctattccctgctggatccagctgctccttccctagctccttctctcccgctggtgaccccagttattctccccaaccagcttctcttctccttcctagacccagatactccctcccgcagctactctctccttggatccagttgcctctcaaagtactgtcaacgactccttccctgaatccagatactccttctccctgctgctcctctctccctgaagtccattgatggccatcttagcctctgccccatccagcttcccttttcctggacacaactacttcctcccccagatagttcttccctggacacatctattcattcccttagattctgggttcaattgcttctcctctcaaacactctcaattactcctctgaatctagctgcttctgccagggcccactgatggccaccccagtctctatctctacccacctacttctattttaagcccagttaacccccttcactagcttctctcccagctactcttcccctggatcagattgcttctcagatcccatcaattgctcccttcctggatctaaatattcctgcctccagctgctcttctcctccaaccaaagacctgctgatggcccacccagctacttcctcactcagcttctccttccttggactcagctaccccctcactagatctagatacccctcctgacttagctactcatgcctatagaaaccctttttggatccatacccctttgagtttagctactcgcgtattctctagtttctgcctgagtccatcaaacccttcccacactccattccctgtcaagttatggctgtcccctcaccccagctgctcctagagaggcccttgttacctgtgtcattcatgtttctaacaagccaccctccaccccgtcttgtgtgccccatgcacctgtgcatctgtgctgtgtgggtgttggtggcccttttgcgcatgcatggggcatcccctgcccagaaccagcgggacaaggagcgggaacggcggctgcaggaggcacggggccggccaggggaggggcgcggcaacacagccactgagaccaccacgaggcacagccagcgggcagctgatggctctgctgtcagcactgttaccaagactgagcggctcgtccactccaatgatggcacacggacggcccgcaccaccacagtggagtcgagtttcgtgaggcgctcggagaatggcagtggcagcaccatgatgcaaaccaagaccttctcctcttcctcctcatccaagaagatgggcagcatcttcgaccgcgaggaccaggccagcccacgggccggcagcctggcggcgctcgagaaacggcaggccgagaagaagaaagagctgatgaaggcgcagagtctgcccaagacctcagcctcccaggcgcgcaaggccatgattgagaagctggagaaggagggcgcggccggcagccctggcggaccccgcgcagccgtgcagcgatccaccagcttcggggtccccaacgccaacagcatcaagcagatgctgctggactggtgtcgagccaagactcgcggctacgagcacgtcgacatccagaacttctcctccagctggagtgatgggatggccttctgtgccctggtgcacaacttcttccctgaggccttcgactatgggcagcttagccctcagaaccgacgccagaacttcgaggtggccttctcatctgcggagacccatgcggactgcccgcagctcctggatacagaggacatggtgcggcttcgagagcctgactggaagtgcgtgtacacgtacatccaggaattctaccgctgtctggtccagaaggggctggtaaaaaccaaaaagtcctaacccctgctcggggccccacggatgctggtggactgtgtgcccctggtggaggtggacgacatgatgatcatgggcaagaagcctgaccccaagtgtgtcttcacctatgtgcagtcgctctacaaccacctgcgacgccacgaactgcgcctgcgcggcaagaatgtctagcctgcccgcccgcatggccagccagtggcaagctgccgcccccactctccgggcaccgtctcctgcctgtgcgtccgcccaccgctgccctgtctgttgcgacaccctcccccccacatacacacgcagcgttttgataaattattggttttcaacgaaaaatgaaaaa

SEQ ID NO: 434343 - DNA, 4515 bp, Homo sapiens
tctggtatgccagaagacttagaagttattttgtttgcttgttttgtttgggtatttggggatttttaaaaaataatcaaagtggagaatccaggggacggttgctgagcgggcctgggacagcgggtcgcggcacctccggcctgcgcgtgtctaatccgtctgtcgggtcccgaaagagctaagccgagcctgcgccggacgggtgggctggactgagagaattctctgagctggtgacaggtgccacaggcactggggatctcaccagaaaggaaccgacggagctaggggccagcgagatggcggacgaggccttagctgggctggatgagggagcccttcggaagctgctggaggtcacagcagatctggcagagcggcggcgcatccgctcagccatccgggaactgcagcggcaggagctggagcgcgaggaggaggccctggcatccaagcgtttccgtgccgagcggcaggacaacaaggagaactggctgcactctcagcagcgggaagctgagcagcgggctgccctggcacggctggcagggcagctggagtccatgaacgatgtggaggaattgactgcactgttgcgaagcgctggtgagtatgaggagcgcaagctgatccgagctgccatccgccgtgtacgggctcaggagattgaggctgccaccttggctgggaggttgtacagcgggcgtcccaacagtggctcaagagaggacagcaaggggctagcggcacacaggctggaacagtgtgaggtgccagagcgagaggaacaggaacagcaggcagaggtttcaaagccaacccccacccctgaaggcaccagccaggatgtgaccacagtgacactcctgctgcgagccccacctgggagcacatccagctcacctgcctcacccagcagttcacccacccctgcctctcctgagcctccattggagcctgccgaggcccagtgccttacagctgaggttccaggcagcccagagccaccccccagcccacccaagaccaccagccctgagcctcaggagtctccaacgctccccagcactgagggccaggtggtcaacaagcttctgtctggccccaaagagacccctgctgcccagagccccaccagaggcccctctgacaccaagagagcagacgtggctggaccccgaccctgccaacgctccctgtcggtgctcagcccccgccaaccagcccagaaccgagagtccaccccccttgccagcggaccttcctcattccagcgggctggctctgtgcgggatcgtgtccacaagttcacatctgattctcctatggctgctaggctccaggatggcacaccccaggctgccctaagtcccctgacccccgcaaggctcctgggcccctccctcaccagcaccacccctgcctcctcctccagcggctcctcctctcggggccccagtgatacctcctcccggttcagcaaggagcaacgaggagtagcccagcccctggcccagcttcgaagctgcccccaggaggagggccccagggggcggggcttggctgctaggccccttgaaaacagagcaggggggcctgtggcacgttcagaggagcctggtgccccgctgcccgtggccgtcggcactgccgagccagggggcagtatgaagaccacattcaccatcgagatcaaggacggccgtggccaggcctccacaggccgggtgctgctgcccacaggcaaccagagggcagaactgacactggggctgcgggcgcccccgaccctactcagcaccagtagtgggggcaagagcaccatcacccgtgtcaacagccctgggaccctggctcggctgggcagtgtcactcatgtcaccagcttcagccatgccccccccagtagccgaggaggctgcagcatcaagatggaaccagagccagcagagcctctcgctgcagcagtggaagcggccaatggggctgagcagacccgagtgaacaaagcaccagaagggcggagccctctgagcgctgaggagctgatgactattgaggatgaaggagtcttggacaagatgctggatcagagcacggactttgaagagcggaagctcatccgggctgcacttcgtgagctccgacaaaggaagagaggtagagagccagttgccctaccctagatccagctgccccattccccagctgctcccctcatactctggggtccatttgtggacaccccagcttaataactgccctacccagcttctccttctctagacccagcagttcccttggctattccctgctggatccagctgctccttccctagctccttctctcccgctggtgaccccagttattctccccaaccagcttctcttctccttcctagacccagatactccctcccgcagctactctctccttggatccagttgcctctcaaagtactgtcaacgactccttccctgaatccagatactccttctccctgctgctcctctctccctgaagtccattgatggccatcttagcctctgccccatccagcttcccttttcctggacacaactacttcctcccccagatagttcttccctggacacatctattcattcccttagattctgggttcaattgcttctcctctcaaacactctcaattactcctctgaatctagctgcttctgccagggcccactgatggccaccccagtctctatctctacccacctacttctattttaagcccagttaacccccttcactagcttctctcccagctactcttcccctggatcagattgcttctcagatcccatcaattgctcccttcctggatctaaatattcctgcctccagctgctcttctcctccaaccaaagacctgctgatggcccacccagctacttcctcactcagcttctccttccttggactcagctaccccctcactagatctagatacccctcctgacttagctactcatgcctatagaaaccctttttggatccatacccctttgagtttagctactcgcgtattctctagtttctgcctgagtccatcaaacccttcccacactccattccctgtcaagttatggctgtcccctcaccccagctgctcctagagaggcccttgttacctgtgtcattcatgtttctaacaagccaccctccaccccgtcttgtgtgccccatgcacctgtgcatctgtgctgtgtgggtgttggtggcccttttgcgcatgcatggggcatcccctgcccagaaccagcgggacaaggagcgggaacggcggctgcaggaggcacggggccggccaggggaggggcgcggcaacacagccactgagaccaccacgaggcacagccagcgggcagctgatggctctgctgtcagcactgttaccaagactgagcggctcgtccactccaatgatggcacacggacggcccgcaccaccacagtggagtcgagtttcgtgaggcgctcggagaatggcagtggcagcaccatgatgcaaaccaagaccttctcctcttcctcctcatccaagaagatgggcagcatcttcgaccgcgaggaccaggccagcccacgggccggcagcctggcggcgctcgagaaacggcaggccgagaagaagaaagagctgatgaaggcgcagagtctgcccaagacctcagcctcccaggcgcgcaaggccatgattgagaagctggagaaggagggcgcggccggcagccctggcggaccccgcgcagccgtgcagcgatccaccagcttcggggtccccaacgccaacagcatcaagcagatgctgctggactggtgtcgagccaagactcgcggctacgagcacgtcgacatccagaacttctcctccagctggagtgatgggatggccttctgtgccctggtgcacaacttcttccctgaggccttcgactatgggcagcttagccctcagaaccgacgccagaacttcgaggtggccttctcatctgcggagacccatgcggactgcccgcagctcctggatacagaggacatggtgcggcttcgagagcctgactggaagtgcgtgtacacgtacatccaggaattctaccgctgtctggtccagaaggggctggtaaaaaccaaaaagtcctaacccctgctcggggccccacggatgctggtggactgtgtgcccctggtggaggtggacgacatgatgatcatgggcaagaagcctgaccccaagtgtgtcttcacctatgtgcagtcgctctacaaccacctgcgacgccacgaactgcgcctgcgcggcaagaatgtctagcctgcccgcccgcatggccagccagtggcaagctgccgcccccactctccgggcaccgtctcctgcctgtgcgtccgcccaccgctgccctgtctgttgcgacaccctcccccccacatacacacgcagcgttttgataaattattggttttcaacgaaaaatgaaaaa

SEQ ID NO: 434344 - DNA, 4801 bp, Homo sapiens
tctggtatgccagaagacttagaagttattttgtttgcttgttttgtttgggtatttggggatttttaaaaaataatcaaagtggagaatccaggggacggttgctgagcgggcctgggacagcgggtcgcggcacctccggcctgcgcgtgtctaatccgtctgtcgggtcccgaaagagctaagccgagcctgcgccggacgggtgggctggactgagagaattctctgagctggtgacaggtgccacaggcactggggatctcaccagaaaggaaccgacggagctaggggccagcgagatggcggacgaggccttagctgggctggatgagggagcccttcggaagctgctggaggtcacagcagatctggcagagcggcggcgcatccgctcagccatccgggaactgcagcggcaggagctggagcgcgaggaggaggccctggcatccaagcgtttccgtgccgagcggcaggacaacaaggagaactggctgcactctcagcagcgggaagctgagcagcgggctgccctggcacggctggcagggcagctggagtccatgaacgatgtggaggaattgactgcactgttgcgaagcgctggtgagtatgaggagcgcaagctgatccgagctgccatccgccgtgtacgggctcaggagattgaggctgccaccttggctgggaggttgtacagcgggcgtcccaacagtggctcaagagaggacagcaaggggctagcggcacacaggctggaacagtgtgaggtgccagagcgagaggaacaggaacagcaggcagaggtttcaaagccaacccccacccctgaaggcaccagccaggatgtgaccacagtgacactcctgctgcgagccccacctgggagcacatccagctcacctgcctcacccagcagttcacccacccctgcctctcctgagcctccattggagcctgccgaggcccagtgccttacagctgaggttccaggcagcccagagccaccccccagcccacccaagaccaccagccctgagcctcaggagtctccaacgctccccagcactgagggccaggtggtcaacaagcttctgtctggccccaaagagacccctgctgcccagagccccaccagaggcccctctgacaccaagagagcagacgtggctggaccccgaccctgccaacgctccctgtcggtgctcagcccccgccaaccagcccagaaccgagagtccaccccccttgccagcggaccttcctcattccagcgggctggctctgtgcgggatcgtgtccacaagttcacatctgattctcctatggctgctaggctccaggatggcacaccccaggctgccctaagtcccctgacccccgcaaggctcctgggcccctccctcaccagcaccacccctgcctcctcctccagcggctcctcctctcggggccccagtgatacctcctcccggttcagcaaggagcaacgaggagtagcccagcccctggcccagcttcgaagctgcccccaggaggagggccccagggggcggggcttggctgctaggccccttgaaaacagagcaggggggcctgtggcacgttcagaggagcctggtgccccgctgcccgtggccgtcggcactgccgagccagggggcagtatgaagaccacattcaccatcgagatcaaggacggccgtggccaggcctccacaggccgggtgctgctgcccacaggcaaccagagggcagaactgacactggggctgcgggcgcccccgaccctactcagcaccagtagtgggggcaagagcaccatcacccgtgtcaacagccctgggaccctggctcggctgggcagtgtcactcatgtcaccagcttcagccatgccccccccagtagccgaggaggctgcagcatcaagatggaaccagagccagcagagcctctcgctgcagcagtggaagcggccaatggggctgagcagacccgagtgaacaaagcaccagaagggcggagccctctgagcgctgaggagctgatgactattgaggatgaaggagtcttggacaagatggtatagccagatccggtgggctgggggttggcagaggccagcaggcaccaggtaggcaatgatgggctctatatgcagctggatcagagcacggactttgaagagcggaagctcatccgggctgcacttcgtgagctccgacaaaggaagagaggtagagagccagttgccctaccctagatccagctgccccattccccagctgctcccctcatactctggggtccatttgtggacaccccagcttaataactgccctacccagcttctccttctctagacccagcagttcccttggctattccctgctggatccagctgctccttccctagctccttctctcccgctggtgaccccagttattctccccaaccagcttctcttctccttcctagacccagatactccctcccgcagctactctctccttggatccagttgcctctcaaagtactgtcaacgactccttccctgaatccagatactccttctccctgctgctcctctctccctgaagtccattgatggccatcttagcctctgccccatccagcttcccttttcctggacacaactacttcctcccccagatagttcttccctggacacatctattcattcccttagattctgggttcaattgcttctcctctcaaacactctcaattactcctctgaatctagctgcttctgccagggcccactgatggccaccccagtctctatctctacccacctacttctattttaagcccagttaacccccttcactagcttctctcccagctactcttcccctggatcagattgcttctcagatcccatcaattgctcccttcctggatctaaatattcctgcctccagctgctcttctcctccaaccaaagacctgctgatggcccacccagctacttcctcactcagcttctccttccttggactcagctaccccctcactagatctagatacccctcctgacttagctactcatgcctatagaaaccctttttggatccatacccctttgagtttagctactcgcgtattctctagtttctgcctgagtccatcaaacccttcccacactccattccctgtcaagttatggctgtcccctcaccccagctgctcctagagaggcccttgttacctgtgtcattcatgtttctaacaagccaccctccaccccgtcttgtgtgccccatgcacctgtgcatctgtgctgtgtgggtgttggtggcccttttgcgcatgcatggggcatcccctgcccagaaccagcgggacaaggagcgggaacggcggctgcaggaggcacggggccggccaggggaggggcgcggcaacacagccactgagaccaccacgaggcacagccagcgggcagctgatggctctgctgtcagcactgttaccaagactgagcggctcgtccactccaatgatggcacacggacggcccgcaccaccacagtggagtcgagtttcgtgaggcgctcggagagtaaggccacctggtgtcgccctgtgcctgcctgcctgtccgcccacctcctccggctcttccttgagctctctctccgtgtcttcaactgtgccgtcactttctcttctctgcctgcggctatcaccacccctccatacagcctcccatcccatctcctgatgtccagcccaggccctcacctggtgccccttccccttttttgcagatggcagtggcagcaccatgatgcaaaccaagaccttctcctcttcctcctcatccaagaagatgggcagcatcttcgaccgcgaggaccaggccagcccacgggccggcagcctggcggcgctcgagaaacggcaggccgagaagaagaaagagctgatgaaggcgcagagtctgcccaagacctcagcctcccaggcgcgcaaggccatgattgagaagctggagaaggagggcgcggccggcagccctggcggaccccgcgcagccgtgcagcgatccaccagcttcggggtccccaacgccaacagcatcaagcagatgctgctggactggtgtcgagccaagactcgcggctacgagcacgtcgacatccagaacttctcctccagctggagtgatgggatggccttctgtgccctggtgcacaacttcttccctgaggccttcgactatgggcagcttagccctcagaaccgacgccagaacttcgaggtggccttctcatctgcggagacccatgcggactgcccgcagctcctggatacagaggacatggtgcggcttcgagagcctgactggaagtgcgtgtacacgtacatccaggaattctaccgctgtctggtccagaaggggctggtaaaaaccaaaaagtcctaacccctgctcggggccccacggatgctggtggactgtgtgcccctggtggaggtggacgacatgatgatcatgggcaagaagcctgaccccaagtgtgtcttcacctatgtgcagtcgctctacaaccacctgcgacgccacgaactgcgcctgcgcggcaagaatgtctagcctgcccgcccgcatggccagccagtggcaagctgccgcccccactctccgggcaccgtctcctgcctgtgcgtccgcccaccgctgccctgtctgttgcgacaccctcccccccacatacacacgcagcgttttgataaattattggttttcaacgaaaaatgaaaaa

SEQ ID NO: 434345 - DNA, 3598 bp, Homo sapiens
tctggtatgccagaagacttagaagttattttgtttgcttgttttgtttgggtatttggggatttttaaaaaataatcaaagtggagaatccaggggacggttgctgagcgggcctgggacagcgggtcgcggcacctccggcctgcgcgtgtctaatccgtctgtcgggtcccgaaagagctaagccgagcctgcgccggacgggtgggctggactgagagaattctctgagctggtgacaggtgccacaggcactggggatctcaccagaaaggaaccgacggagctaggggccagcgagatggcggacgaggccttagctgggctggatgagggagcccttcggaagctgctggaggtcacagcagatctggcagagcggcggcgcatccgctcagccatccgggaactgcagcggcaggagctggagcgcgaggaggaggccctggcatccaagcgtttccgtgccgagcggcaggacaacaaggagaactggctgcactctcagcagcgggaagctgagcagcgggctgccctggcacggctggcagggcagctggagtccatgaacgatgtggaggaattgactgcactgttgcgaagcgctggtgagtatgaggagcgcaagctgatccgagctgccatccgccgtgtacgggctcaggagattgaggctgccaccttggctgggaggttgtacagcgggcgtcccaacagtggctcaagagaggacagcaaggggctagcggcacacaggctggaacagtgtgaggtgccagagcgagaggaacaggaacagcaggcagaggtttcaaagccaacccccacccctgaaggcaccagccaggatgtgaccacagtgacactcctgctgcgagccccacctgggagcacatccagctcacctgcctcacccagcagttcacccacccctgcctctcctgagcctccattggagcctgccgaggcccagtgccttacagctgaggttccaggcagcccagagccaccccccagcccacccaagaccaccagccctgagcctcaggagtctccaacgctccccagcactgagggccaggtggtcaacaagcttctgtctggccccaaagagacccctgctgcccagagccccaccagaggcccctctgacaccaagagagcagacgtggctggaccccgaccctgccaacgctccctgtcggtgctcagcccccgccaaccagcccagaaccgagagtccaccccccttgccagcggaccttcctcattccagcgggctggctctgtgcgggatcgtgtccacaagttcacatctgattctcctatggctgctaggctccaggatggcacaccccaggctgccctaagtcccctgacccccgcaaggctcctgggcccctccctcaccagcaccacccctgcctcctcctccagcggctcctcctctcggggccccagtgatacctcctcccggttcagcaaggagcaacgaggagtagcccagcccctggcccagcttcgaagctgcccccaggaggagggccccagggggcggggcttggctgctaggccccttgaaaacagagcaggggggcctgtggcacgttcagaggagcctggtgccccgctgcccgtggccgtcggcactgccgagccagggggcagtatgaagaccacattcaccatcgagatcaaggacggccgtggccaggcctccacaggccgggtgctgctgcccacaggcaaccagagggcagaactgacactggggctgcgggcgcccccgaccctactcagcaccagtagtgggggcaagagcaccatcacccgtgtcaacagccctgggaccctggctcggctgggcagtgtcactcatgtcaccagcttcagccatgccccccccagtagccgaggaggctgcagcatcaagatggaaccagagccagcagagcctctcgctgcagcagtggaagcggccaatggggctgagcagacccgagtgaacaaagcaccagaagggcggagccctctgagcgctgaggagctgatgactattgaggatgaaggagtcttggacaagatgctggatcagagcacggactttgaagagcggaagctcatccgggctgcacttcgtgagctccgacaaaggaagagagaccagcgggacaaggagcgggaacggcggctgcaggaggcacggggccggccaggggaggggcgcggcaacacagccactgagaccaccacgaggcacagccagcgggcagctgatggctctgctgtcagcactgttaccaagactgagcggctcgtccactccaatgatggcacacggacggcccgcaccaccacagtggagtcgagtttcgtgaggcgctcggagagtaaggccacctggtgtcgccctgtgcctgcctgcctgtccgcccacctcctccggctcttccttgagctctctctccgtgtcttcaactgtgccgtcactttctcttctctgcctgcggctatcaccacccctccatacagcctcccatcccatctcctgatgtccagcccaggccctcacctggtgccccttccccttttttgcagatggcagtggcagcaccatgatgcaaaccaagaccttctcctcttcctcctcatccaagaagatgggcagcatcttcgaccgcgaggaccaggccagcccacgggccggcagcctggcggcgctcgagaaacggcaggccgagaagaagaaagagctgatgaaggcgcagagtctgcccaagacctcagcctcccaggcgcgcaaggccatgattgagaagctggagaaggagggcgcggccggcagccctggcggaccccgcgcagccgtgcagcgatccaccagcttcggggtccccaacgccaacagcatcaagcagatgctgctggactggtgtcgagccaagactcgcggctacgagcacgtcgacatccagaacttctcctccagctggagtgatgggatggccttctgtgccctggtgcacaacttcttccctgaggccttcgactatgggcagcttagccctcagaaccgacgccagaacttcgaggtggccttctcatctgcggagacccatgcggactgcccgcagctcctggatacagaggacatggtgcggcttcgagagcctgactggaagtgcgtgtacacgtacatccaggaattctaccgctgtctggtccagaaggggctggtaaaaaccaaaaagtcctaacccctgctcggggccccacggatgctggtggactgtgtgcccctggtggaggtggacgacatgatgatcatgggcaagaagcctgaccccaagtgtgtcttcacctatgtgcagtcgctctacaaccacctgcgacgccacgaactgcgcctgcgcggcaagaatgtctagcctgcccgcccgcatggccagccagtggcaagctgccgcccccactctccgggcaccgtctcctgcctgtgcgtccgcccaccgctgccctgtctgttgcgacaccctcccccccacatacacacgcagcgttttgataaattattggttttcaacgaaaaatgaaaaa

SEQ ID NO: 434346 - DNA, 4273 bp, Homo sapiens
tctggtatgccagaagacttagaagttattttgtttgcttgttttgtttgggtatttggggatttttaaaaaataatcaaagtggagaatccaggggacggttgctgagcgggcctgggacagcgggtcgcggcacctccggcctgcgcgtgtctaatccgtctgtcgggtcccgaaagagctaagccgagcctgcgccggacgggtgggctggactgagagaattctctgagctggtgacaggtgccacaggcactggggatctcaccagaaaggaaccgacggagctaggggccagcgagatggcggacgaggccttagctgggctggatgagggagcccttcggaagctgctggaggtcacagcagatctggcagagcggcggcgcatccgctcagccatccgggaactgcagcggcaggagctggagcgcgaggaggaggccctggcatccaagcgtttccgtgccgagcggcaggacaacaaggagaactggctgcactctcagcagcgggaagctgagcagcgggctgccctggcacggctggcagggcagctggagtccatgaacgatgtggaggaattgactgcactgttgcgaagcgctggtgagtatgaggagcgcaagctgatccgagctgccatccgccgtgtacgggctcaggagattgaggctgccaccttggctgggaggttgtacagcgggcgtcccaacagtggctcaagagaggacagcaaggggctagcggcacacaggctggaacagtgtgaggtgccagagcgagaggaacaggaacagcaggcagaggtttcaaagccaacccccacccctgaaggcaccagccaggatgtgaccacagtgacactcctgctgcgagccccacctgggagcacatccagctcacctgcctcacccagcagttcacccacccctgcctctcctgagcctccattggagcctgccgaggcccagtgccttacagctgaggttccaggcagcccagagccaccccccagcccacccaagaccaccagccctgagcctcaggagtctccaacgctccccagcactgagggccaggtggtcaacaagcttctgtctggccccaaagagacccctgctgcccagagccccaccagaggcccctctgacaccaagagagcagacgtggctggaccccgaccctgccaacgctccctgtcggtgctcagcccccgccaaccagcccagaaccgagagtccaccccccttgccagcggaccttcctcattccagcgggctggctctgtgcgggatcgtgtccacaagttcacatctgattctcctatggctgctaggctccaggatggcacaccccaggctgccctaagtcccctgacccccgcaaggctcctgggcccctccctcaccagcaccacccctgcctcctcctccagcggctcctcctctcggggccccagtgatacctcctcccggttcagcaaggagcaacgaggagtagcccagcccctggcccagcttcgaagctgcccccaggaggagggccccagggggcggggcttggctgctaggccccttgaaaacagagcaggggggcctgtggcacgttcagaggagcctggtgccccgctgcccgtggccgtcggcactgccgagccagggggcagtatgaagaccacattcaccatcgagatcaaggacggccgtggccaggcctccacaggccgggtgctgctgcccacaggcaaccagagggcagaactgacactggggctgcgggcgcccccgaccctactcagcaccagtagtgggggcaagagcaccatcacccgtgtcaacagccctgggaccctggctcggctgggcagtgtcactcatgtcaccagcttcagccatgccccccccagtagccgaggaggctgcagcatcaagatggaaccagagccagcagagcctctcgctgcagcagtggaagcggccaatggggctgagcagacccgagtgaacaaagcaccagaagggcggagccctctgagcgctgaggagctgatgactattgaggatgaaggagtcttggacaagatgctggatcagagcacggactttgaagagcggaagctcatccgggctgcacttcgtgagctccgacaaaggaagagagacccagatactccctcccgcagctactctctccttggatccagttgcctctcaaagtactgtcaacgactccttccctgaatccagatactccttctccctgctgctcctctctccctgaagtccattgatggccatcttagcctctgccccatccagcttcccttttcctggacacaactacttcctcccccagatagttcttccctggacacatctattcattcccttagattctgggttcaattgcttctcctctcaaacactctcaattactcctctgaatctagctgcttctgccagggcccactgatggccaccccagtctctatctctacccacctacttctattttaagcccagttaacccccttcactagcttctctcccagctactcttcccctggatcagattgcttctcagatcccatcaattgctcccttcctggatctaaatattcctgcctccagctgctcttctcctccaaccaaagacctgctgatggcccacccagctacttcctcactcagcttctccttccttggactcagctaccccctcactagatctagatacccctcctgacttagctactcatgcctatagaaaccctttttggatccatacccctttgagtttagctactcgcgtattctctagtttctgcctgagtccatcaaacccttcccacactccattccctgtcaagttatggctgtcccctcaccccagctgctcctagagaggcccttgttacctgtgtcattcatgtttctaacaagccaccctccaccccgtcttgtgtgccccatgcacctgtgcatctgtgctgtgtgggtgttggtggcccttttgcgcatgcatggggcatcccctgcccagaaccagcgggacaaggagcgggaacggcggctgcaggaggcacggggccggccaggggaggggcgcggcaacacagccactgagaccaccacgaggcacagccagcgggcagctgatggctctgctgtcagcactgttaccaagactgagcggctcgtccactccaatgatggcacacggacggcccgcaccaccacagtggagtcgagtttcgtgaggcgctcggagaatggcagtggcagcaccatgatgcaaaccaagaccttctcctcttcctcctcatccaagaagatgggcagcatcttcgaccgcgaggaccaggccagcccacgggccggcagcctggcggcgctcgagaaacggcaggccgagaagaagaaagagctgatgaaggcgcagagtctgcccaagacctcagcctcccaggcgcgcaaggccatgattgagaagctggagaaggagggcgcggccggcagccctggcggaccccgcgcagccgtgcagcgatccaccagcttcggggtccccaacgccaacagcatcaagcagatgctgctggactggtgtcgagccaagactcgcggctacgagcacgtcgacatccagaacttctcctccagctggagtgatgggatggccttctgtgccctggtgcacaacttcttccctgaggccttcgactatgggcagcttagccctcagaaccgacgccagaacttcgaggtggccttctcatctgcggagacccatgcggactgcccgcagctcctggatacagaggacatggtgcggcttcgagagcctgactggaagtgcgtgtacacgtacatccaggaattctaccgctgtctggtccagaaggggctggtaaaaaccaaaaagtcctaacccctgctcggggccccacggatgctggtggactgtgtgcccctggtggaggtggacgacatgatgatcatgggcaagaagcctgaccccaagtgtgtcttcacctatgtgcagtcgctctacaaccacctgcgacgccacgaactgcgcctgcgcggcaagaatgtctagcctgcccgcccgcatggccagccagtggcaagctgccgcccccactctccgggcaccgtctcctgcctgtgcgtccgcccaccgctgccctgtctgttgcgacaccctcccccccacatacacacgcagcgttttgataaattattggttttcaacgaaaaatgaaaaa

SEQ ID NO: 434347 - DNA, 3162 bp, Homo sapiens
tctggtatgccagaagacttagaagttattttgtttgcttgttttgtttgggtatttggggatttttaaaaaataatcaaagtggagaatccaggggacggttgctgagcgggcctgggacagcgggtcgcggcacctccggcctgcgcgtgtctaatccgtctgtcgggtcccgaaagagctaagccgagcctgcgccggacgggtgggctggactgagagaattctctgagctggtgacaggtgccacaggcactggggatctcaccagaaaggaaccgacggagctaggggccagcgagatggcggacgaggccttagctgggctggatgagggagcccttcggaagctgctggaggtcacagcagatctggcagagcggcggcgcatccgctcagccatccgggaactgcagcggcaggagctggagcgcgaggaggaggccctggcatccaagcgtttccgtgccgagcggcaggacaacaaggagaactggctgcactctcagcagcgggaagctgagcagcgggctgccctggcacggctggcagggcagctggagtccatgaacgatgtggaggaattgactgcactgttgcgaagcgctggtgagtatgaggagcgcaagctgatccgagctgccatccgccgtgtacgggctcaggagattgaggctgccaccttggctgggaggttgtacagcgggcgtcccaacagtggctcaagagaggacagcaaggggctagcggcacacaggctggaacagtgtgaggtgccagagcgagaggaacaggaacagcaggcagaggtttcaaagccaacccccacccctgaaggcaccagccaggatgtgaccacagtgacactcctgctgcgagccccacctgggagcacatccagctcacctgcctcacccagcagttcacccacccctgcctctcctgagcctccattggagcctgccgaggcccagtgccttacagctgaggttccaggcagcccagagccaccccccagcccacccaagaccaccagccctgagcctcaggagtctccaacgctccccagcactgagggccaggtggtcaacaagcttctgtctggccccaaagagacccctgctgcccagagccccaccagaggcccctctgacaccaagagagcagacgtggctggaccccgaccctgccaacgctccctgtcggtgctcagcccccgccaaccagcccagaaccgagagtccaccccccttgccagcggaccttcctcattccagcgggctggctctgtgcgggatcgtgtccacaagttcacatctgattctcctatggctgctaggctccaggatggcacaccccaggctgccctaagtcccctgacccccgcaaggctcctgggcccctccctcaccagcaccacccctgcctcctcctccagcggctcctcctctcggggccccagtgatacctcctcccggttcagcaaggagcaacgaggagtagcccagcccctggcccagcttcgaagctgcccccaggaggagggccccagggggcggggcttggctgctaggccccttgaaaacagagcaggggggcctgtggcacgttcagaggagcctggtgccccgctgcccgtggccgtcggcactgccgagccagggggcagtatgaagaccacattcaccatcgagatcaaggacggccgtggccaggcctccacaggccgggtgctgctgcccacaggcaaccagagggcagaactgacactggggctgcgggcgcccccgaccctactcagcaccagtagtgggggcaagagcaccatcacccgtgtcaacagccctgggaccctggctcggctgggcagtgtcactcatgtcaccagcttcagccatgccccccccagtagccgaggaggctgcagcatcaagatggaaccagagccagcagagcctctcgctgcagcagtggaagcggccaatggggctgagcagacccgagtgaacaaagcaccagaagggcggagccctctgagcgctgaggagctgatgactattgaggatgaaggagtcttggacaagatgctggatcagagcacggactttgaagagcggaagctcatccgggctgcacttcgtgagctccgacaaaggaagagagatggcagtggcagcaccatgatgcaaaccaagaccttctcctcttcctcctcatccaagaagatgggcagcatcttcgaccgcgaggaccaggccagcccacgggccggcagcctggcggcgctcgagaaacggcaggccgagaagaagaaagagctgatgaaggcgcagagtctgcccaagacctcagcctcccaggcgcgcaaggccatgattgagaagctggagaaggagggcgcggccggcagccctggcggaccccgcgcagccgtgcagcgatccaccagcttcggggtccccaacgccaacagcatcaagcagatgctgctggactggtgtcgagccaagactcgcggctacgagcacgtcgacatccagaacttctcctccagctggagtgatgggatggccttctgtgccctggtgcacaacttcttccctgaggccttcgactatgggcagcttagccctcagaaccgacgccagaacttcgaggtggccttctcatctgcggagacccatgcggactgcccgcagctcctggatacagaggacatggtgcggcttcgagagcctgactggaagtgcgtgtacacgtacatccaggaattctaccgctgtctggtccagaaggggctggtaaaaaccaaaaagtcctaacccctgctcggggccccacggatgctggtggactgtgtgcccctggtggaggtggacgacatgatgatcatgggcaagaagcctgaccccaagtgtgtcttcacctatgtgcagtcgctctacaaccacctgcgacgccacgaactgcgcctgcgcggcaagaatgtctagcctgcccgcccgcatggccagccagtggcaagctgccgcccccactctccgggcaccgtctcctgcctgtgcgtccgcccaccgctgccctgtctgttgcgacaccctcccccccacatacacacgcagcgttttgataaattattggttttcaacgaaaaatgaaaaa

SEQ ID NO: 434348 - DNA, 3778 bp, Homo sapiens
tctggtatgccagaagacttagaagttattttgtttgcttgttttgtttgggtatttggggatttttaaaaaataatcaaagtggagaatccaggggacggttgctgagcgggcctgggacagcgggtcgcggcacctccggcctgcgcgtgtctaatccgtctgtcgggtcccgaaagagctaagccgagcctgcgccggacgggtgggctggactgagagaattctctgagctggtgacaggtgccacaggcactggggatctcaccagaaaggaaccgacggagctaggggccagcgagatggcggacgaggccttagctgggctggatgagggagcccttcggaagctgctggaggtcacagcagatctggcagagcggcggcgcatccgctcagccatccgggaactgcagcggcaggagctggagcgcgaggaggaggccctggcatccaagcgtttccgtgccgagcggcaggacaacaaggagaactggctgcactctcagcagcgggaagctgagcagcgggctgccctggcacggctggcagggcagctggagtccatgaacgatgtggaggaattgactgcactgcagcaccacccctgcctcctcctccagcggctcctcctctcggggccccagtgatacctcctcccggttcagcaaggagcaacgaggagtagcccagcccctggcccagcttcgaagctgcccccaggaggagggccccagggggcggggcttggctgctaggccccttgaaaacagagcaggggggcctgtggcacgttcagaggagcctggtgccccgctgcccgtggccgtcggcactgccgagccagggggcagtatgaagaccacattcaccatcgagatcaaggacggccgtggccaggcctccacaggccgggtgctgctgcccacaggcaaccagagggcagaactgacactggggctgcgggcgcccccgaccctactcagcaccagtagtgggggcaagagcaccatcacccgtgtcaacagccctgggaccctggctcggctgggcagtgtcactcatgtcaccagcttcagccatgccccccccagtagccgaggaggctgcagcatcaagatggaaccagagccagcagagcctctcgctgcagcagtggaagcggccaatggggctgagcagacccgagtgaacaaagcaccagaagggcggagccctctgagcgctgaggagctgatgactattgaggatgaaggagtcttggacaagatggtatagccagatccggtgggctgggggttggcagaggccagcaggcaccaggtaggcaatgatgggctctatatgcagctggatcagagcacggactttgaagagcggaagctcatccgggctgcacttcgtgagctccgacaaaggaagagaggtagagagccagttgccctaccctagatccagctgccccattccccagctgctcccctcatactctggggtccatttgtggacaccccagcttaataactgccctacccagcttctccttctctagacccagcagttcccttggctattccctgctggatccagctgctccttccctagctccttctctcccgctggtgaccccagttattctccccaaccagcttctcttctccttcctagacccagatactccctcccgcagctactctctccttggatccagttgcctctcaaagtactgtcaacgactccttccctgaatccagatactccttctccctgctgctcctctctccctgaagtccattgatggccatcttagcctctgccccatccagcttcccttttcctggacacaactacttcctcccccagatagttcttccctggacacatctattcattcccttagattctgggttcaattgcttctcctctcaaacactctcaattactcctctgaatctagctgcttctgccagggcccactgatggccaccccagtctctatctctacccacctacttctattttaagcccagttaacccccttcactagcttctctcccagctactcttcccctggatcagattgcttctcagatcccatcaattgctcccttcctggatctaaatattcctgcctccagctgctcttctcctccaaccaaagacctgctgatggcccacccagctacttcctcactcagcttctccttccttggactcagctaccccctcactagatctagatacccctcctgacttagctactcatgcctatagaaaccctttttggatccatacccctttgagtttagctactcgcgtattctctagtttctgcctgagtccatcaaacccttcccacactccattccctgtcaagttatggctgtcccctcaccccagctgctcctagagaggcccttgttacctgtgtcattcatgtttctaacaagccaccctccaccccgtcttgtgtgccccatgcacctgtgcatctgtgctgtgtgggtgttggtggcccttttgcgcatgcatggggcatcccctgcccagaaccagcgggacaaggagcgggaacggcggctgcaggaggcacggggccggccaggggaggggcgcggcaacacagccactgagaccaccacgaggcacagccagcgggcagctgatggctctgctgtcagcactgttaccaagactgagcggctcgtccactccaatgatggcacacggacggcccgcaccaccacagtggagtcgagtttcgtgaggcgctcggagaatggcagtggcagcaccatgatgcaaaccaagaccttctcctcttcctcctcatccaagaagatgggcagcatcttcgaccgcgaggaccaggccagcccacgggccggcagcctggcggcgctcgagaaacggcaggccgagaagaagaaagagctgatgaaggcgcagagtctgcccaagacctcagcctcccaggcgcgcaaggccatgattgagaagctggagaaggagggcgcggccggcagccctggcggaccccgcgcagccgtgcagcgatccaccagcttcggggtccccaacgccaacagcatcaagcagatgctgctggactggtgtcgagccaagactcgcggctacgagcacgtcgacatccagaacttctcctccagctggagtgatgggatggccttctgtgccctggtgcacaacttcttccctgaggccttcgactatgggcagcttagccctcagaaccgacgccagaacttcgaggtggccttctcatctgcggagacccatgcggactgcccgcagctcctggatacagaggacatggtgcggcttcgagagcctgactggaagtgcgtgtacacgtacatccaggaattctaccgctgtctggtccagaaggggctggtaaaaaccaaaaagtcctaacccctgctcggggccccacggatgctggtggactgtgtgcccctggtggaggtggacgacatgatgatcatgggcaagaagcctgaccccaagtgtgtcttcacctatgtgcagtcgctctacaaccacctgcgacgccacgaactgcgcctgcgcggcaagaatgtctagcctgcccgcccgcatggccagccagtggcaagctgccgcccccactctccgggcaccgtctcctgcctgtgcgtccgcccaccgctgccctgtctgttgcgacaccctcccccccacatacacacgcagcgttttgataaattattggttttcaacgaaaaatgaaaaa

SEQ ID NO: 434349 - DNA, 2603 bp, Homo sapiens
tccttgtaatccaagcagtcggatggaaccagagccagcagagcctctcgctgcagcagtggaagcggccaatggggctgagcagacccgagtgaacaaagcaccagaagggcggagccctctgagcgctgaggagctgatgactattgaggatgaaggagtcttggacaagatgctggatcagagcacggactttgaagagcggaagctcatccgggctgcacttcgtgagctccgacaaaggaagagaggtagagagccagttgccctaccctagatccagctgccccattccccagctgctcccctcatactctggggtccatttgtggacaccccagcttaataactgccctacccagcttctccttctctagacccagcagttcccttggctattccctgctggatccagctgctccttccctagctccttctctcccgctggtgaccccagttattctccccaaccagcttctcttctccttcctagacccagatactccctcccgcagctactctctccttggatccagttgcctctcaaagtactgtcaacgactccttccctgaatccagatactccttctccctgctgctcctctctccctgaagtccattgatggccatcttagcctctgccccatccagcttcccttttcctggacacaactacttcctcccccagatagttcttccctggacacatctattcattcccttagattctgggttcaattgcttctcctctcaaacactctcaattactcctctgaatctagctgcttctgccagggcccactgatggccaccccagtctctatctctacccacctacttctattttaagcccagttaacccccttcactagcttctctcccagctactcttcccctggatcagattgcttctcagatcccatcaattgctcccttcctggatctaaatattcctgcctccagctgctcttctcctccaaccaaagacctgctgatggcccacccagctacttcctcactcagcttctccttccttggactcagctaccccctcactagatctagatacccctcctgacttagctactcatgcctatagaaaccctttttggatccatacccctttgagtttagctactcgcgtattctctagtttctgcctgagtccatcaaacccttcccacactccattccctgtcaagttatggctgtcccctcaccccagctgctcctagagaggcccttgttacctgtgtcattcatgtttctaacaagccaccctccaccccgtcttgtgtgccccatgcacctgtgcatctgtgctgtgtgggtgttggtggcccttttgcgcatgcatggggcatcccctgcccagaaccagcgggacaaggagcgggaacggcggctgcaggaggcacggggccggccaggggaggggcgcggcaacacagccactgagaccaccacgaggcacagccagcgggcagctgatggctctgctgtcagcactgttaccaagactgagcggctcgtccactccaatgatggcacacggacggcccgcaccaccacagtggagtcgagtttcgtgaggcgctcggagaatggcagtggcagcaccatgatgcaaaccaagaccttctcctcttcctcctcatccaagaagatgggcagcatcttcgaccgcgaggaccaggccagcccacgggccggcagcctggcggcgctcgagaaacggcaggccgagaagaagaaagagctgatgaaggcgcagagtctgcccaagacctcagcctcccaggcgcgcaaggccatgattgagaagctggagaaggagggcgcggccggcagccctggcggaccccgcgcagccgtgcagcgatccaccagcttcggggtccccaacgccaacagcatcaagcagatgctgctggactggtgtcgagccaagactcgcggctacgagcacgtcgacatccagaacttctcctccagctggagtgatgggatggccttctgtgccctggtgcacaacttcttccctgaggccttcgactatgggcagcttagccctcagaaccgacgccagaacttcgaggtggccttctcatctgcggagacccatgcggactgcccgcagctcctggatacagaggacatggtgcggcttcgagagcctgactggaagtgcgtgtacacgtacatccaggaattctaccgctgtctggtccagaaggggctggtaaaaaccaaaaagtcctaacccctgctcggggccccacggatgctggtggactgtgtgcccctggtggaggtggacgacatgatgatcatgggcaagaagcctgaccccaagtgtgtcttcacctatgtgcagtcgctctacaaccacctgcgacgccacgaactgcgcctgcgcggcaagaatgtctagcctgcccgcccgcatggccagccagtggcaagctgccgcccccactctccgggcaccgtctcctgcctgtgcgtccgcccaccgctgccctgtctgttgcgacaccctcccccccacatacacacgcagcgttttgataaattattggttttcaacgaaaaatgaaaaa

SEQ ID NO: 434350 - DNA, 3628 bp, Homo sapiens
tctggtatgccagaagacttagaagttattttgtttgcttgttttgtttgggtatttggggatttttaaaaaataatcaaagtggagaatccaggggacggttgctgagcgggcctgggacagcgggtcgcggcacctccggcctgcgcgtgtctaatccgtctgtcgggtcccgaaagagctaagccgagcctgcgccggacgggtgggctggactgagagaattctctgagctggtgacaggtgccacaggcactggggatctcaccagaaaggaaccgacggagctaggggccagcgagatggcggacgaggccttagctgggctggatgagggagcccttcggaagctgctggaggtcacagcagatctggcagagcggcggcgcatccgctcagccatccgggaactgcagcggcaggagctggagcgcgaggaggaggccctggcatccaagcgtttccgtgccgagcggcaggacaacaaggagaactggctgcactctcagcagcgggaagctgagcagcgggctgccctggcacggctggcagggcagctggagtccatgaacgatgtggaggaattgactgcactgttgcgaagcgctggtgagtatgaggagcgcaagctgatccgagctgccatccgccgtgtacgggctcaggagattgaggctgccaccttggctgggaggttgtacagcgggcgtcccaacagtggctcaagagaggacagcaaggggctagcggcacacaggctggaacagtgtgaggtgccagagcgagaggaacaggaacagcaggcagaggtttcaaagccaacccccacccctgaaggcaccagccaggatgtgaccacagtgacactcctgctgcgagccccacctgggagcacatccagctcacctgcctcacccagcagttcacccacccctgcctctcctgagcctccattggagcctgccgaggcccagtgccttacagctgaggttccaggcagcccagagccaccccccagcccacccaagaccaccagccctgagcctcaggagtctccaacgctccccagcactgagggccaggtggtcaacaagcttctgtctggccccaaagagacccctgctgcccagagccccaccagaggcccctctgacaccaagagagcagacgtggctggaccccgaccctgccaacgctccctgtcggtgctcagcccccgccaaccagcccagaaccgagagtccaccccccttgccagcggaccttcctcattccagcgggctggctctgtgcgggatcgtgtccacaagttcacatctgattctcctatggctgctaggctccaggatggcacaccccaggctgccctaagtcccctgacccccgcaaggctcctgggcccctccctcaccagcaccacccctgcctcctcctccagcggctcctcctctcggggccccagtgatacctcctcccggttcagcaaggagcaacgaggagtagcccagcccctggcccagcttcgaagctgcccccaggaggagggccccagggggcggggcttggctgctaggccccttgaaaacagagcaggggggcctgtggcacgttcagaggagcctggtgccccgctgcccgtggccgtcggcactgccgagccagggggcagtatgaagaccacattcaccatcgagatcaaggacggccgtggccaggcctccacaggccgggtgctgctgcccacaggcaaccagagggcagaactgacactggggctgcgggcgcccccgaccctactcagcaccagtagtgggggcaagagcaccatcacccgtgtcaacagccctgggaccctggctcggctgggcagtgtcactcatgtcaccagcttcagccatgccccccccagtagccgaggaggctgcagcatcaagatggaaccagagccagcagagcctctcgctgcagcagtggaagcggccaatggggctgagcagacccgagtgaacaaagcaccagaagggcggagccctctgagcgctgaggagctgatgactattgaggatgaaggagtcttggacaagatggtatagccagatccggtgggctgggggttggcagaggccagcaggcaccaggtaggcaatgatgggctctatatgcagctggatcagagcacggactttgaagagcggaagctcatccgggctgcacttcgtgagctccgacaaaggaagagaggtagagagccagttgccctaccctagatccagctgccccattccccagctgctcccctcatactctggggtccatttgtggacaccccagcttaataactgccctacccagcttctccttctctagacccagcagttcccttggctattccctgctggatccagctgctccttccctagctccttctctcccgctggtgaccccagttattctccccaaccagcttctcttctccttcctagacccagatactccctcccgcagctactctctccttggatccagttgcctctcaaagtactgtcaacgactccttccctgaatccagatactccttctccctgctgctcctctctccctgaagtccattgatggccatcttagcctctgccccatccagcttcccttttcctggacacaactacttcctcccccagatagttcttccctggacacatctattcattcccttagattctgggttcaattgcttctcctctcaaacactctcaattactcctctgaatctagctgcttctgccagggcccactgatggccaccccagtctctatctctacccacctacttctattttaagcccagttaacccccttcactagcttctctcccagctactcttcccctggatcagattgcttctcagatcccatcaattgctcccttcctggatctaaatattcctgcctccagctgctcttctcctccaaccaaagacctgctgatggcccacccagctacttcctcactcagcttctccttccttggactcagctaccccctcactagatctagatacccctcctgacttagctactcatgcctatagaaaccctttttggatccatacccctttgagtttagctactcgcgtattctctagtttctgcctgagtccatcaaacccttcccacactccattccctgtcaagttatggctgtcccctcaccccagctgctcctagagaggcccttgttacctgtgtcattcatgtttctaacaagccaccctccaccccgtcttgtgtgccccatgcacctgtgcatctgtgctgtgtgggtgttggtggcccttttgcgcatgcatggggcatcccctgcccagaaccagcgggacaaggagcgggaacggcggctgcaggaggcacggggccggccaggggaggggcgcggcaacacagccactgagaccaccacgaggcacagccagcgggcagctgatggctctgctgtcagcactgttaccaagactgagcggctcgtccactccaatgatgcacacgtacgcccacaagccgggatcgctcgtagagtcggcgcggcgaggcgagcgaagcgtggaagtgcgtgatgaagcgaggggggagg

SEQ ID NO: 434351 - DNA, 1001 bp, Homo sapiens
tctggtatgccagaagacttagaagttattttgtttgcttgttttgtttgggtatttggggatttttaaaaaataatcaaagtggagaatccaggggacggttgctgagcgggcctgggacagcgggtcgcggcacctccggcctgcgcgtgtctaatccgtctgtcgggtcccgaaagagctaagccgagcctgcgccggacgggtgggctggactgagagaattctctgagctggtgacaggtgccacaggcactggggatctcaccagaaaggaaccgacggagctaggggccagcgagatggcggacgaggccttagctgggctggatgagggagcccttcggaagctgctggaggtcacagcagatctggcagagcggcggcgcatccgctcagccatccgggaactgcagcggcaggagctggagcgcgaggaggaggccctggcatccaagcgtttccgtgccgagcggcaggacaacaaggagaactggctgcactctcagcagcgggaagctgagcagcgggctgccctggcacggctggcagggcagctggagtccatgaacgatgtggaggaattgactgcactgttgcgaagcgctggtgagtatgaggagcgcaagctgatccgagctgccatccgccgtgtacgggctcaggagattgaggctgccaccttggctgggaggttgtacagcgggcgtcccaacagtggctcaagagaggacagcaaggggctagcggcacacaggctggaacagtgtgaggtgccagagcgagaggaacaggaacagcaggcagaggtttcaaagccaacccccacccctgaaggcaccagccaggatgtgaccacagtgacactcctgctgcgagccccacctgggagcacatccagctcacctgcctcacccagcagttcacccgtagcatgtacttcacccgtagctgtacctcaccagtagctgtacctcacccgtagctgtacctcacccgta

SEQ ID NO: 434352 - DNA, 1244 bp, Homo sapiens
cccacaactggttagggatacagtctggactaaaacagaggtgttcggtgttctgcctcccaggtttcttctctgaaggagtccaggtgagctgggggtaggcccagccctaccacagttctgagtttgtccataagggcacgagatgggaggtggtcttgggttctcaggtgtcttgagaataaggagcaattgttgccattatgccttccctgccataggaaactcattcagcaacattgaatgcttgctatgtcccaggtatggcagataggagggatcaaggcagaagaggtcttgctctgggggttgagggacaggggaaaaggagccagagagcagactccagcttcagagctctgggagctgtcagttgcttaataggcacaacccactcactccagagtggggaaaaggctttgccaacacccagaactgggggcctgggtcccatgcggcctagcctgcacttactaagccgtggggcttgaaacaaatggctcctctgctctgtgactcagtttccttatctgtgaagggcagctagcattctgaaggatggccagaagggtggtccccccgagcatggcatagatggtccattggtattggctgggatcctcatctgcctcctctgctctacccaaggcaggtgataagggttagagaacccctctgctgcccacacgttccctggcctccatctccagcagcagggttatccccaccccctgtcaaagaataggggtccctgggcctctcaacaggaagtaccagatcaggcagctagcagacaatcatcggtggaccacagggccactagagtgagacctatccatagataaagattggccagtgatgaagcccatctgggtgcaaaggccgagctgagaggcttctaccaactggagtgtgccagtgagggatgctggtggactgtgtgcccctggtggaggtggacgacatgatgatcatgggcaagaagcctgaccccaagtgtgtcttcacctatgtgcagtcgctctacaaccacctgcgacgccacgaactgcgcctgcgcggcaagaatgtctagcctgcccgcccgcatggccagccagtggcaagctgccgcccccactctccgggcaccgtctcctgcctgtgcgtccgcccaccgctgccctgtctgttgcgacaccctcccccccacatacacacgcagcgttttgataaattattggttttcaacgaaaaatgaaaaa

SEQ ID NO: 434353 - DNA, 137 bp, Homo sapiens
ggcaggtgaagacctggactccacagcccaacacccgcgacctgtctcttacccacagttgcgaagcgctggtgagtatgaggagcgcaagctgatccgagctgccatccgccgtgtacgggctcaggagattgagg

SEQ ID NO: 434354 - DNA, 3483 bp, Homo sapiens
tctggtatgccagaagacttagaagttattttgtttgcttgttttgtttgggtatttggggatttttaaaaaataatcaaagtggagaatccaggggacggttgctgagcgggcctgggacagcgggtcgcggcacctccggcctgcgcgtgtctaatccgtctgtcgggtcccgaaagagctaagccgagcctgcgccggacgggtgggctggactgagagaattctctgagctggtgacaggtgccacaggcactggggatctcaccagaaaggaaccgacggagctaggggccagcgagatggcggacgaggccttagctgggctggatgagggagcccttcggaagctgctggaggtcacagcagatctggcagagcggcggcgcatccgctcagccatccgggaactgcagcggcaggagctggagcgcgaggaggaggccctggcatccaagcgtttccgtgccgagcggcaggacaacaaggagaactggctgcactctcagcagcgggaagctgagcagcgggctgccctggcacggctggcagggcagctggagtccatgaacgatgtggaggaattgactgcactgttgcgaagcgctggtgagtatgaggagcgcaagctgatccgagctgccatccgccgtgtacgggctcaggagattgaggctgccaccttggctgggaggttgtacagcgggcgtcccaacagtggctcaagagaggacagcaaggggctagcggcacacaggctggaacagtgtgaggtgccagagcgagaggaacaggaacagcaggcagaggtttcaaagccaacccccacccctgaaggcaccagccaggatgtgaccacagtgacactcctgctgcgagccccacctgggagcacatccagctcacctgcctcacccagcagttcacccacccctgcctctcctgagcctccattggagcctgccgaggcccagtgccttacagctgaggttccaggcagcccagagccaccccccagcccacccaagaccaccagccctgagcctcaggagtctccaacgctccccagcactgagggccaggtggtcaacaagcttctgtctggccccaaagagacccctgctgcccagagccccaccagaggcccctctgacaccaagagagcagacgtggctggaccccgaccctgccaacgctccctgtcggtgctcagcccccgccaaccagcccagaaccgagagtccaccccccttgccagcggaccttcctcattccagcgggctggctctgtgcgggatcgtgtccacaagttcacatctgattctcctatggctgctaggctccaggatggcacaccccaggctgccctaagtcccctgacccccgcaaggctcctgggcccctccctcaccagcaccacccctgcctcctcctccagcggctcctcctctcggggccccagtgatacctcctcccggttcagcaaggagcaacgaggagtagcccagcccctggcccagcttcgaagctgcccccaggaggagggccccagggggcggggcttggctgctaggccccttgaaaacagagcaggggggcctgtggcacgttcagaggagcctggtgccccgctgcccgtggccgtcggcactgccgagccagggggcagtatgaagaccacattcaccatcgagatcaaggacggccgtggccaggcctccacaggccgggtgctgctgcccacaggcaaccagagggcagaactgacactggggctgcgggcgcccccgaccctactcagcaccagtagtgggggcaagagcaccatcacccgtgtcaacagccctgggaccctggctcggctgggcagtgtcactcatgtcaccagcttcagccatgccccccccagtagccgaggaggctgcagcatcaaggctgccgaggatgccgggacccccgtggcccacccacctgccttcagcacccgccgccgctcctccaccggcaccacccgcagcactagtctcatggaaccagagccagcagagcctctcgctgcagcagtggaagcggccaatggggctgagcagacccgagtgaacaaagcaccagaagggcggagccctctgagcgctgaggagctgatgactattgaggatgaaggagtcttggacaagatgctggatcagagcacggactttgaagagcggaagctcatccgggctgcacttcgtgagctccgacaaaggaagagagaccagcgggacaaggagcgggaacggcggctgcaggaggcacggggccggccaggggaggggcgcggcaacacagccactgagaccaccacgaggcacagccagcgggcagctgatggctctgctgtcagcactgttaccaagactgagcggctcgtccactccaatgatggcacacggacggcccgcaccaccacagtggagtcgagtttcgtgaggcgctcggagaatggcagtggcagcaccatgatgcaaaccaagaccttctcctcttcctcctcatccaagaagatgggcagcatcttcgaccgcgaggaccaggccagcccacgggccggcagcctggcggcgctcgagaaacggcaggccgagaagaagaaagagctgatgaaggcgcagagtctgcccaagacctcagcctcccaggcgcgcaaggccatgattgagaagctggagaaggagggcgcggccggcagccctggcggaccccgcgcagccgtgcagcgatccaccagcttcggggtccccaacgccaacagcatcaagcagatgctgctggactggtgtcgagccaagactcgcggctacgagcacgtcgacatccagaacttctcctccagctggagtgatgggatggccttctgtgccctggtgcacaacttcttccctgaggccttcgactatgggcagcttagccctcagaaccgacgccagaacttcgaggtggccttctcatctgcggagacccatgcggactgcccgcagctcctggatacagaggacatggtgcggcttcgagagcctgactggaagtgcgtgtacacgtacatccaggaattctaccgctgtctggtccagaaggggctggtaaaaaccaaaaagtcctaacccctgctcggggccccacggatgctggtggactgtgtgcccctggtggaggtggacgacatgatgatcatgggcaagaagcctgaccccaagtgtgtcttcacctatgtgcagtcgctctacaaccacctgcgacgccacgaactgcgcctgcgcggcaagaatgtctagcctgcccgcccgcatggccagccagtggcaagctgccgcccccactctccgggcaccgtctcctgcctgtgcgtccgcccaccgctgccctgtctgttgcgacaccctcccccccacatacacacgcagcgttttgataaattattggttttcaacgaaaaatgaaaaa

SEQ ID NO: 434355 - DNA, 5400 bp, Homo sapiens
gaggtggggggcaggcctggggccacacattagtcagtcaccatacattaactaagcatccacagtgtgccagaccagggcccctcaaattccagacagacattagttggggctacaggaggaaggagagatctgcgctgggaggctgggccaggatttaggggtccattttgatgggcagcactggggcaagatggggctcttgcctctgtcactgagagtgttccaggcccttgagggcactttggaagggagcttcggaagccggagatgacgaagattttgattacatccttctctgccctctaagtctttggcttcctccttgctcagtgacaaatccttggccctctccaatcttctcagtttgcctgaaatccaggggttgggcaggtcagcttctgaaagcccttccaggtggggaattgaattctgtatgaattggcaggaggtgctgggtgcctggacacctggcttcaggaggtctggacagcagagctggctccaagaatcggaagacacagtgtaccttcctatacctgggggaatgacagtggtggtggcagcaagaactacgggttcagcccacagccagaagctgagcctgcggagtgggtgggggctgggtaggccctgtggatgggtgggtggggcaggaaactggagactggagtgcaccccctggtggtaagcacagcttgggtgggtcttgccaggccctggcttctcaatccaggtccctgccctccctgttttgaggtttagacaggatgagagtccatcccaggccacacagcagactggcggccaagctggcagggctggaaccagagaccccctaccctgggtttggtgagttttccagcaaaccaccctagggcagagggcagcttccagccaggagccacattataggatgggacagtaatggacgctcctaggttagagagggaaagtaaggcacagagcctaagtgcctgtggtttctggaagccccagcatgcctgattcatgtctgtcccctgcagaaattctctgagctggtgacaggtgccacaggcactggggatctcaccagaaaggaaccgacggagctaggggccagcgagatggcggacgaggccttagctgggctggatgagggagcccttcggaagctgctggaggtcacagcagatctggcagagcggcggcgcatccgctcagccatccgggaactgcagcggcaggagctggagcgcgaggaggaggccctggcatccaagcgtttccgtgccgagcggcaggacaacaaggagaactggctgcactctcagcagcgggaagctgagcagcgggctgccctggcacggctggcagggcagctggagtccatgaacgatgtggaggaattgactgcactgttgcgaagcgctggtgagtatgaggagcgcaagctgatccgagctgccatccgccgtgtacgggctcaggagattgaggctgccaccttggctgggaggttgtacagcgggcgtcccaacagtggctcaagagaggacagcaaggggctagcggcacacaggctggaacagtgtgaggtgccagagcgagaggaacaggaacagcaggcagaggtttcaaagccaacccccacccctgaaggcaccagccaggatgtgaccacagtgacactcctgctgcgagccccacctgggagcacatccagctcacctgcctcacccagcagttcacccacccctgcctctcctgagcctccattggagcctgccgaggcccagtgccttacagctgaggttccaggcagcccagagccaccccccagcccacccaagaccaccagccctgagcctcaggagtctccaacgctccccagcactgagggccaggtggtcaacaagcttctgtctggccccaaagagacccctgctgcccagagccccaccagaggcccctctgacaccaagagagcagacgtggctggaccccgaccctgccaacgctccctgtcggtgctcagcccccgccaaccagcccagaaccgagagtccaccccccttgccagcggaccttcctcattccagcgggctggctctgtgcgggatcgtgtccacaagttcacatctgattctcctatggctgctaggctccaggatggcacaccccaggctgccctaagtcccctgacccccgcaaggctcctgggcccctccctcaccagcaccacccctgcctcctcctccagcggctcctcctctcggggccccagtgatacctcctcccggttcagcaaggagcaacgaggagtagcccagcccctggcccagcttcgaagctgcccccaggaggagggccccagggggcggggcttggctgctaggccccttgaaaacagagcaggggggcctgtggcacgttcagaggagcctggtgccccgctgcccgtggccgtcggcactgccgagccagggggcagtatgaagaccacattcaccatcgagatcaaggacggccgtggccaggcctccacaggccgggtgctgctgcccacaggcaaccagagggcagaactgacactggggctgcgggcgcccccgaccctactcagcaccagtagtgggggcaagagcaccatcacccgtgtcaacagccctgggaccctggctcggctgggcagtgtcactcatgtcaccagcttcagccatgccccccccagtagccgaggaggctgcagcatcaagatggaaccagagccagcagagcctctcgctgcagcagtggaagcggccaatggggctgagcagacccgagtgaacaaagcaccagaagggcggagccctctgagcgctgaggagctgatgactattgaggatgaaggagtcttggacaagatggtatagccagatccggtgggctgggggttggcagaggccagcaggcaccaggtaggcaatgatgggctctatatgcagctggatcagagcacggactttgaagagcggaagctcatccgggctgcacttcgtgagctccgacaaaggaagagaggtagagagccagttgccctaccctagatccagctgccccattccccagctgctcccctcatactctggggtccatttgtggacaccccagcttaataactgccctacccagcttctccttctctagacccagcagttcccttggctattccctgctggatccagctgctccttccctagctccttctctcccgctggtgaccccagttattctccccaaccagcttctcttctccttcctagacccagatactccctcccgcagctactctctccttggatccagttgcctctcaaagtactgtcaacgactccttccctgaatccagatactccttctccctgctgctcctctctccctgaagtccattgatggccatcttagcctctgccccatccagcttcccttttcctggacacaactacttcctcccccagatagttcttccctggacacatctattcattcccttagattctgggttcaattgcttctcctctcaaacactctcaattactcctctgaatctagctgcttctgccagggcccactgatggccaccccagtctctatctctacccacctacttctattttaagcccagttaacccccttcactagcttctctcccagctactcttcccctggatcagattgcttctcagatcccatcaattgctcccttcctggatctaaatattcctgcctccagctgctcttctcctccaaccaaagacctgctgatggcccacccagctacttcctcactcagcttctccttccttggactcagctaccccctcactagatctagatacccctcctgacttagctactcatgcctatagaaaccctttttggatccatacccctttgagtttagctactcgcgtattctctagtttctgcctgagtccatcaaacccttcccacactccattccctgtcaagttatggctgtcccctcaccccagctgctcctagagaggcccttgttacctgtgtcattcatgtttctaacaagccaccctccaccccgtcttgtgtgccccatgcacctgtgcatctgtgctgtgtgggtgttggtggcccttttgcgcatgcatggggcatcccctgcccagaaccagcgggacaaggagcgggaacggcggctgcaggaggcacggggccggccaggggaggggcgcggcaacacagccactgagaccaccacgaggcacagccagcgggcagctgatggctctgctgtcagcactgttaccaagactgagcggctcgtccactccaatgatggcacacggacggcccgcaccaccacagtggagtcgagtttcgtgaggcgctcggagaatggcagtggcagcaccatgatgcaaaccaagaccttctcctcttcctcctcatccaagaagatgggcagcatcttcgaccgcgaggaccaggccagcccacgggccggcagcctggcggcgctcgagaaacggcaggccgagaagaagaaagagctgatgaaggcgcagagtctgcccaagacctcagcctcccaggcgcgcaaggccatgattgagaagctggagaaggagggcgcggccggcagccctggcggaccccgcgcagccgtgcagcgatccaccagcttcggggtccccaacgccaacagcatcaagcagatgctgctggactggtgtcgagccaagactcgcggctacgagcacgtcgacatccagaacttctcctccagctggagtgatgggatggccttctgtgccctggtgcacaacttcttccctgaggccttcgactatgggcagcttagccctcagaaccgacgccagaacttcgaggtggccttctcatctgcggagacccatgcggactgcccgcagctcctggatacagaggacatggtgcggcttcgagagcctgactggaagtgcgtgtacacgtacatccaggaattctaccgctgtctggtccagaaggggctggtaaaaaccaaaaagtcctaacccctgctcggggccccacggatgctggtggactgtgtgcccctggtggaggtggacgacatgatgatcatgggcaagaagcctgaccccaagtgtgtcttcacctatgtgcagtcgctctacaaccacctgcgacgccacgaactgcgcctgcgcggcaagaatgtctagcctgcccgcccgcatggccagccagtggcaagctgccgcccccactctccgggcaccgtctcctgcctgtgcgtccgcccaccgctgccctgtctgttgcgacaccctcccccccacatacacacgcagcgttttgataaattattggttttcaacgaaaaatgaaaaa

SEQ ID NO: 434356 - DNA, 2889 bp, Homo sapiens
  misc_feature (47)..(47): n is a, c, g, or t
ttggatgaggaggaagaggagaagtcttggtttgcatcatggtcctnccactgccatctctcttcctttgtcggagctcacgaagtgcagcccggatgagcttccgctcttcaaagtccgtgctctgatccagcatcttgtccaagactcattcattcccaagcccaggatccactagccgggagctcagccgggaaagggatccccaagcgggccacccggctgcccagatggaaccagagccagcagagcctctcgctgcagcagtggaagcggccaatggggctgagcagacccgagtgaacaaagcaccagaagggcggagccctctgagcgctgaggagctgatgactattgaggatgaaggagtcttggacaagatggtatagccagatccggtgggctgggggttggcagaggccagcaggcaccaggtaggcaatgatgggctctatatgcagctggatcagagcacggactttgaagagcggaagctcatccgggctgcacttcgtgagctccgacaaaggaagagaggtagagagccagttgccctaccctagatccagctgccccattccccagctgctcccctcatactctggggtccatttgtggacaccccagcttaataactgccctacccagcttctccttctctagacccagcagttcccttggctattccctgctggatccagctgctccttccctagctccttctctcccgctggtgaccccagttattctccccaaccagcttctcttctccttcctagacccagatactccctcccgcagctactctctccttggatccagttgcctctcaaagtactgtcaacgactccttccctgaatccagatactccttctccctgctgctcctctctccctgaagtccattgatggccatcttagcctctgccccatccagcttcccttttcctggacacaactacttcctcccccagatagttcttccctggacacatctattcattcccttagattctgggttcaattgcttctcctctcaaacactctcaattactcctctgaatctagctgcttctgccagggcccactgatggccaccccagtctctatctctacccacctacttctattttaagcccagttaacccccttcactagcttctctcccagctactcttcccctggatcagattgcttctcagatcccatcaattgctcccttcctggatctaaatattcctgcctccagctgctcttctcctccaaccaaagacctgctgatggcccacccagctacttcctcactcagcttctccttccttggactcagctaccccctcactagatctagatacccctcctgacttagctactcatgcctatagaaaccctttttggatccatacccctttgagtttagctactcgcgtattctctagtttctgcctgagtccatcaaacccttcccacactccattccctgtcaagttatggctgtcccctcaccccagctgctcctagagaggcccttgttacctgtgtcattcatgtttctaacaagccaccctccaccccgtcttgtgtgccccatgcacctgtgcatctgtgctgtgtgggtgttggtggcccttttgcgcatgcatggggcatcccctgcccagaaccagcgggacaaggagcgggaacggcggctgcaggaggcacggggccggccaggggaggggcgcggcaacacagccactgagaccaccacgaggcacagccagcgggcagctgatggctctgctgtcagcactgttaccaagactgagcggctcgtccactccaatgatggcacacggacggcccgcaccaccacagtggagtcgagtttcgtgaggcgctcggagaatggcagtggcagcaccatgatgcaaaccaagaccttctcctcttcctcctcatccaagaagatgggcagcatcttcgaccgcgaggaccaggccagcccacgggccggcagcctggcggcgctcgagaaacggcaggccgagaagaagaaagagctgatgaaggcgcagagtctgcccaagacctcagcctcccaggcgcgcaaggccatgattgagaagctggagaaggagggcgcggccggcagccctggcggaccccgcgcagccgtgcagcgatccaccagcttcggggtccccaacgccaacagcatcaagcagatgctgctggactggtgtcgagccaagactcgcggctacgagcacgtcgacatccagaacttctcctccagctggagtgatgggatggccttctgtgccctggtgcacaacttcttccctgaggccttcgactatgggcagcttagccctcagaaccgacgccagaacttcgaggtggccttctcatctgcggagacccatgcggactgcccgcagctcctggatacagaggacatggtgcggcttcgagagcctgactggaagtgcgtgtacacgtacatccaggaattctaccgctgtctggtccagaaggggctggtaaaaaccaaaaagtcctaacccctgctcggggccccacggatgctggtggactgtgtgcccctggtggaggtggacgacatgatgatcatgggcaagaagcctgaccccaagtgtgtcttcacctatgtgcagtcgctctacaaccacctgcgacgccacgaactgcgcctgcgcggcaagaatgtctagcctgcccgcccgcatggccagccagtggcaagctgccgcccccactctccgggcaccgtctcctgcctgtgcgtccgcccaccgctgccctgtctgttgcgacaccctcccccccacatacacacgcagcgttttgataaattattggttttcaacgaaaaatgaaaaa

SEQ ID NO: 434357 - DNA, 3871 bp, Homo sapiens
tctggtatgccagaagacttagaagttattttgtttgcttgttttgtttgggtatttggggatttttaaaaaataatcaaagtggagaatccaggggacggttgctgagcgggcctgggacagcgggtcgcggcacctccggcctgcgcgtgtctaatccgtctgtcgggtcccgaaagagctaagccgagcctgcgccggacgggtgggctggactgagagaattctctgagctggtgacaggtgccacaggcactggggatctcaccagaaaggaaccgacggagctaggggccagcgagatggcggacgaggccttagctgggctggatgagggagcccttcggaagctgctggaggtcacagcagatctggcagagcggcggcgcatccgctcagccatccgggaactgcagcggcaggagctggagcgcgaggaggaggccctggcatccaagcgtttccgtgccgagcggcaggacaacaaggagaactggctgcactctcagcagcgggaagctgagcagcgggctgccctggcacggctggcagggcagctggagtccatgaacgatgtggaggaattgactgcactgttgcgaagcgctggtgagtatgaggagcgcaagctgatccgagctgccatccgccgtgtacgggctcaggagattgaggctgccaccttggctgggaggttgtacagcgggcgtcccaacagtggctcaagagaggacagcaaggggctagcggcacacaggctggaacagtgtgaggtgccagagcgagaggaacaggaacagcaggcagaggtttcaaagccaacccccacccctgaaggcaccagccaggatgtgaccacagtgacactcctgctgcgagccccacctgggagcacatccagctcacctgcctcacccagcagttcacccacccctgcctctcctgagcctccattggagcctgccgaggcccagtgccttacagctgaggttccaggcagcccagagccaccccccagcccacccaagaccaccagccctgagcctcaggagtctccaacgctccccagcactgagggccaggtggtcaacaagcttctgtctggccccaaagagacccctgctgcccagagccccaccagaggcccctctgacaccaagagagcagacgtggctggaccccgaccctgccaacgctccctgtcggtgctcagcccccgccaaccagcccagaaccgagagtccaccccccttgccagcggaccttcctcattccagcgggctggctctgtgcgggatcgtgtccacaagttcacatctgattctcctatggctgctaggctccaggatggcacaccccaggctgccctaagtcccctgacccccgcaaggctcctgggcccctccctcaccagcaccacccctgcctcctcctccagcggctcctcctctcggggccccagtgatacctcctcccggttcagcaaggagcaacgaggagtagcccagcccctggcccagcttcgaagctgcccccaggaggagggccccagggggcggggcttggctgctaggccccttgaaaacagagcaggggggcctgtggcacgttcagaggagcctggtgccccgctgcccgtggccgtcggcactgccgagccagggggcagtatgaagaccacattcaccatcgagatcaaggacggccgtggccaggcctccacaggccgggtgctgctgcccacaggcaaccagagggcagaactgacactggggctgcgggcgcccccgaccctactcagcaccagtagtgggggcaagagcaccatcacccgtgtcaacagccctgggaccctggctcggctgggcagtgtcactcatgtcaccagcttcagccatgccccccccagtagccgaggaggctgcagcatcaagatggaaccagagccagcagagcctctcgctgcagcagtggaagcggccaatggggctgagcagacccgagtgaacaaagcaccagaagggcggagccctctgagcgctgaggagctgatgactattgaggatgaaggagtcttggacaagatggtatagccagatccggtgggctgggggttggcagaggccagcaggcaccaggtaggcaatgatgggctctatatgcagctggatcagagcacggactttgaagagcggaagctcatccgggctgcacttcgtgagctccgacaaaggaagagaggtagagagccagttgccctaccctagatccagctgccccattccccagctgctcccctcatactctggggtccatttgtggacaccccagcttaataactgccctacccagcttctccttctctagacccagcagttcccttggctattccctgctggatccagctgctccttccctagctccttctctcccgctggtgaccccagttattctccccaaccagcttctcttctccttcctagacccagatactccctcccgcagctactctctccttggatccagttgcctctcaaagtactgtcaacgactccttccctgaatccagatactccttctccctgctgctcctctctccctgaagtccattgatggccatcttagcctctgccccatccagcttcccttttcctggacacaactacttcctcccccagatagttcttccctggacacatctattcattcccttagattctgggttcaattgcttctcctctcaaacactctcaattactcctctgaatctagctgcttctgccagggcccactgatggccaccccagtctctatctctacccacctacttctattttaagcccagttaacccccttcactagcttctctcccagctactcttcccctggatcagattgcttctcagatcccatcaattgctcccttcctggatctaaatattcctgcctccagctgctcttctcctccaaccaaagacctgctgatggcccacccagctacttcctcactcagcttctccttccttggactcagctaccccctcactagatctagatacccctcctgacttagctactcatgcctatagaaaccctttttggatccatacccctttgagtttagctactcgcgtattctctagtttctgcctgagtccatcaaacccttcccacactccattccctgtcaagttatggctgtcccctcaccccagctgctcctagagaggcccttgttacctgtgtcattcatgtttctaacaagccaccctccaccccgtcttgtgtgccccatgcacctgtgcatctgtgctgtgtgggtgttggtggcccttttgcgcatgcatggggcatcccctgcccagaaccagcgggacaaggagcgggaacggcggctgcaggaggcacggggccggccaggggaggggcgcggcaacacagccactgagaccaccacgaggcacagccagcgggcagctgatggctctgctgtcagcactgttaccaagactgagcggctcgtccactccaatgatggcacacggacggcccgcaccaccacagtggagtcgagtttcgtgaggcgctcggagaatgatcatgggcaagaagcctgaccccaagtgtgtcttcacctatgtgcagtcgctctacaaccacctgcgacgccacgaactgcgcctgcgcggcaagaatgtctagcctgcccgcccgcatggccagccagtggcaagctgccgcccccactctccgggcaccgtctcctgcctgtgcgtccgcccaccgctgccctgtctgttgcgacaccctcccccccacatacacacgcagcgttttgataaattattggttttcaacgaaaaatgaaaaa

SEQ ID NO: 434358 - DNA, 1012 bp, Homo sapiens
tctggtatgccagaagacttagaagttattttgtttgcttgttttgtttgggtatttggggatttttaaaaaataatcaaagtggagaatccaggggacggttgctgagcgggcctgggacagcgggtcgcggcacctccggcctgcgcgtgtctaatccgtctgtcgggtcccgaaagagctaagccgagcctgcgccggacgggtgggctggactgagagaattctctgagctggtgacaggtgccacaggcactggggatctcaccagaaaggaaccgacggagctaggggccagcgagatggcggacgaggccttagctgggctggatgagggagcccttcggaagctgctggaggtcacagcagatctggcagagcggcggcgcatccgctcagccatccgggaactgcagcggcaggagctggagcgcgaggaggaggccctggcatccaagcgtttccgtgccgagcggcaggacaacaaggagaactggctgcactctcagcagcgggaagctgagcagcgggctgccctggcacggctggcagggcagctggagtccatgaacgatgtggaggaattgactgcactgttgcgaagcgctggtgagtatgaggagcgcaagctgatccgagctgccatccgccgtgtacgggctcaggagattgaggctgccaccttggctgggaggttgtacagcgggcgtcccaacagtggctcaagagaggacagcaaggggctagcggcacacaggctggaacagtgtgaggtgccagagcgagaggaacaggaacagcaggcagaggtttcaaagccaacccccacccctgaaggcaccagccaggatgtgaccacagtgacactcctgctgcgagccccacctgggagcacatccagctcacctgccattaaaggagctgttcagctcctttaatggcagtggcatgaacatggctcactgaaacctctgccttctgagctcaagtgattctcctgccattaaaggag

SEQ ID NO: 434359 - DNA, 1426 bp, Homo sapiens
cgttgcgcctgcgcgcggtgcggccgtcgcccctcttttcgcggcgttctccacctgcgcgggcctgaatggccttcaggagcacagtcggcctgaggagttgacggttactcaccgccgtgagcccaagtaactcgccctccttcggctagaaaccctccgcctgggcccgcgcgacaggagcgcggtctctgaggggagcggcgaccccgccagccccggtctctttccctggcggcggcggcttcttccgtgggacaatatgttcaagagaatggccgaatttgggcctgactccggcgggagagtaaagggtgttactatcgttaaaccaatagtttacggtaatgttgctcggtattttggaaagaaaagagaagaagatgggcacactcatcagtggacagtatatgtgaaaccatatagaaatgaggatatgtcagcatatgtgaagaaaatccagtttaaattacatgaaagctatggcaatcctttaagagttgttactaaacctccatatgaaattactgaaacaggatggggtgaattcgaaataatcatcaaaatatttttcattgaccctaatgaaagacctgtaaccctgtatcatttgctaaagctgtttcaatcagacaccaatgcaatgctggggaaaaagacagtggtttcagagttctatgatgaaatgatatttcaagacccaacagcaatgatgcaacaattattgacaacatctcgtcagctaacattaggagcctataagcatgaaacagaatttgcagagcttgaagtgaaaaccagagaaaaattagaagctgctaagaaaaaaacaagctttgagattgcagagcttaaggagagattaaaagcaagtcgtgaaactataaattgtttaaaaaatgaaatcagaaaacttgaagaagatgaccaagcaaaagacatataaacagttctcatgagaacttggtagtaagctaaactgaaaataaggtgggcttcactggagaaatggacttactgcaaatgctgtgatgtttcttagaggaacttcatatacagctgttgaccatgaatttcttagcaataggaatttgtactatttaagcaatctttaatggaaaatatgtgtgtaagaatggatgctatataggtattttaccaacccattttaagaaaattctatgatattaagcacagtttttaaaaatgtttattgtagtatatgtatagcttattacccttttgacaggcatcaaaatttcattataaagtattacttgtacaaattttgtacttctttagtggctagaattagtgaagaaacttaatgtgtatatttaatttcttcaagttcttacctgcccccatccttttttgtatatgatgtgtccagtaagtattcaataaatgtagtttacagatccta

SEQ ID NO: 434360 - DNA, 1381 bp, Homo sapiens
gcggtgcgcgcgcctcttcgcggtccactgccgctgatgctcaagaccgtcggctgggagttgaggtcaccgccgtgagcccaagtaactcgccctccttcggctagaaaccctccgcctgggcccgcgcgacaggagcgcggtctctgaggggagcggcgaccccgccagccccggtctctttccctggcggcggcggcttcttccgtgggacaatatgttcaagagaatggccgaatttgggcctgactccggcgggagagtaaagggtgttactatcgttaaaccaatagtttacggtaatgttgctcggtattttggaaagaaaagagaagaagatgggcacactcatcagtggacagtatatgtgaaaccatatagaaatgaggatatgtcagcatatgtgaagaaaatccagtttaaattacatgaaagctatggcaatcctttaagagttgttactaaacctccatatgaaattactgaaacaggatggggtgaattcgaaataatcatcaaaatatttttcattgaccctaatgaaagacctgtaaccctgtatcatttgctaaagctgtttcaatcagacaccaatgcaatgctggggaaaaagacagtggtttcagagttctatgatgaaatgatatttcaagacccaacagcaatgatgcaacaattattgacaacatctcgtcagctaacattaggagcctataagcatgaaacagaatttgcagagcttgaagtgaaaaccagagaaaaattagaagctgctaagaaaaaaacaagctttgagattgcagagcttaaggagagattaaaagcaagtcgtgaaactataaattgtttaaaaaatgaaatcagaaaacttgaagaagatgaccaagcaaaagacatataaacagttctcatgagaacttggtagtaagctaaactgaaaataaggtgggcttcactggagaaatggacttactgcaaatgctgtgatgtttcttagaggaacttcatatacagctgttgaccatgaatttcttagcaataggaatttgtactatttaagcaatctttaatggaaaatatgtgtgtaagaatggatgctatataggtattttaccaacccattttaagaaaattctatgatattaagcacagtttttaaaaatgtttattgtagtatatgtatagcttattacccttttgacaggcatcaaaatttcattataaagtattacttgtacaaattttgtacttctttagtggctagaattagtgaagaaacttaatgtgtatatttaatttcttcaagttcttacctgcccccatccttttttgtatatgatgtgtccagtaagtattcaataaatgtagtttacagatccta

SEQ ID NO: 434361 - DNA, 1735 bp, Homo sapiens
cgttgcgcctgcgcgcggtgcggccgtcgcccctcttttcgcggcgttctccacctgcgcgggcctgaatggccttcaggagcacagtcggcctgaggagttgacggttactcaccgccgtgagcccaagtaactcgccctccttcggctagaaaccctccgcctgggcccgcgcgacaggagcgcggtctctgaggggagcggcgaccccgccagccccggtctctttccctggcggcggcggcttcttccgtgggacaatatgttcaagagaatggccgaatttgggcctgactccggcgggagagtaaagggtgttactatcgttaaaccaatagtttacggtaatgttgctcggtattttggaaagaaaagagaagaagatgggcacactcatcagtggacagtatatgtgaaaccatatagaaatgaggatatgtcagcatatgtgaagaaaatccagtttaaattacatgaaagctatggcaatcctttaagagttgttactaaacctccatatgaaattactgaaacaggatggggtgaattcgaaataatcatcaaaatatttttcattgaccctaatgaaagacctgtaaccctgtatcatttgctaaagctgtttcaatcagacaccaatgcaatgctggggaaaaagacagtggtttcagagttctatgatgaaatgatatttcaagacccaacagcaatgatgcaacaattattgacaacatctcgtcagctaacattaggagcctataagcatgaaacagaatttgcagagcttgaagtgaaaaccagagaaaaattagaagctgctaagaaaaaaacaagctttgagattgcagagcttaaggagagattaaaagcaagtcgtgaaactataaattgtttaaaaaatgaaatcagaaaacttgaagaagatgaccaagcaaaagacatataaacagttctcatgagaacttggtagtaagctaaactgaaaataaggtgggcttcactggagaaatggacttactgcaaatgctgtgatgtttcttagaggaacttcatatacagctgttgaccatgaatttcttagcaataggaatttgtactatttaagcaatctttaatggaaaatatgtgtgtaagaatggatgctatataggtattttaccaacccattttaagaaaattctatgatattaagcacagtttttaaaaatgtttattgtagtatatgtatagcttattacccttttgacaggcatcaaaatttcattataaagtattacttgtacaaattttgtacttctttagtggctagaattagtgaagaaacttaatgtgtatatttaatttcttcaagttcttacctgcccccatccttttttgtatatgatgtgtccagtaagtattcaataaatgtagtttacagatcctaaaaaaaaaacaaaaaaaaagacacaacaaaaaaaacgagaaacaaaaacagggggggcacgcctcaaaaagaacaccccaagagggccacacaaagtacggcgcgaacaccacgcacttgctggtgcacaacggtgtggccccccatataaagagaccgtatatcaaaaacagagcgcgacaggggcggcggcgtaaaacaaacgcgcggacgacatcggggaaacacgagcgacagcaggcagactggtggaaagggaccacaaaaatgcgtgggcgagggaacacacacgggagcgcgaaatgacca

SEQ ID NO: 434362 - DNA, 1549 bp, Homo sapiens
cgttgcgcctgcgcgcggtgcggccgtcgcccctcttttcgcggcgttctccacctgcgcgggcctgaatggccttcaggagcacagtcggcctgaggagttgacggttactcaccgccgtgagcccaagtaactcgccctccttcggctagaaaccctccgcctgggcccgcgcgacaggagcgcggtctctgaggggagcggcgaccccgccagccccggtctctttccctggcggcggcggcttcttccgtgggacaatatgttcaagagaatggccgaatttgggcctgactccggcgggagagtaaagggtgttactatcgttaaaccaatagtttacggtaatgttgctcggtattttggaaagaaaagagaagaagatgggcacactcatcagtggacagtatatgtgaaaccatatagaaatgaggcaaaatggctcattcctgtaatctcagcactatgggaggcccaagcgggaggatcgcttgagcccaggagtttgagaccagactggcaacatagtaagactccatctctacagaaaaaaaaggatatgtcagcatatgtgaagaaaatccagtttaaattacatgaaagctatggcaatcctttaagagttgttactaaacctccatatgaaattactgaaacaggatggggtgaattcgaaataatcatcaaaatatttttcattgaccctaatgaaagacctgtaaccctgtatcatttgctaaagctgtttcaatcagacaccaatgcaatgctggggaaaaagacagtggtttcagagttctatgatgaaatgatatttcaagacccaacagcaatgatgcaacaattattgacaacatctcgtcagctaacattaggagcctataagcatgaaacagaatttgcagagcttgaagtgaaaaccagagaaaaattagaagctgctaagaaaaaaacaagctttgagattgcagagcttaaggagagattaaaagcaagtcgtgaaactataaattgtttaaaaaatgaaatcagaaaacttgaagaagatgaccaagcaaaagacatataaacagttctcatgagaacttggtagtaagctaaactgaaaataaggtgggcttcactggagaaatggacttactgcaaatgctgtgatgtttcttagaggaacttcatatacagctgttgaccatgaatttcttagcaataggaatttgtactatttaagcaatctttaatggaaaatatgtgtgtaagaatggatgctatataggtattttaccaacccattttaagaaaattctatgatattaagcacagtttttaaaaatgtttattgtagtatatgtatagcttattacccttttgacaggcatcaaaatttcattataaagtattacttgtacaaattttgtacttctttagtggctagaattagtgaagaaacttaatgtgtatatttaatttcttcaagttcttacctgcccccatccttttttgtatatgatgtgtccagtaagtattcaataaatgtagtttacagatccta

SEQ ID NO: 434363 - DNA, 1542 bp, Homo sapiens
cgttgcgcctgcgcgcggtgcggccgtcgcccctcttttcgcggcgttctccacctgcgcgggcctgaatggccttcaggagcacagtcggcctgaggagttgacggttactcaccgccgtgagcccaagtaactcgccctccttcggctagaaaccctccgcctgggcccgcgcgacaggagcgcggtctctgaggggagcggcgaccccgccagccccggtctctttccctggcggcggcggcttcttccgtgggacaatatgttcaagagaatggccgaatttgggcctgactccggcgggagagtaaagctggagtgcactagcgcaatctcggctctccgcaacctccacctcctggattcaagcgattctcctgcctccacgcgattctcctgcctcagcctcctgaatagctggaattacagggtgttactatcgttaaaccaatagtttacggtaatgttgctcggtattttggaaagaaaagagaagaagatgggcacactcatcagtggacagtatatgtgaaaccatatagaaatgaggatatgtcagcatatgtgaagaaaatccagtttaaattacatgaaagctatggcaatcctttaagagttgttactaaacctccatatgaaattactgaaacaggatggggtgaattcgaaataatcatcaaaatatttttcattgaccctaatgaaagacctgtaaccctgtatcatttgctaaagctgtttcaatcagacaccaatgcaatgctggggaaaaagacagtggtttcagagttctatgatgaaatgatatttcaagacccaacagcaatgatgcaacaattattgacaacatctcgtcagctaacattaggagcctataagcatgaaacagaatttgcagagcttgaagtgaaaaccagagaaaaattagaagctgctaagaaaaaaacaagctttgagattgcagagcttaaggagagattaaaagcaagtcgtgaaactataaattgtttaaaaaatgaaatcagaaaacttgaagaagatgaccaagcaaaagacatataaacagttctcatgagaacttggtagtaagctaaactgaaaataaggtgggcttcactggagaaatggacttactgcaaatgctgtgatgtttcttagaggaacttcatatacagctgttgaccatgaatttcttagcaataggaatttgtactatttaagcaatctttaatggaaaatatgtgtgtaagaatggatgctatataggtattttaccaacccattttaagaaaattctatgatattaagcacagtttttaaaaatgtttattgtagtatatgtatagcttattacccttttgacaggcatcaaaatttcattataaagtattacttgtacaaattttgtacttctttagtggctagaattagtgaagaaacttaatgtgtatatttaatttcttcaagttcttacctgcccccatccttttttgtatatgatgtgtccagtaagtattcaataaatgtagtttacagatccta

SEQ ID NO: 434364 - DNA, 1264 bp, Homo sapiens
cgttgcgcctgcgcgcggtgcggccgtcgcccctcttttcgcggcgttctccacctgcgcgggcctgaatggccttcaggagcacagtcggcctgaggagttgacggttactcaccgccgtgagcccaagtaactcgccctccttcggctagaaaccctccgcctgggcccgcgcgacaggagcgcggtctctgaggggagcggcgaccccgccagccccggtctctttccctggcggcggcggcttcttccgtgggacaatatgttcaagagaatggccgaatttgggcctgactccggcgggagagtaaagggtgttactatcgttaaaccaatagtttacggtaatgttgctcggtattttggaaagaaaagagaagaagatgggcacactcatcagtggacagtatatgtgaaaccatatagaaatgaggtaaccctgtatcatttgctaaagctgtttcaatcagacaccaatgcaatgctggggaaaaagacagtggtttcagagttctatgatgaaatgatatttcaagacccaacagcaatgatgcaacaattattgacaacatctcgtcagctaacattaggagcctataagcatgaaacagaatttgcagagcttgaagtgaaaaccagagaaaaattagaagctgctaagaaaaaaacaagctttgagattgcagagcttaaggagagattaaaagcaagtcgtgaaactataaattgtttaaaaaatgaaatcagaaaacttgaagaagatgaccaagcaaaagacatataaacagttctcatgagaacttggtagtaagctaaactgaaaataaggtgggcttcactggagaaatggacttactgcaaatgctgtgatgtttcttagaggaacttcatatacagctgttgaccatgaatttcttagcaataggaatttgtactatttaagcaatctttaatggaaaatatgtgtgtaagaatggatgctatataggtattttaccaacccattttaagaaaattctatgatattaagcacagtttttaaaaatgtttattgtagtatatgtatagcttattacccttttgacaggcatcaaaatttcattataaagtattacttgtacaaattttgtacttctttagtggctagaattagtgaagaaacttaatgtgtatatttaatttcttcaagttcttacctgcccccatccttttttgtatatgatgtgtccagtaagtattcaataaatgtagtttacagatccta

SEQ ID NO: 434365 - DNA, 542 bp, Homo sapiens
tgagaacttggtagtaagctaaactgaaaataaggtgggcttcactggagaaatggacttactgcaaatgctgtgatgtttcttagaggaacttcatatacagctgttgaccatgaatttcttagcaataggaatttgtactatttaagcaatctttaatggaaaatatgtgtgtaagaatggatgctatataggtattttaccaacccattttaagaaaattctatgatattaagcacagtttttaaaaatgtttattgtagtatatgtatagcttattacccttttgacaggcatcaaaatttcattataaagtattacttgtacaaattttgtacttctttagtggctagaattagtgaagaaacttaatgtgtatatttaatttcttcaagttcttacctgcccccatccttttttgtatatgatgtgtccagtaagtattcaataaatgtagtttacagatcctatttctccctcctgatgtgtttcttcctctttgaagactttctggaactccctcaatacagttaaagtatctt

SEQ ID NO: 434366 - DNA, 2900 bp, Homo sapiens
acgcgcgttgggggtcaggtgccggaagaggaaacctctcgctggggctaggagttcggcggggcgcgcgccggcggctgcggagctggcaggtgcgaagcgtctgcacctggcgggcgatggcgcccgatgcgggcgccccgggatagcgtgggcgaggctgcggggccccggcgcgcacgcccgcacctctccccagccctggcgtgggcccagcccggcccaggcagcaatggggttcctgcagctgctggtcgtagcggtgctggcatccgaacaccgggtggctggtgcagccgaggtcttcgggaattccagcgagggtcttattgaattttctgtggggaaatttagatacttcgagctcaataggccctttccagaggaagctattttgcatgatatttcaagcaatgtgacttttcttattttccaaatacactcacagtatcagaatacaactgtttccttttctccgactctcctttccaattcctcggaaacaggcactgccagtggactggttttcatccttagaccagagcagagtacatgcacttggtacttggggacttcaggcatacagcctgtccagaatatggctatcctactctcctactcagaaagagatcctgtccctggaggctgtaatttggagttcgatttagatattgatcccaacatttacttggagtataatttctttgaaacgactatcaagtttgccccagcaaacctaggctatgcgagaggcgtagatcccccaccatgtgacgctgggacagaccaggactccaggtggaggttgcagtatgatgtctatcagtattttctgcctgagaatgacctcactgaggagatgttgctgaagcatctgcagaggatggtcagtgtgccccaggtgaaggccagtgctctcaaggtggttaccctaacagctaatgataagacaagtgtttccttctcctccctcccgggacaaggtgtcatatacaatgtcattgtttgggacccgtttctaaatacatctgctgcctacattcctgctcacacatacgcttgcagctttgaggcaggagagggtagttgtgcttccctaggaagagtgtcttccaaagtgttcttcactctttttgccctgcttggtttcttcatttgtttctttggacacagattctggaaaacagaattattcttcataggctttatcatcatgggattcttcttttatatactgattacaagactgacacctatcaagtatgatgtgaatctgattctgacagctgtcactggaagcgtcggtggaatgttcttggtagctgtgtggtggcgatttggaatcctctcgatctgcatgctctgtgttggactagtgctggggttcctcatctcgtcagtgactttctttactccactgggaaacctaaagatttttcatgatgatggtgtattctgggtcactttctcttgcatagctatcctcattccagtagttttcatgggctgcctaagaatactgaacatactgacttgtggagtcattggctcctattcggtggttttagccattgacagttactggtccacaagcctttcctacatcactttgaacgtactcaagagagcgctcaacaaggatttccacagagctttcacaaatgtgccttttcaaactaatgacttcattatcctggcagtatggggcatgctggctgtaagtggaattacgttacagattcgaagagagagaggacgaccgttcttccctccccacccatacaagttatggaagcaagagagagagcgccgagtgacaaacattctggaccctagctaccacattcctccattgagagagaggctctatggccgattaacccagattaaagggctcttccagaaggagcagccagctggagagagaacgcctttgcttctgtagatgcccaggggcttggtcagtgtgcctcagctttggagttcatgcctggagtggttcaacagtctctggtgcaagtctaataagagatcaggcatatatatctgttctttgcataatattatggtgcccttattgatatatggtaagggtgtactaggggattaggatgattgtaagagaatgagaaagatgaccaaaaggttggtggtagggaggctttttcttatttccaaatacttgagaaattaccttttggtttacaaatctatgatcaacttattccattaaatagatacattaaaaaaattaaaaactgattcttctgcagagcactggtgtttctttttataaccccttgaaacaagtctctcacctgagcctgtctaaactttcggagggagtttattattgagtctttatctgtgacagtatttggagatttagggatttgatacttaggcctttgaattttagaatacaaaaagagaagcaagccagacatggtggctcacacctgtaatcccaatactgggaagccaaggtgggagtatcgcttgagcccaggagtttgagaccgacatgggcaacatgacaagaccccatctctacaaaaaaattaaaaaattagccaggcatggtggcacatgcctactcccagctcccaaggagactgagatgggaggatccctggagccctgaagattgaggctacagtgagccttgattgtgtcactgcactccagcttgggtgacagagaccctgtctcgagaaattaaaaaaaaaaaaaacttattttcttactaaaagcagtctgattacttagttgcatgcccttcttagtatcatacattatccaaaagttacccttggtttttttttcagtattttttaaaatttttaagttgtgataaaatacacatgaaatttaccttcttattcatgtttaagtgtaca

SEQ ID NO: 434367 - DNA, 1144 bp, Homo sapiens
  misc_feature (8)..(8): n is a, c, g, or t
gcgagtantgggatatgtcgaccaggcgtcttatggaagcaagagagagagcgccgagtgacaaacattctggaccctagctaccacattcctccattgagagagaggctctatggccgattaacccagattaaagggctcttccagaaggagcagccagctggagagagaacgcctttgcttctgtagatgcccaggggcttggtcagtgtgcctcagctttggagttcatgcctggagtggttcaacagtctctggtgcaagtctaataagagatcaggcatatatatctgttctttgcataatattatggtgcccttattgatatatggtaagggtgtactaggggattaggatgattgtaagagaatgagaaagatgaccaaaaggttggtggtagggaggctttttcttatttccaaatacttgagaaattaccttttggtttacaaatctatgatcaacttattccattaaatagatacattaaaaaaattaaaaactgattcttctgcagagcactggtgtttctttttataaccccttgaaacaagtctctcacctgagcctgtctaaactttcggagggagtttattattgagtctttatctgtgacagtatttggagatttagggatttgatacttaggcctttgaattttagaatacaaaaagagaagcaagccagacatggtggctcacacctgtaatcccaatactgggaagccaaggtgggagtatcgcttgagcccaggagtttgagaccgacatgggcaacatgacaagaccccatctctacaaaaaaattaaaaaattagccaggcatggtggcacatgcctactcccagctcccaaggagactgagatgggaggatccctggagccctgaagattgaggctacagtgagccttgattgtgtcactgcactccagcttgggtgacagagaccctgtctcgagaaattaaaaaaaaaaaaaacttattttcttactaaaagcagtctgattacttagttgcatgcccttcttagtatcatacattatccaaaagttacccttggtttttttttcagtattttttaaaatttttaagttgtgataaaatacacatgaaatttaccttcttattcatgtttaagtgtaca

SEQ ID NO: 434368 - DNA, 970 bp, Homo sapiens
  misc_feature (89)..(89): n is a, c, g, or t
  misc_feature (94)..(94): n is a, c, g, or t
gaagcaagagagagagcgccgagtgacaaacattctggaccctagctaccataactgtatgggtggggagggaagaacggtcgtcctcnctctnttcgaatctgtaacgtaattccacttacagttatggaagcaagagagagagcgccgagtgacaaacattctggaccctagctaccacattcctccattgagagagaggctctatggccgattaacccagattaaagggctcttccagaaggagcagccagctggagagagaacgcctttgcttctgtagatgcccaggggcttggtcagtgtgcctcagctttggagttcatgcctggagtggttcaacagtctctggtgcaagtctaataagagatcaggcatatatatctgttctttgcataatattatggtgcccttattgatatatggtaagggtgtactaggggattaggatgattgtaagagaatgagaaagatgaccaaaaggttggtggtagggaggctttttcttatttccaaatacttgagaaattaccttttggtttacaaatctatgatcaacttattccattaaatagatacattaaaaaaattaaaaactgaaaaaaaaaaaaaaaaaaaaaaaaaaaaaaaaaaaaaaaaaaaaaaaaggggggggggggccctaaaaattacccccccgagagggggagcccaccaattttaagcacgactaccaccctagttttttttgtgtaccaagagggcgccccccccaaagaggaggacagcgcatataatataaaacggagaggcaaggggcgcgccggttttaaaacaacgcgcgggcaggagggggaaaaacggggccacgcggagaacaaccttgcggaaaaagaaccgccccactgcgggggggggacacatgggcggacaaactcccccacgagatatattagcccgagagaaaaacaacactgacggctaaagggga

SEQ ID NO: 434369 - DNA, 569 bp, Homo sapiens
gattcttcctctaattagattttattgttgaagttccttcatatggaagatattttccatagtatttggataagctgaactgtgttttaagaactcatatggatgttgaaggttgttttcagtttatctttccagggaacttctgttcagctctgagtgggtctggtcctttttcatgcctgagggagcagatgtgattgcctgtgattgaagccagtggagagttataaactatttttgttctaacatggatgatgcctaaactcttccactcttccacactgaacatactgacttgtggagtcattggctcctattcggtggttttagccattgacagttactggtccacaagcctttcctacatcactttgaacgtactcaagagagcgctcaacaaggatttccacagagctttcacaaatgtgccttttcaaactaatggtaagactcttaaatccaaaaaccagtgtgacagcacagtaggagtcttgacccacctatgctaaccagagcacttggaaactaaatttaaagaaagtcaactgggacaaaaggagggaacacag

SEQ ID NO: 434370 - DNA, 2813 bp, Homo sapiens
acgcgcgttgggggtcaggtgccggaagaggaaacctctcgctggggctaggagttcggcggggcgcgcgccggcggctgcggagctggcaggtgcgaagcgtctgcacctggcgggcgatggcgcccgatgcgggcgccccgggatagcgtgggcgaggctgcggggccccggcgcgcacgcccgcacctctccccagccctggcgtgggcccagcccggcccaggcagcaatggggttcctgcagctgctggtcgtagcggtgctggcatccgaacaccgggtggctggtgcagccgaggtcttcgggaattccagcgagggtcttattgaattttctgtggggaaatttagatacttcgagctcaataggccctttccagaggaagctattttgcatgatatttcaagcaatgtgacttttcttattttccaaatacactcacagtatcagaatacaactgtttccttttctccgactctcctttccaattcctcggaaacaggcactgccagtggactggttttcatccttagaccagagcagagtacatgcacttggtacttggggacttcaggcatacagcctgtccagaatatggctatcctactctcctactcagaaagagatcctgtccctggaggctgtaatttggagttcgatttagatattgatcccaacatttacttggagtataatttctttgaaacgactatcaagtttgccccagcaaacctaggctatgcgagaggcgtagatcccccaccatgtgacgctgggacagaccaggactccaggtggaggttgcagtatgatgtctatcagtattttctgcctgagaatgacctcactgaggagatgttgctgaagcatctgcagaggatggtcagtgtgccccaggtgaaggccagtgctctcaaggtggttaccctaacagctaatgataagacaagtgtttccttctcctccctcccgggacaaggtgtcatatacaatgtcattgtttgggacccgtttctaaatacatctgctgcctacattcctgctcacacatacgcttgcagctttgaggcaggagagggtagttgtgcttccctagaattattcttcataggctttatcatcatgggattcttcttttatatactgattacaagactgacacctatcaagtatgatgtgaatctgattctgacagctgtcactggaagcgtcggtggaatgttcttggtagctgtgtggtggcgatttggaatcctctcgatctgcatgctctgtgttggactagtgctggggttcctcatctcgtcagtgactttctttactccactgggaaacctaaagatttttcatgatgatggtgtattctgggtcactttctcttgcatagctatcctcattccagtagttttcatgggctgcctaagaatactgaacatactgacttgtggagtcattggctcctattcggtggttttagccattgacagttactggtccacaagcctttcctacatcactttgaacgtactcaagagagcgctcaacaaggatttccacagagctttcacaaatgtgccttttcaaactaatgacttcattatcctggcagtatggggcatgctggctgtaagtggaattacgttacagattcgaagagagagaggacgaccgttcttccctccccacccatacaagttatggaagcaagagagagagcgccgagtgacaaacattctggaccctagctaccacattcctccattgagagagaggctctatggccgattaacccagattaaagggctcttccagaaggagcagccagctggagagagaacgcctttgcttctgtagatgcccaggggcttggtcagtgtgcctcagctttggagttcatgcctggagtggttcaacagtctctggtgcaagtctaataagagatcaggcatatatatctgttctttgcataatattatggtgcccttattgatatatggtaagggtgtactaggggattaggatgattgtaagagaatgagaaagatgaccaaaaggttggtggtagggaggctttttcttatttccaaatacttgagaaattaccttttggtttacaaatctatgatcaacttattccattaaatagatacattaaaaaaattaaaaactgattcttctgcagagcactggtgtttctttttataaccccttgaaacaagtctctcacctgagcctgtctaaactttcggagggagtttattattgagtctttatctgtgacagtatttggagatttagggatttgatacttaggcctttgaattttagaatacaaaaagagaagcaagccagacatggtggctcacacctgtaatcccaatactgggaagccaaggtgggagtatcgcttgagcccaggagtttgagaccgacatgggcaacatgacaagaccccatctctacaaaaaaattaaaaaattagccaggcatggtggcacatgcctactcccagctcccaaggagactgagatgggaggatccctggagccctgaagattgaggctacagtgagccttgattgtgtcactgcactccagcttgggtgacagagaccctgtctcgagaaattaaaaaaaaaaaaaacttattttcttactaaaagcagtctgattacttagttgcatgcccttcttagtatcatacattatccaaaagttacccttggtttttttttcagtattttttaaaatttttaagttgtgataaaatacacatgaaatttaccttcttattcatgtttaagtgtaca

SEQ ID NO: 434371 - DNA, 2852 bp, Homo sapiens
acgcgcgttgggggtcaggtgccggaagaggaaacctctcgctggggctaggagttcggcggggcgcgcgccggcggctgcggagctggcaggtgcgaagcgtctgcacctggcgggcgatggcgcccgatgcgggcgccccgggatagcgtgggcgaggctgcggggccccggcgcgcacgcccgcacctctccccagccctggcgtgggcccagcccggcccaggcagcaatggggttcctgcagctgctggtcgtagcggtgctggcatccgaacaccgggtggctggtgcagccgaggtcttcgggaattccagcgagggtcttattgaattttctgtggggaaatttagatacttcgagctcaataggccctttccagaggaagctattttgcatgatatttcaagcaatgtgacttttcttattttccaaatacactcacagtatcagaatacaactgtttccttttctccgactctcctttccaattcctcggaaacaggcactgccagtggactggttttcatccttagaccagagcagagtacatgcacttggtacttggggacttcaggcatacagcctgtccagaatatggctatcctactctcctactcagaaagagatcctgtccctggaggctgtaatttggagttcgatttagatattgatcccaacatttacttggagtataatttctttgaaacgactatcaagtttgccccagcaaacctaggctatgcgagaggcgtagatcccccaccatgtgacgctgggacagaccaggactccaggtggaggttgcagtatgatgtctatcagtattttctgcctgagaatgacctcactgaggagatgttgctgaagcatctgcagaggatggtcagtgtgccccaggtgaaggccagtgctctcaaggtggttaccctaacagctaatgataagacaagtgtttccttctcctccctcccgggacaaggtgtcatatacaatgtcattgtttgggacccgtttctaaatacatctgctgcctacattcctgctcacacatacgcttgcagctttgaggcaggagagggtagttgtgcttccctaggaagagtgtcttccaaagtgttcttcactctttttgccctgcttggtttcttcatttgtttctttggacacagattctggaaaacagtgattacaagactgacacctatcaagtatgatgtgaatctgattctgacagctgtcactggaagcgtcggtggaatgttcttggtagctgtgtggtggcgatttggaatcctctcgatctgcatgctctgtgttggactagtgctggggttcctcatctcgtcagtgactttctttactccactgggaaacctaaagatttttcatgatgatggtgtattctgggtcactttctcttgcatagctatcctcattccagtagttttcatgggctgcctaagaatactgaacatactgacttgtggagtcattggctcctattcggtggttttagccattgacagttactggtccacaagcctttcctacatcactttgaacgtactcaagagagcgctcaacaaggatttccacagagctttcacaaatgtgccttttcaaactaatgacttcattatcctggcagtatggggcatgctggctgtaagtggaattacgttacagattcgaagagagagaggacgaccgttcttccctccccacccatacaagttatggaagcaagagagagagcgccgagtgacaaacattctggaccctagctaccacattcctccattgagagagaggctctatggccgattaacccagattaaagggctcttccagaaggagcagccagctggagagagaacgcctttgcttctgtagatgcccaggggcttggtcagtgtgcctcagctttggagttcatgcctggagtggttcaacagtctctggtgcaagtctaataagagatcaggcatatatatctgttctttgcataatattatggtgcccttattgatatatggtaagggtgtactaggggattaggatgattgtaagagaatgagaaagatgaccaaaaggttggtggtagggaggctttttcttatttccaaatacttgagaaattaccttttggtttacaaatctatgatcaacttattccattaaatagatacattaaaaaaattaaaaactgattcttctgcagagcactggtgtttctttttataaccccttgaaacaagtctctcacctgagcctgtctaaactttcggagggagtttattattgagtctttatctgtgacagtatttggagatttagggatttgatacttaggcctttgaattttagaatacaaaaagagaagcaagccagacatggtggctcacacctgtaatcccaatactgggaagccaaggtgggagtatcgcttgagcccaggagtttgagaccgacatgggcaacatgacaagaccccatctctacaaaaaaattaaaaaattagccaggcatggtggcacatgcctactcccagctcccaaggagactgagatgggaggatccctggagccctgaagattgaggctacagtgagccttgattgtgtcactgcactccagcttgggtgacagagaccctgtctcgagaaattaaaaaaaaaaaaaacttattttcttactaaaagcagtctgattacttagttgcatgcccttcttagtatcatacattatccaaaagttacccttggtttttttttcagtattttttaaaatttttaagttgtgataaaatacacatgaaatttaccttcttattcatgtttaagtgtaca

SEQ ID NO: 434372 - DNA, 2747 bp, Homo sapiens
acgcgcgttgggggtcaggtgccggaagaggaaacctctcgctggggctaggagttcggcggggcgcgcgccggcggctgcggagctggcaggtgcgaagcgtctgcacctggcgggcgatggcgcccgatgcgggcgccccgggatagcgtgggcgaggctgcggggccccggcgcgcacgcccgcacctctccccagccctggcgtgggcccagcccggcccaggcagcaatggggttcctgcagctgctggtcgtagcggtgctggcatccgaacaccgggtggctggtgcagccgaggtcttcgggaattccagcgagggtcttattgaattttctgtggggaaatttagatacttcgagctcaataggccctttccagaggaagctattttgcatgatatttcaagcaatgtgacttttcttattttccaaatacactcacagtatcagaatacaactgtttccttttctccgactctcctttccaattcctcggaaacaggcactgccagtggactggttttcatccttagaccagagcagagtacatgcacttggtacttggggacttcaggcatacagcctgtccagaatatggctatcctactctcctactcagaaagagatcctgtccctggaggctgtaatttggagttcgatttagatattgatcccaacatttacttggagtataatttctttgaaacgactatcaagtttgccccagcaaacctaggctatgcgagaggcgtagatcccccaccatgtgacgctgggacagaccaggactccaggtggaggttgcagtatgatgtctatcagtattttctgcctgagaatgacctcactgaggagatgttgctgaagcatctgcagaggatggtcagtgtgccccaggtgaaggccagtgctctcaaggtggttaccctaacagctaatgataagacaagtgtttccttctcctccctcccgggacaaggtgtcatatacaatgtcattgtttgggacccgtttctaaatacatctgctgcctacattcctgctcacacatacgcttgcagctttgaggcaggagagggtagttgtgcttccctaggaagagtgtcttccaaagtgttcttcactctttttgccctgcttggtttcttcatttgtttctttggacacagattctggaaaacagaattattcttcataggctttatcatcatgggattcttcttttatatactgattacaagactgacacctatcaagtatgatggaaacctaaagatttttcatgatgatggtgtattctgggtcactttctcttgcatagctatcctcattccagtagttttcatgggctgcctaagaatactgaacatactgacttgtggagtcattggctcctattcggtggttttagccattgacagttactggtccacaagcctttcctacatcactttgaacgtactcaagagagcgctcaacaaggatttccacagagctttcacaaatgtgccttttcaaactaatgacttcattatcctggcagtatggggcatgctggctgtaagtggaattacgttacagattcgaagagagagaggacgaccgttcttccctccccacccatacaagttatggaagcaagagagagagcgccgagtgacaaacattctggaccctagctaccacattcctccattgagagagaggctctatggccgattaacccagattaaagggctcttccagaaggagcagccagctggagagagaacgcctttgcttctgtagatgcccaggggcttggtcagtgtgcctcagctttggagttcatgcctggagtggttcaacagtctctggtgcaagtctaataagagatcaggcatatatatctgttctttgcataatattatggtgcccttattgatatatggtaagggtgtactaggggattaggatgattgtaagagaatgagaaagatgaccaaaaggttggtggtagggaggctttttcttatttccaaatacttgagaaattaccttttggtttacaaatctatgatcaacttattccattaaatagatacattaaaaaaattaaaaactgattcttctgcagagcactggtgtttctttttataaccccttgaaacaagtctctcacctgagcctgtctaaactttcggagggagtttattattgagtctttatctgtgacagtatttggagatttagggatttgatacttaggcctttgaattttagaatacaaaaagagaagcaagccagacatggtggctcacacctgtaatcccaatactgggaagccaaggtgggagtatcgcttgagcccaggagtttgagaccgacatgggcaacatgacaagaccccatctctacaaaaaaattaaaaaattagccaggcatggtggcacatgcctactcccagctcccaaggagactgagatgggaggatccctggagccctgaagattgaggctacagtgagccttgattgtgtcactgcactccagcttgggtgacagagaccctgtctcgagaaattaaaaaaaaaaaaaacttattttcttactaaaagcagtctgattacttagttgcatgcccttcttagtatcatacattatccaaaagttacccttggtttttttttcagtattttttaaaatttttaagttgtgataaaatacacatgaaatttaccttcttattcatgtttaagtgtaca

SEQ ID NO: 434373 - DNA, 2594 bp, Homo sapiens
acgcgcgttgggggtcaggtgccggaagaggaaacctctcgctggggctaggagttcggcggggcgcgcgccggcggctgcggagctggcaggtgcgaagcgtctgcacctggcgggcgatggcgcccgatgcgggcgccccgggatagcgtgggcgaggctgcggggccccggcgcgcacgcccgcacctctccccagccctggcgtgggcccagcccggcccaggcagcaatggggttcctgcagctgctggtcgtagcggtgctggcatccgaacaccgggtggctggtgcagccgaggtcttcgggaattccagcgaggatcctgtccctggaggctgtaatttggagttcgatttagatattgatcccaacatttacttggagtataatttctttgaaacgactatcaagtttgccccagcaaacctaggctatgcgagaggcgtagatcccccaccatgtgacgctgggacagaccaggactccaggtggaggttgcagtatgatgtctatcagtattttctgcctgagaatgacctcactgaggagatgttgctgaagcatctgcagaggatggtcagtgtgccccaggtgaaggccagtgctctcaaggtggttaccctaacagctaatgataagacaagtgtttccttctcctccctcccgggacaaggtgtcatatacaatgtcattgtttgggacccgtttctaaatacatctgctgcctacattcctgctcacacatacgcttgcagctttgaggcaggagagggtagttgtgcttccctaggaagagtgtcttccaaagtgttcttcactctttttgccctgcttggtttcttcatttgtttctttggacacagattctggaaaacagaattattcttcataggctttatcatcatgggattcttcttttatatactgattacaagactgacacctatcaagtatgatgtgaatctgattctgacagctgtcactggaagcgtcggtggaatgttcttggtagctgtgtggtggcgatttggaatcctctcgatctgcatgctctgtgttggactagtgctggggttcctcatctcgtcagtgactttctttactccactgggaaacctaaagatttttcatgatgatggtgtattctgggtcactttctcttgcatagctatcctcattccagtagttttcatgggctgcctaagaatactgaacatactgacttgtggagtcattggctcctattcggtggttttagccattgacagttactggtccacaagcctttcctacatcactttgaacgtactcaagagagcgctcaacaaggatttccacagagctttcacaaatgtgccttttcaaactaatgacttcattatcctggcagtatggggcatgctggctgtaagtggaattacgttacagattcgaagagagagaggacgaccgttcttccctccccacccatacaagttatggaagcaagagagagagcgccgagtgacaaacattctggaccctagctaccacattcctccattgagagagaggctctatggccgattaacccagattaaagggctcttccagaaggagcagccagctggagagagaacgcctttgcttctgtagatgcccaggggcttggtcagtgtgcctcagctttggagttcatgcctggagtggttcaacagtctctggtgcaagtctaataagagatcaggcatatatatctgttctttgcataatattatggtgcccttattgatatatggtaagggtgtactaggggattaggatgattgtaagagaatgagaaagatgaccaaaaggttggtggtagggaggctttttcttatttccaaatacttgagaaattaccttttggtttacaaatctatgatcaacttattccattaaatagatacattaaaaaaattaaaaactgattcttctgcagagcactggtgtttctttttataaccccttgaaacaagtctctcacctgagcctgtctaaactttcggagggagtttattattgagtctttatctgtgacagtatttggagatttagggatttgatacttaggcctttgaattttagaatacaaaaagagaagcaagccagacatggtggctcacacctgtaatcccaatactgggaagccaaggtgggagtatcgcttgagcccaggagtttgagaccgacatgggcaacatgacaagaccccatctctacaaaaaaattaaaaaattagccaggcatggtggcacatgcctactcccagctcccaaggagactgagatgggaggatccctggagccctgaagattgaggctacagtgagccttgattgtgtcactgcactccagcttgggtgacagagaccctgtctcgagaaattaaaaaaaaaaaaaacttattttcttactaaaagcagtctgattacttagttgcatgcccttcttagtatcatacattatccaaaagttacccttggtttttttttcagtattttttaaaatttttaagttgtgataaaatacacatgaaatttaccttcttattcatgtttaagtgtaca

SEQ ID NO: 434374 - DNA, 2851 bp, Homo sapiens
acgcgcgttgggggtcaggtgccggaagaggaaacctctcgctggggctaggagttcggcggggcgcgcgccggcggctgcggagctggcaggtgcgaagcgtctgcacctggcgggcgatggcgcccgatgcgggcgccccgggatagcgtgggcgaggctgcggggccccggcgcgcacgcccgcacctctccccagccctggcgtgggcccagcccggcccaggcagcaatggggttcctgcagctgctggtcgtagcggtgctggcatccgaacaccgggtggctggtgcagccgaggtcttcgggaattccagcgagggtcttattgaattttctgtggggaaatttagatacttcgagctcaataggccctttccagaggaagctattttgcatgatatttcaagcaatgtgacttttcttattttccaaatacactcacagtatcagaatacaactgtttccttttctccgactctcctttccaattcctcggaaacaggcactgccagtggactggttttcatccttagaccagagcagagtacatgcacttggtacttggggacttcaggcatacagcctgtccagaatatggctatcctactctcctactcagaaagagatcctgtccctggaggctgtaatttggagttcgatttagatattgatcccaacatttacttggagtataatttctttgaaacgactatcaagtttgccccagcaaacctaggctatgcgagaggcgtagatcccccaccatgtgacgctgggacagaccaggactccaggtggaggttgcagtatgatgtctatcagtattttctgcctgagaatgacctcactgaggagatgttgctgaagcatctgcagaggatggtcagtgtgccccaggtgaaggccagtgctctcaaggtggttaccctaacagctaatgataagacaagtgtttccttctcctccctcccgggacaaggtgtcatatacaatgtcattgtttgggacccgtttctaaatacatctgctgcctacattcctgctcacacatacgcttgcagctttgaggcaggagagggtagttgtgcttccctagctgtgctgtacctgcttctctgcctctccacctcatcaccctcctttatcactggattattttaaagcaaatccctggtcatcatgttactcacaaatatttcagaagagtgtcttccaaagtgttcttcactctttttgccctgcttggtttcttcatttgtttctttggacacagattctggaaaacagaattattcttcataggctttatcatcatgggattcttcttttatatactgattacaagactgacacctatcaagtatgatggaaacctaaagatttttcatgatgatggtgtattctgggtcactttctcttgcatagctatcctcattccagtagttttcatgggctgcctaagaatactgaacatactgacttgtggagtcattggctcctattcggtggttttagccattgacagttactggtccacaagcctttcctacatcactttgaacgtactcaagagagcgctcaacaaggatttccacagagctttcacaaatgtgccttttcaaactaatgacttcattatcctggcagtatggggcatgctggctgtaagtggaattacgttacagattcgaagagagagaggacgaccgttcttccctccccacccatacaagttatggaagcaagagagagagcgccgagtgacaaacattctggaccctagctaccacattcctccattgagagagaggctctatggccgattaacccagattaaagggctcttccagaaggagcagccagctggagagagaacgcctttgcttctgtagatgcccaggggcttggtcagtgtgcctcagctttggagttcatgcctggagtggttcaacagtctctggtgcaagtctaataagagatcaggcatatatatctgttctttgcataatattatggtgcccttattgatatatggtaagggtgtactaggggattaggatgattgtaagagaatgagaaagatgaccaaaaggttggtggtagggaggctttttcttatttccaaatacttgagaaattaccttttggtttacaaatctatgatcaacttattccattaaatagatacattaaaaaaattaaaaactgattcttctgcagagcactggtgtttctttttataaccccttgaaacaagtctctcacctgagcctgtctaaactttcggagggagtttattattgagtctttatctgtgacagtatttggagatttagggatttgatacttaggcctttgaattttagaatacaaaaagagaagcaagccagacatggtggctcacacctgtaatcccaatactgggaagccaaggtgggagtatcgcttgagcccaggagtttgagaccgacatgggcaacatgacaagaccccatctctacaaaaaaattaaaaaattagccaggcatggtggcacatgcctactcccagctcccaaggagactgagatgggaggatccctggagccctgaagattgaggctacagtgagccttgattgtgtcactgcactccagcttgggtgacagagaccctgtctcgagaaattaaaaaaaaaaaaaacttattttcttactaaaagcagtctgattacttagttgcatgcccttcttagtatcatacattatccaaaagttacccttggtttttttttcagtattttttaaaatttttaagttgtgataaaatacacatgaaatttaccttcttattcatgtttaagtgtaca

SEQ ID NO: 434375 - DNA, 2628 bp, Homo sapiens
acgcgcgttgggggtcaggtgccggaagaggaaacctctcgctggggctaggagttcggcggggcgcgcgccggcggctgcggagctggcaggtgcgaagcgtctgcacctggcgggcgatggcgcccgatgcgggcgccccgggatagcgtgggcgaggctgcggggccccggcgcgcacgcccgcacctctccccagccctggcgtgggcccagcccggcccaggcagcaatggggttcctgcagctgctggtcgtagcggtgctggcatccgaacaccgggtggctggtgcagccgaggtcttcgggaattccagcgagggtcttattgaattttctgtggggaaatttagatacttcgagctcaataggccctttccagaggaagctattttgcatgatatttcaagcaatgtgacttttcttattttccaaatacactcacagtatcagaatacaactgtttccttttctccgaggcgtagatcccccaccatgtgacgctgggacagaccaggactccaggtggaggttgcagtatgatgtctatcagtattttctgcctgagaatgacctcactgaggagatgttgctgaagcatctgcagaggatggtcagtgtgccccaggtgaaggccagtgctctcaaggtggttaccctaacagctaatgataagacaagtgtttccttctcctccctcccgggacaaggtgtcatatacaatgtcattgtttgggacccgtttctaaatacatctgctgcctacattcctgctcacacatacgcttgcagctttgaggcaggagagggtagttgtgcttccctaggaagagtgtcttccaaagtgttcttcactctttttgccctgcttggtttcttcatttgtttctttggacacagattctggaaaacagaattattcttcataggctttatcatcatgggattcttcttttatatactgattacaagactgacacctatcaagtatgatgtgaatctgattctgacagctgtcactggaagcgtcggtggaatgttcttggtagctgtgtggtggcgatttggaatcctctcgatctgcatgctctgtgttggactagtgctggggttcctcatctcgtcagtgactttctttactccactgggaaacctaaagatttttcatgatgatggtgtattctgggtcactttctcttgcatagctatcctcattccagtagttttcatgggctgcctaagaatactgaacatactgacttgtggagtcattggctcctattcggtggttttagccattgacagttactggtccacaagcctttcctacatcactttgaacgtactcaagagagcgctcaacaaggatttccacagagctttcacaaatgtgccttttcaaactaatgacttcattatcctggcagtatggggcatgctggctgtaagtggaattacgttacagattcgaagagagagaggacgaccgttcttccctccccacccatacaagttatggaagcaagagagagagcgccgagtgacaaacattctggaccctagctaccacattcctccattgagagagaggctctatggccgattaacccagattaaagggctcttccagaaggagcagccagctggagagagaacgcctttgcttctgtagatgcccaggggcttggtcagtgtgcctcagctttggagttcatgcctggagtggttcaacagtctctggtgcaagtctaataagagatcaggcatatatatctgttctttgcataatattatggtgcccttattgatatatggtaagggtgtactaggggattaggatgattgtaagagaatgagaaagatgaccaaaaggttggtggtagggaggctttttcttatttccaaatacttgagaaattaccttttggtttacaaatctatgatcaacttattccattaaatagatacattaaaaaaattaaaaactgattcttctgcagagcactggtgtttctttttataaccccttgaaacaagtctctcacctgagcctgtctaaactttcggagggagtttattattgagtctttatctgtgacagtatttggagatttagggatttgatacttaggcctttgaattttagaatacaaaaagagaagcaagccagacatggtggctcacacctgtaatcccaatactgggaagccaaggtgggagtatcgcttgagcccaggagtttgagaccgacatgggcaacatgacaagaccccatctctacaaaaaaattaaaaaattagccaggcatggtggcacatgcctactcccagctcccaaggagactgagatgggaggatccctggagccctgaagattgaggctacagtgagccttgattgtgtcactgcactccagcttgggtgacagagaccctgtctcgagaaattaaaaaaaaaaaaaacttattttcttactaaaagcagtctgattacttagttgcatgcccttcttagtatcatacattatccaaaagttacccttggtttttttttcagtattttttaaaatttttaagttgtgataaaatacacatgaaatttaccttcttattcatgtttaagtgtaca

SEQ ID NO: 434376 - DNA, 2632 bp, Homo sapiens
acgcgcgttgggggtcaggtgccggaagaggaaacctctcgctggggctaggagttcggcggggcgcgcgccggcggctgcggagctggcaggtgcgaagcgtctgcacctggcgggcgatggcgcccgatgcgggcgccccgggatagcgtgggcgaggctgcggggccccggcgcgcacgcccgcacctctccccagccctggcgtgggcccagcccggcccaggcagcaatggggttcctgcagctgctggtcgtagcggtgctggcatccgaacaccgggtggctggtgcagccgaggtcttcgggaattccagcgagggtcttattgaattttctgtggggaaatttagatacttcgagctcaataggccctttccagaggaagctattttgcatgatatttcaagcaatgtgacttttcttattttccaaatacactcacagtatcagaatacaactgtttccttttctccgactctcctttccaattcctcggaaacaggcactgccagtggactggttttcatccttagaccagagcagagtacatgcacttggtacttggggacttcaggcatacagcctgtccagaatatggctatcctactctcctactcagaaagagatcctgtccctggaggctgtaatttggagttcgatttagatattgatcccaacatttacttggagtataatttctttgaaacgactatcaagtttgccccagcaaacctaggctatgcgagaggcgtagatcccccaccatgtgacgctgggacagaccaggactccaggtggaggttgcagtatgatgtctatcagtattttctgcctgagaatgacctcactgaggagatgttgctgaagcatctgcagaggatggtcagtgtgccccaggtgaaggccagtgctctcaaggtggttaccctaacagctaatgataagacaagtgtttccttctcctccctcccgggacaaggtgtcatatacaatgtcattgtttgggacccgtttctaaatacatctgctgcctacattcctgctcacacatacgcttgcagctttgaggcaggagagggtagttgtgcttccctaggaagagtgtcttccaaagtgttcttcactctttttgccctgcttggtttcttcatttgtttctttggacacagattctggaaaacagaattattcttcataggctttatcatcatgggattcttcttttatatactgattacaagactgacacctatcaagtatgatgtgaatctgattctgacagctgtcactggaagcgtcggtggaatgttcttggtagctgtgtggtggcgatttggaatcctctcgatctgcatgctctgtgttggactagtgctggggttcctcatctcgtcagtgactttctttactccactgggaaacctaaagatttttcatgatgatggtgtattctgggtcactttctcttgcatagctatcctcattccagtagttttcatgggctgcctaagaatactgaacatactgacttgtggagtcattggctcctattcggtggttttagccattgacagttactggtccacaagcctttcctacatcactttgaacgtactcaagagagcgctcaacaaggatttccacagagctttcacaaatgtgccttttcaaactaatgacttcattatcctggcagtatggggcatgctggctgtaagtggaattacgttacagattcgaagagagagaggacgaccgttcttccctccccacccatacaagttatggaagcaagagagagagcgccgagtgacaaacattctggaccctagctaccacattcctccattgagagagaggctctatggccgattaacccagattaaagggctcttccagaaggagcagccagctggagagagaacgcctttgcttctgtagatgcccaggggcttggtcagtgtgcctcagctttggagttcatgcctggagtggttcaacagtctctggtgcaagtctaataagagatcaggcatatatatctgttctttgcataatattatggtgcccttattgatatatggtaagggtgtactaggggattaggatgattgtaagagaatgagaaagatgaccaaaaggttggtggtagggaggctttttcttatttccaaatacttgagaaattaccttttggtttacaaatctatgatcaacttattccattaaatagatacattaaaaaaattaaaaactgaaaaaaaaaaaaaaaaaaaaaaaaaaaaaaaaaaaaaaaaaaaaaaaaggggggggggggccctaaaaattacccccccgagagggggagcccaccaattttaagcacgactaccaccctagttttttttgtgtaccaagagggcgccccccccaaagaggaggacagcgcatataatataaaacggagaggcaaggggcgcgccggttttaaaacaacgcgcgggcaggagggggaaaaacggggccacgcggagaacaaccttgcggaaaaagaaccgccccactgcgggggggggacacatgggcggacaaactcccccacgagatatattagcccgagagaaaaacaacactgacggctaaagggga

SEQ ID NO: 434377 - DNA, 2264 bp, Homo sapiens
acgcgcgttgggggtcaggtgccggaagaggaaacctctcgctggggctaggagttcggcggggcgcgcgccggcggctgcggagctggcaggtgcgaagcgtctgcacctggcgggcgatggcgcccgatgcgggcgccccgggatagcgtgggcgaggctgcggggccccggcgcgcacgcccgcacctctccccagccctggcgtgggcccagcccggcccaggcagcaatggggttcctgcagctgctggtcgtagcggtgctggcatccgaacaccgggtggctggtgcagccgaggtcttcgggaattccagcgagggtcttattgaattttctgtggggaaatttagatacttcgagctcaataggccctttccagaggaagctattttgcatgatatttcaagcaatgtgacttttcttattttccaaatacactcacagtatcagaatacaactgtttccttttctccgactctcctttccaattcctcggaaacaggcactgccagtggactggttttcatccttagaccagagcagagtacatgcacttggtacttggggacttcaggcatacagcctgtccagaatatggctatcctactctcctactcagaaagagatcctgtccctggaggctgtaatttggagttcgatttagatattgatcccaacatttacttggagtataatttctttgaaacgactatcaagtttgccccagcaaacctaggctatgcgagaggcgtagatcccccaccatgtgacgctgggacagaccaggactccaggtggaggttgcagtatgatgtctatcagtattttctgcctgagaatgacctcactgaggagatgttgctgaagcatctgcagaggatggtcagtgtgccccaggtgaaggccagtgctctcaaggtggttaccctaacagctaatgataagacaagtgtttccttctcctccctcccgggacaaggtgtcatatacaatgtcattgtttgggacccgtttctaaatacatctgctgcctacattcctgctcacacatacgcttgcagctttgaggcaggagagggtagttgtgcttccctaggaagagtgtcttccaaagtgttcttcactctttttgccctgcttggtttcttcatttgtttctttggacacagattctggaaaacagaattattcttcataggctttatcatcatgggattcttcttttatatactgattacaagactgacacctatcaagtatgatgtgaatctgattctgacagctgtcactggaagcgtcggtggaatgttcttggtagctgtgtggtggcgatttggaatcctctcgatctgcatgctctgtgttggactagtgctggggttcctcatctcgtcagtgactttctttactccactgggaaacctaaagatttttcatgatgatggtgtattctgggtcactttctcttgcatagctatcctcattccagtagttttcatgggctgcctaagaatactgaacatactgacttgtggagtcattggctcctattcggtggttttagccattgacagttactggtccacaagcctttcctacatcactttgaacgtactcaagagagcgctcaacaaggatttccacagagctttcacaaatgtgccttttcaaactaatgacttcattatcctggcagtatggggcatgctggctgtaagtggaattacgttacagattcgaagagagagaggacgaccgttcttccctccccacccatacaagttatggaagcaagagagagagcgccgagtgacaaacattctggaccctagctaccacattcctccattgagagagaggctctatggccgattaacccagattaaagggctcttccagaaggagcagccagctggagagagaacgcctttgcttctgtagatgcccaggggcttggtcagtgtgcctcagctttggagttcatgcctggagtggttcaacagtctctggtgcaagtctaataagagatcaggcatatatatctgttctttgcataatattatggtgcccttattgatatatggtaagggtgtactaggggattaggatgattgtaagagaatgagaaagatgaccaaaaggttggtggtagggaggctttttcttatttccaaattctaaagcctttaatttttggtcaaaaaagccataatcaacggggctttgtttctcccgcctcgtttttaagagcgttgactct

SEQ ID NO: 434378 - DNA, 2320 bp, Homo sapiens
acgcgcgttgggggtcaggtgccggaagaggaaacctctcgctggggctaggagttcggcggggcgcgcgccggcggctgcggagctggcaggtgcgaagcgtctgcacctggcgggcgatggcgcccgatgcgggcgccccgggatagcgtgggcgaggctgcggggccccggcgcgcacgcccgcacctctccccagccctggcgtgggcccagcccggcccaggcagcaatggggttcctgcagctgctggtcgtagcggtgctggcatccgaacaccgggtggctggtgcagccgaggtcttcgggaattccagcgaggaggcgtagatcccccaccatgtgacgctgggacagaccaggactccaggtggaggttgcagtatgatgtctatcagtattttctgcctgagaatgacctcactgaggagatgttgctgaagcatctgcagaggatggtcagtgtgccccaggtgaaggccagtgctctcaaggtggttaccctaacagctaatgataagacaagtgtttccttctcctccctcccgggacaaggtgtcatatacaatgtcattgtttgggacccgtttctaaatacatctgctgcctacattcctgctcacacatacgcttgcagctttgaggcaggagagggtagttgtgcttccctaggaagagtgtcttccaaagtgttcttcactctttttgccctgcttggtttcttcatttgtttctttggacacagattctggaaaacagaattattcttcataggctttatcatcatgggattcttcttttatatactgattacaagactgacacctatcaagtatgatggaaacctaaagatttttcatgatgatggtgtattctgggtcactttctcttgcatagctatcctcattccagtagttttcatgggctgcctaagaatactgaacatactgacttgtggagtcattggctcctattcggtggttttagccattgacagttactggtccacaagcctttcctacatcactttgaacgtactcaagagagcgctcaacaaggatttccacagagctttcacaaatgtgccttttcaaactaatgacttcattatcctggcagtatggggcatgctggctgtaagtggaattacgttacagattcgaagagagagaggacgaccgttcttccctccccacccatacaagttatggaagcaagagagagagcgccgagtgacaaacattctggaccctagctaccacattcctccattgagagagaggctctatggccgattaacccagattaaagggctcttccagaaggagcagccagctggagagagaacgcctttgcttctgtagatgcccaggggcttggtcagtgtgcctcagctttggagttcatgcctggagtggttcaacagtctctggtgcaagtctaataagagatcaggcatatatatctgttctttgcataatattatggtgcccttattgatatatggtaagggtgtactaggggattaggatgattgtaagagaatgagaaagatgaccaaaaggttggtggtagggaggctttttcttatttccaaatacttgagaaattaccttttggtttacaaatctatgatcaacttattccattaaatagatacattaaaaaaattaaaaactgattcttctgcagagcactggtgtttctttttataaccccttgaaacaagtctctcacctgagcctgtctaaactttcggagggagtttattattgagtctttatctgtgacagtatttggagatttagggatttgatacttaggcctttgaattttagaatacaaaaagagaagcaagccagacatggtggctcacacctgtaatcccaatactgggaagccaaggtgggagtatcgcttgagcccaggagtttgagaccgacatgggcaacatgacaagaccccatctctacaaaaaaattaaaaaattagccaggcatggtggcacatgcctactcccagctcccaaggagactgagatgggaggatccctggagccctgaagattgaggctacagtgagccttgattgtgtcactgcactccagcttgggtgacagagaccctgtctcgagaaattaaaaaaaaaaaaaacttattttcttactaaaagcagtctgattacttagttgcatgcccttcttagtatcatacattatccaaaagttacccttggtttttttttcagtattttttaaaatttttaagttgtgataaaatacacatgaaatttaccttcttattcatgtttaagtgtaca

SEQ ID NO: 434379 - DNA, 1662 bp, Homo sapiens
ggtacggtcgaaccgatatgcaccacgcgtcgtagttctagatcgcgagggccgcccttttttgtggtatgttcacggcagcgtgtgtggtgcattagaaatcgtctgatctgcatgctctgtgtaaaaaaaagaagctgagttcctcatattcgtcagtgattactatactccactgggaaacctaaagatgcatgatgatggtgtattctgggtcacttactacaaggataggcctatacctcattccagtaataaacaagggctagacataaggaggtctgaacatactgacttgtggagtcattggctcctattcggtggttttagccattgacagttactggtccacaagcctttcctacatcactttgaacgtactcaagagagcgctcaacaaggatttccacagagctttcacaaatgtgccttttcaaactaatgacttcattatcctggcagtatggggcatgctggctgtaagtggaattacgttacagattcgaagagagagaggacgaccgttcttccctccccacccatacaagttatggaagcaagagagagagcgccgagtgacaaacattctggaccctagctaccacattcctccattgagagagaggctctatggccgattaacccagattaaagggctcttccagaaggagcagccagctggagagagaacgcctttgcttctgtagatgcccaggggcttggtcagtgtgcctcagctttggagttcatgcctggagtggttcaacagtctctggtgcaagtctaataagagatcaggcatatatatctgttctttgcataatattatggtgcccttattgatatatggtaagggtgtactaggggattaggatgattgtaagagaatgagaaagatgaccaaaaggttggtggtagggaggctttttcttatttccaaatacttgagaaattaccttttggtttacaaatctatgatcaacttattccattaaatagatacattaaaaaaattaaaaactgattcttctgcagagcactggtgtttctttttataaccccttgaaacaagtctctcacctgagcctgtctaaactttcggagggagtttattattgagtctttatctgtgacagtatttggagatttagggatttgatacttaggcctttgaattttagaatacaaaaagagaagcaagccagacatggtggctcacacctgtaatcccaatactgggaagccaaggtgggagtatcgcttgagcccaggagtttgagaccgacatgggcaacatgacaagaccccatctctacaaaaaaattaaaaaattagccaggcatggtggcacatgcctactcccagctcccaaggagactgagatgggaggatccctggagccctgaagattgaggctacagtgagccttgattgtgtcactgcactccagcttgggtgacagagaccctgtctcgagaaattaaaaaaaaaaaaaacttattttcttactaaaagcagtctgattacttagttgcatgcccttcttagtatcatacattatccaaaagttacccttggtttttttttcagtattttttaaaatttttaagttgtgataaaatacacatgaaatttaccttcttattcatgtttaagtgtaca

SEQ ID NO: 434380 - DNA, 1556 bp, Homo sapiens
acgcgcgttgggggtcaggtgccggaagaggaaacctctcgctggggctaggagttcggcggggcgcgcgccggcggctgcggagctggcaggtgcgaagcgtctgcacctggcgggcgatggcgcccgatgcgggcgccccgggatagcgtgggcgaggctgcggggccccggcgcgcacgcccgcacctctccccagccctggcgtgggcccagcccggcccaggcagcaatggggttcctgcagctgctggtcgtagcggtgctggcatccgaacaccgggtggctggtgcagccgaggtcttcgggaattccagcgagggtcttattgaattttctgtggggaaatttagatacttcgagctcaataggccctttccagaggaagctattttgcatgatatttcaagcaatgtgacttttcttattttccaaatacactcacagtatcagaatacaactgtttccttttctccgactctcctttccaattcctcggaaacaggcactgccagtggactggttttcatccttagaccagagcagagtacatgcacttggtacttggggacttcaggcatacagcctgtccagaatatggctatcctactctcctactcagaaagagatcctgtccctggaggctgtaatttggagttcgatttagatattgatcccaacatttacttggagtataatttctttgaaacgactatcaagtttgccccagcaaacctaggctatgcgagaggcgtagatcccccaccatgtgacgctgggacagaccaggactccaggtggaggttgcagtatgatgtctatcagtattttctgcctgagaatgacctcactgaggagatgttgctgaagcatctgcagaggatggtcagtgtgccccaggtgaaggccagtgctctcaaggtggttaccctaacagctaatgataagacaagtgtttccttctcctccctcccgggacaaggtgtcatatacaatgtcattgtttgggacccgtttctaaatacatctgctgcctacattcctgctcacacatacgcttgcagctttgaggcaggagagggtagttgtgcttccctaggtgagtatgtggctttaaacttttacaaattctcctttggccttgcagataatgcttttgtctagttctcattcattcaacacataccttttgagcccctacgttattccactctctgttctaggcactgggacatagcagtaaacaaaacagcaaaaatacttgttctggagcttatattatagtgagggagatgagacagacaagataaatttataaaatatgtaatacgtgagaaaatggtgagtgctaagaagataaataaagtaggaaagggagataacacatgccagtaagaggaaaatttgagatagatagcatggccagggcagtccttgatgcaccacgcacgtacctgggtgtggcatgtaccaggcagagggagcagccaggatgagggcctgcacctgggagcctgtctgagggtgtgaagaactgcagtgatgacaggggttg

SEQ ID NO: 434381 - DNA, 660 bp, Homo sapiens
acgcgcgttgggggtcaggtgccggaagaggaaacctctcgctggggctaggagttcggcggggcgcgcgccggcggctgcggagctggcaggtgcgaagcgtctgcacctggcgggcgatggcgcccgatgcgggcgccccgggatagcgtgggcgaggctgcggggccccggcgcgcacgcccgcacctctccccagccctggcgtgggcccagcccggcccaggcagcaatggggttcctgcagctgctggtcgtagcggtgctggcatccgaacaccgggtggctggtgcagccgaggtcttcgggaattccagcgagggtcttattgaattttctgtggggaaatttagatacttcgagctcaataggccctttccagaggaagctattttgcatgatatttcaagcaatgtgacttttcttattttccaaatacactcacagtatcagaatacaactgtttccttttctccgactctcctttccaattcctcggaaacaggcactgccagtggactggttttcatccttagaccagagcagagtacatgcacttggtacttggggacttcaggcatacagcctgtccagaatatggctatcctactctcctactcagaaagagtgctactctgaaagtgggtccgagctgaatg

SEQ ID NO: 434382 - DNA, 650 bp, Homo sapiens
acgcgcgttgggggtcaggtgccggaagaggaaacctctcgctggggctaggagttcggcggggcgcgcgccggcggctgcggagctggcaggtgcgaagcgtctgcacctggcgggcgatggcgcccgatgcgggcgccccgggatagcgtgggcgaggctgcggggccccggcgcgcacgcccgcacctctccccagccctggcgtgggcccagcccggcccaggcagcaatggggttcctgcagctgctggtcgtagcggtgctggcatccgaacaccgggtggctggtgcagccgaggtcttcgggaattccagcgagggtcttattgaattttctgtggggaaatttagatacttcgagctcaataggccctttccagaggaagctattttgcatgatatttcaagcaatgtgacttttcttattttccaaatacactcacagtatcagaatacaactgtttccttttctccgactctcctttccaattcctcggaaacaggcactgccagtggactggttttcatccttagaccagagcagagtacatgcacttggtacttggggacttcaggcatacagcctgtccagaatatggctatcctactctcctactcagaaagaggggaaagtggggatccttaga

SEQ ID NO: 434383 - DNA, 353 bp, Homo sapiens
ttacattagcacatacaaaccatgtaagatggccttttgaccatattaaatgggttggtgtatattttaagcaagaattataatttatgaatataccatttaatattacacgtaggtgggattatcacagaatagcttaaaaaaatcccctaaacactaatcatgtgttatttttggcttcaggtggttaccctaacagctaatgataagacaagtgtttccttctcctccctcccgggacaaggtgtcatatacaatgtcattgtttgggacccgtttctaaatacatctgctgcctacattcctgctcacacatacgcttgcagctttgaggcaggagagggtagttgtgc

SEQ ID NO: 434384 - DNA, 1285 bp, Homo sapiens
ggttgtattattatgttagattttaaaatactagagttcaaactgtactttttctactgttttttagacttcattatcctggcagtatggggcatgctggctgtaagtggaattacgttacagattcgaagagagagaggacgaccgttcttccctccccacccatacaagttatggaagcaagagagagagcgccgagtgacaaacattctggaccctagctaccacattcctccattgagagagaggctctatggccgattaacccagattaaagggctcttccagaaggagcagccagctggagagagaacgcctttgcttctgtagatgcccaggggcttggtcagtgtgcctcagctttggagttcatgcctggagtggttcaacagtctctggtgcaagtctaataagagatcaggcatatatatctgttctttgcataatattatggtgcccttattgatatatggtaagggtgtactaggggattaggatgattgtaagagaatgagaaagatgaccaaaaggttggtggtagggaggctttttcttatttccaaatacttgagaaattaccttttggtttacaaatctatgatcaacttattccattaaatagatacattaaaaaaattaaaaactgattcttctgcagagcactggtgtttctttttataaccccttgaaacaagtctctcacctgagcctgtctaaactttcggagggagtttattattgagtctttatctgtgacagtatttggagatttagggatttgatacttaggcctttgaattttagaatacaaaaagagaagcaagccagacatggtggctcacacctgtaatcccaatactgggaagccaaggtgggagtatcgcttgagcccaggagtttgagaccgacatgggcaacatgacaagaccccatctctacaaaaaaattaaaaaattagccaggcatggtggcacatgcctactcccagctcccaaggagactgagatgggaggatccctggagccctgaagattgaggctacagtgagccttgattgtgtcactgcactccagcttgggtgacagagaccctgtctcgagaaattaaaaaaaaaaaaaacttattttcttactaaaagcagtctgattacttagttgcatgcccttcttagtatcatacattatccaaaagttacccttggtttttttttcagtattttttaaaatttttaagttgtgataaaatacacatgaaatttaccttcttattcatgtttaagtgtaca

SEQ ID NO: 434385 - DNA, 2262 bp, Homo sapiens
acgcgcgttgggggtcaggtgccggaagaggaaacctctcgctggggctaggagttcggcggggcgcgcgccggcggctgcggagctggcaggtgcgaagcgtctgcacctggcgggcgatggcgcccgatgcgggcgccccgggatagcgtgggcgaggctgcggggccccggcgcgcacgcccgcacctctccccagccctggcgtgggcccagcccggcccaggcagcaatggggttcctgcagctgctggtcgtagcggtgctggcatccgaacaccgggtggctggtgcagccgaggtcttcgggaattccagcgagggtcttattgaattttctgtggggaaatttagatacttcgagctcaataggccctttccagaggaagctattttgcatgatatttcaagcaatgtgacttttcttattttccaaatacactcacagtatcagaatacaactgtttccttttctccgactctcctttccaattcctcggaaacaggcactgccagtggactggttttcatccttagaccagagcagagtacatgcacttggtacttggggacttcaggcatacagcctgtccagaatatggctatcctactctcctactcagaaagagatcctgtccctggaggctgtaatttggagttcgatttagatattgatcccaacatttacttggagtataatttctttgaaacgactatcaagtttgccccagcaaacctaggctatgcgagaggcgtagatcccccaccatgtgacgctgggacagaccaggactccaggtggaggttgcagtatgatgtctatcagtattttctgcctgagaatgacctcactgaggagatgttgctgaagcatctgcagaggatggtcagtgtgccccaggtgaaggccagtgctctcaaggtggttaccctaacagctaatgataagacaagtgtttccttctcctccctcccgggacaaggtgtcatatacaatgtcattgtttgggacccgtttctaaatacatctgctgcctacattcctgctcacacatacgcttgcagctttgaggcaggagagggtagttgtgcttccctaggaagagtgtcttccaaagtgttcttcactctttttgccctgcttggtttcttcatttgtttctttggacacagattctggaaaacagaattattcttcataggctttatcatcatgggattcttcttttatatactgattacaagactgacacctatcaagtatgatgtgaatctgattctgacagctgtcactggaagcgtcggtggaatgttcttggtagctgtgtggtggcgatttggaatcctctcgatctgcatgctctgtgttggactagtgctggggttcctcatctcgtcagtgactttctttactccactgggaaacctaaagatttttcatgatgatggtgtattctgggtcactttctcttgcatagctatcctcattccagtagttttcatgggctgcctaagaatactgaacatactgacttgtggagtcattggctcctattcggtggttttagccattgacagttactggtccacaagcctttcctacatcactttgaacgtactcaagagagcgctcaacaaggatttccacagagctttcacaaatgtgccttttcaaactaatgacttcattatcctggcagtatggggcatgctggctgtaagtggaattacgttacagattcgaagagagagaggacgaccgttcttccctccccacccatacaagttatggaagcaagagagagagcgccgagtgacaaacattctggaccctagctaccacattcctccattgagagagaggctctatggccgattaacccagattaaagggctcttccagaaggagcagccagctggagagagaacgcctttgcttctgtagatgcccaggggcttggtcagtgtgcctcagctttggagttcatgcctggagtggttcaacagtctctggtgcaagtctaataagagatcaggcatatatatctgttctttgcataatattatggtgcccttattgatatatggtaagggtgtactaggggattaggatgattgtaagagaatgagaaagatgaccaaaaggttggtggtagggaggctttttcttatttccaaatacttgagaaattaccttttggtttacaaatctatgatcaacttattccattaaatagatacattaaaaaaattaaaaactga

SEQ ID NO: 434386 - DNA, 2669 bp, Homo sapiens
acgcgcgttgggggtcaggtgccggaagaggaaacctctcgctggggctaggagttcggcggggcgcgcgccggcggctgcggagctggcaggtcttattgaattttctgtggggaaatttagatacttcgagctcaataggccctttccagaggaagctattttgcatgatatttcaagcaatgtgacttttcttattttccaaatacactcacagtatcagaatacaactgtttccttttctccgactctcctttccaattcctcggaaacaggcactgccagtggactggttttcatccttagaccagagcagagtacatgcacttggtacttggggacttcaggcatacagcctgtccagaatatggctatcctactctcctactcagaaagagatcctgtccctggaggctgtaatttggagttcgatttagatattgatcccaacatttacttggagtataatttctttgaaacgactatcaagtttgccccagcaaacctaggctatgcgagaggcgtagatcccccaccatgtgacgctgggacagaccaggactccaggtggaggttgcagtatgatgtctatcagtattttctgcctgagaatgacctcactgaggagatgttgctgaagcatctgcagaggatggtcagtgtgccccaggtgaaggccagtgctctcaaggtggttaccctaacagctaatgataagacaagtgtttccttctcctccctcccgggacaaggtgtcatatacaatgtcattgtttgggacccgtttctaaatacatctgctgcctacattcctgctcacacatacgcttgcagctttgaggcaggagagggtagttgtgcttccctaggaagagtgtcttccaaagtgttcttcactctttttgccctgcttggtttcttcatttgtttctttggacacagattctggaaaacagaattattcttcataggctttatcatcatgggattcttcttttatatactgattacaagactgacacctatcaagtatgatgtgaatctgattctgacagctgtcactggaagcgtcggtggaatgttcttggtagctgtgtggtggcgatttggaatcctctcgatctgcatgctctgtgttggactagtgctggggttcctcatctcgtcagtgactttctttactccactgggaaacctaaagatttttcatgatgatggtgtattctgggtcactttctcttgcatagctatcctcattccagtagttttcatgggctgcctaagaatactgaacatactgacttgtggagtcattggctcctattcggtggttttagccattgacagttactggtccacaagcctttcctacatcactttgaacgtactcaagagagcgctcaacaaggatttccacagagctttcacaaatgtgccttttcaaactaatgacttcattatcctggcagtatggggcatgctggctgtaagtggaattacgttacagattcgaagagagagaggacgaccgttcttccctccccacccatacaagttatggaagcaagagagagagcgccgagtgacaaacattctggaccctagctaccacattcctccattgagagagaggctctatggccgattaacccagattaaagggctcttccagaaggagcagccagctggagagagaacgcctttgcttctgtagatgcccaggggcttggtcagtgtgcctcagctttggagttcatgcctggagtggttcaacagtctctggtgcaagtctaataagagatcaggcatatatatctgttctttgcataatattatggtgcccttattgatatatggtaagggtgtactaggggattaggatgattgtaagagaatgagaaagatgaccaaaaggttggtggtagggaggctttttcttatttccaaatacttgagaaattaccttttggtttacaaatctatgatcaacttattccattaaatagatacattaaaaaaattaaaaactgattcttctgcagagcactggtgtttctttttataaccccttgaaacaagtctctcacctgagcctgtctaaactttcggagggagtttattattgagtctttatctgtgacagtatttggagatttagggatttgatacttaggcctttgaattttagaatacaaaaagagaagcaagccagacatggtggctcacacctgtaatcccaatactgggaagccaaggtgggagtatcgcttgagcccaggagtttgagaccgacatgggcaacatgacaagaccccatctctacaaaaaaattaaaaaattagccaggcatggtggcacatgcctactcccagctcccaaggagactgagatgggaggatccctggagccctgaagattgaggctacagtgagccttgattgtgtcactgcactccagcttgggtgacagagaccctgtctcgagaaattaaaaaaaaaaaaaacttattttcttactaaaagcagtctgattacttagttgcatgcccttcttagtatcatacattatccaaaagttacccttggtttttttttcagtattttttaaaatttttaagttgtgataaaatacacatgaaatttaccttcttattcatgtttaagtgtaca

SEQ ID NO: 434387 - DNA, 2745 bp, Homo sapiens
acgcgcgttgggggtcaggtgccggaagaggaaacctctcgctggggctaggagttcggcggggcgcgcgccggcggctgcggagctggcaggtgcgaagcgtctgcacctggcgggcgatggcgcccgatgcgggcgccccgggatagcgtgggcgaggctgcggggccccggcgcgcacgcccgcacctctccccagccctggcgtgggcccagcccggcccaggcagcaatggggttcctgcagctgctggtcgtagcggtgctggcatccgaacaccgggtggctggtgcagccgaggtcttcgggaattccagcgaggactctcctttccaattcctcggaaacaggcactgccagtggactggttttcatccttagaccagagcagagtacatgcacttggtacttggggacttcaggcatacagcctgtccagaatatggctatcctactctcctactcagaaagagatcctgtccctggaggctgtaatttggagttcgatttagatattgatcccaacatttacttggagtataatttctttgaaacgactatcaagtttgccccagcaaacctaggctatgcgagaggcgtagatcccccaccatgtgacgctgggacagaccaggactccaggtggaggttgcagtatgatgtctatcagtattttctgcctgagaatgacctcactgaggagatgttgctgaagcatctgcagaggatggtcagtgtgccccaggtgaaggccagtgctctcaaggtggttaccctaacagctaatgataagacaagtgtttccttctcctccctcccgggacaaggtgtcatatacaatgtcattgtttgggacccgtttctaaatacatctgctgcctacattcctgctcacacatacgcttgcagctttgaggcaggagagggtagttgtgcttccctaggaagagtgtcttccaaagtgttcttcactctttttgccctgcttggtttcttcatttgtttctttggacacagattctggaaaacagaattattcttcataggctttatcatcatgggattcttcttttatatactgattacaagactgacacctatcaagtatgatgtgaatctgattctgacagctgtcactggaagcgtcggtggaatgttcttggtagctgtgtggtggcgatttggaatcctctcgatctgcatgctctgtgttggactagtgctggggttcctcatctcgtcagtgactttctttactccactgggaaacctaaagatttttcatgatgatggtgtattctgggtcactttctcttgcatagctatcctcattccagtagttttcatgggctgcctaagaatactgaacatactgacttgtggagtcattggctcctattcggtggttttagccattgacagttactggtccacaagcctttcctacatcactttgaacgtactcaagagagcgctcaacaaggatttccacagagctttcacaaatgtgccttttcaaactaatgacttcattatcctggcagtatggggcatgctggctgtaagtggaattacgttacagattcgaagagagagaggacgaccgttcttccctccccacccatacaagttatggaagcaagagagagagcgccgagtgacaaacattctggaccctagctaccacattcctccattgagagagaggctctatggccgattaacccagattaaagggctcttccagaaggagcagccagctggagagagaacgcctttgcttctgtagatgcccaggggcttggtcagtgtgcctcagctttggagttcatgcctggagtggttcaacagtctctggtgcaagtctaataagagatcaggcatatatatctgttctttgcataatattatggtgcccttattgatatatggtaagggtgtactaggggattaggatgattgtaagagaatgagaaagatgaccaaaaggttggtggtagggaggctttttcttatttccaaatacttgagaaattaccttttggtttacaaatctatgatcaacttattccattaaatagatacattaaaaaaattaaaaactgattcttctgcagagcactggtgtttctttttataaccccttgaaacaagtctctcacctgagcctgtctaaactttcggagggagtttattattgagtctttatctgtgacagtatttggagatttagggatttgatacttaggcctttgaattttagaatacaaaaagagaagcaagccagacatggtggctcacacctgtaatcccaatactgggaagccaaggtgggagtatcgcttgagcccaggagtttgagaccgacatgggcaacatgacaagaccccatctctacaaaaaaattaaaaaattagccaggcatggtggcacatgcctactcccagctcccaaggagactgagatgggaggatccctggagccctgaagattgaggctacagtgagccttgattgtgtcactgcactccagcttgggtgacagagaccctgtctcgagaaattaaaaaaaaaaaaaacttattttcttactaaaagcagtctgattacttagttgcatgcccttcttagtatcatacattatccaaaagttacccttggtttttttttcagtattttttaaaatttttaagttgtgataaaatacacatgaaatttaccttcttattcatgtttaagtgtaca

SEQ ID NO: 434388 - DNA, 2649 bp, Homo sapiens
acgcgcgttgggggtcaggtgccggaagaggaaacctctcgctggggctaggagttcggcggggcgcgcgccggcggctgcggagctggcaggtgcgaagcgtctgcacctggcgggcgatggcgcccgatgcgggcgccccgggatagcgtgggcgaggctgcggggccccggcgcgcacgcccgcacctctccccagccctggcgtgggcccagcccggcccaggcagcaatggggttcctgcagctgctggtcgtagcggtgctggcatccgaacaccgggtggctggtgcagccgaggtcttcgggaattccagcgagggtcttattgaattttctgtggggaaatttagatacttcgagctcaataggccctttccagaggaagctattttgcatgatatttcaagcaatgtgacttttcttattttccaaatacactcacagtatcagaatacaactgtttccttttctccgactctcctttccaattcctcggaaacaggcactgccagtggactggttttcatccttagaccagagcagagtacatgcacttggtacttggggacttcaggcatacagcctgtccagaatatggctatcctactctcctactcagaaagagatcctgtccctggaggctgtaatttggagttcgatttagatattgatcccaacatttacttggagtataatttctttgaaacgactatcaagtttgccccagcaaacctaggctatgcgagaggcgtagatcccccaccatgtgacgctgggacagaccaggactccaggtggaggttgcagtatgatgtctatcagtattttctgcctgagaatgacctcactgaggagatgttgctgaagcatctgcagaggatggtcagtgtgccccaggtgaaggccagtgctctcaaggtggttaccctaacagctaatgataagacaagtgtttccttctcctccctcccgggacaaggtgtcatatacaatgtcattgtttgggacccgtttctaaatacatctgctgcctacattcctgctcacacatacgcttgcagctttgaggcaggagagggtagttgtgcttccctaggaagagtgtcttccaaagtgttcttcactctttttgccctgcttggtttcttcatttgtttctttggacacagattctggaaaacagaattattcttcataggctttatcatcatgggattcttcttttatatactgattacaagactgacacctatcaagtatgatgctgaacatactgacttgtggagtcattggctcctattcggtggttttagccattgacagttactggtccacaagcctttcctacatcactttgaacgtactcaagagagcgctcaacaaggatttccacagagctttcacaaatgtgccttttcaaactaatgacttcattatcctggcagtatggggcatgctggctgtaagtggaattacgttacagattcgaagagagagaggacgaccgttcttccctccccacccatacaagttatggaagcaagagagagagcgccgagtgacaaacattctggaccctagctaccacattcctccattgagagagaggctctatggccgattaacccagattaaagggctcttccagaaggagcagccagctggagagagaacgcctttgcttctgtagatgcccaggggcttggtcagtgtgcctcagctttggagttcatgcctggagtggttcaacagtctctggtgcaagtctaataagagatcaggcatatatatctgttctttgcataatattatggtgcccttattgatatatggtaagggtgtactaggggattaggatgattgtaagagaatgagaaagatgaccaaaaggttggtggtagggaggctttttcttatttccaaatacttgagaaattaccttttggtttacaaatctatgatcaacttattccattaaatagatacattaaaaaaattaaaaactgattcttctgcagagcactggtgtttctttttataaccccttgaaacaagtctctcacctgagcctgtctaaactttcggagggagtttattattgagtctttatctgtgacagtatttggagatttagggatttgatacttaggcctttgaattttagaatacaaaaagagaagcaagccagacatggtggctcacacctgtaatcccaatactgggaagccaaggtgggagtatcgcttgagcccaggagtttgagaccgacatgggcaacatgacaagaccccatctctacaaaaaaattaaaaaattagccaggcatggtggcacatgcctactcccagctcccaaggagactgagatgggaggatccctggagccctgaagattgaggctacagtgagccttgattgtgtcactgcactccagcttgggtgacagagaccctgtctcgagaaattaaaaaaaaaaaaaacttattttcttactaaaagcagtctgattacttagttgcatgcccttcttagtatcatacattatccaaaagttacccttggtttttttttcagtattttttaaaatttttaagttgtgataaaatacacatgaaatttaccttcttattcatgtttaagtgtaca

SEQ ID NO: 434389 - DNA, 2473 bp, Homo sapiens
acgcgcgttgggggtcaggtgccggaagaggaaacctctcgctggggctaggagttcggcggggcgcgcgccggcggctgcggagctggcaggtgcgaagcgtctgcacctggcgggcgatggcgcccgatgcgggcgccccgggatagcgtgggcgaggctgcggggccccggcgcgcacgcccgcacctctccccagccctggcgtgggcccagcccggcccaggcagcaatggggttcctgcagctgctggtcgtagcggtgctggcatccgaacaccgggtggctggtgcagccgaggtcttcgggaattccagcgaggaggcgtagatcccccaccatgtgacgctgggacagaccaggactccaggtggaggttgcagtatgatgtctatcagtattttctgcctgagaatgacctcactgaggagatgttgctgaagcatctgcagaggatggtcagtgtgccccaggtgaaggccagtgctctcaaggtggttaccctaacagctaatgataagacaagtgtttccttctcctccctcccgggacaaggtgtcatatacaatgtcattgtttgggacccgtttctaaatacatctgctgcctacattcctgctcacacatacgcttgcagctttgaggcaggagagggtagttgtgcttccctaggaagagtgtcttccaaagtgttcttcactctttttgccctgcttggtttcttcatttgtttctttggacacagattctggaaaacagaattattcttcataggctttatcatcatgggattcttcttttatatactgattacaagactgacacctatcaagtatgatgtgaatctgattctgacagctgtcactggaagcgtcggtggaatgttcttggtagctgtgtggtggcgatttggaatcctctcgatctgcatgctctgtgttggactagtgctggggttcctcatctcgtcagtgactttctttactccactgggaaacctaaagatttttcatgatgatggtgtattctgggtcactttctcttgcatagctatcctcattccagtagttttcatgggctgcctaagaatactgaacatactgacttgtggagtcattggctcctattcggtggttttagccattgacagttactggtccacaagcctttcctacatcactttgaacgtactcaagagagcgctcaacaaggatttccacagagctttcacaaatgtgccttttcaaactaatgacttcattatcctggcagtatggggcatgctggctgtaagtggaattacgttacagattcgaagagagagaggacgaccgttcttccctccccacccatacaagttatggaagcaagagagagagcgccgagtgacaaacattctggaccctagctaccacattcctccattgagagagaggctctatggccgattaacccagattaaagggctcttccagaaggagcagccagctggagagagaacgcctttgcttctgtagatgcccaggggcttggtcagtgtgcctcagctttggagttcatgcctggagtggttcaacagtctctggtgcaagtctaataagagatcaggcatatatatctgttctttgcataatattatggtgcccttattgatatatggtaagggtgtactaggggattaggatgattgtaagagaatgagaaagatgaccaaaaggttggtggtagggaggctttttcttatttccaaatacttgagaaattaccttttggtttacaaatctatgatcaacttattccattaaatagatacattaaaaaaattaaaaactgattcttctgcagagcactggtgtttctttttataaccccttgaaacaagtctctcacctgagcctgtctaaactttcggagggagtttattattgagtctttatctgtgacagtatttggagatttagggatttgatacttaggcctttgaattttagaatacaaaaagagaagcaagccagacatggtggctcacacctgtaatcccaatactgggaagccaaggtgggagtatcgcttgagcccaggagtttgagaccgacatgggcaacatgacaagaccccatctctacaaaaaaattaaaaaattagccaggcatggtggcacatgcctactcccagctcccaaggagactgagatgggaggatccctggagccctgaagattgaggctacagtgagccttgattgtgtcactgcactccagcttgggtgacagagaccctgtctcgagaaattaaaaaaaaaaaaaacttattttcttactaaaagcagtctgattacttagttgcatgcccttcttagtatcatacattatccaaaagttacccttggtttttttttcagtattttttaaaatttttaagttgtgataaaatacacatgaaatttaccttcttattcatgtttaagtgtaca

SEQ ID NO: 434390 - DNA, 1956 bp, Homo sapiens
  misc_feature (43)..(43): n is a, c, g, or t
  misc_feature (48)..(48): n is a, c, g, or t
ccattggagctcggcccccatccttccttctctcacgtcctcnctctnttcgaatctgtaacgtaattccacttacagccagcatgccccatactgccaggataatgaagtcattagtttgaaaaggcacatttgtgaaagctctgtggaaatccttgttgagcgctctcttgagtacgttcaaagtgatgtaggaaaggcttgtggaccagtaacgtgtcaatggctaaaaccaccgaatagaattattcttcataggctttatcatcatgggattcttcttttatatactgattacaagactgacacctatcaagtatgatgtgaatctgattctgacagctgtcactggaagcgtcggtggaatgttcttggtagctgtgtggtggcgatttggaatcctctcgatctgcatgctctgtgttggactagtgctggggttcctcatctcgtcagtgactttctttactccactgggaaacctaaagatttttcatgatgatggtgtattctgggtcactttctcttgcatagctatcctcattccagtagttttcatgggctgcctaagaatactgaacatactgacttgtggagtcattggctcctattcggtggttttagccattgacagttactggtccacaagcctttcctacatcactttgaacgtactcaagagagcgctcaacaaggatttccacagagctttcacaaatgtgccttttcaaactaatgacttcattatcctggcagtatggggcatgctggctgtaagtggaattacgttacagattcgaagagagagaggacgaccgttcttccctccccacccatacaagttatggaagcaagagagagagcgccgagtgacaaacattctggaccctagctaccacattcctccattgagagagaggctctatggccgattaacccagattaaagggctcttccagaaggagcagccagctggagagagaacgcctttgcttctgtagatgcccaggggcttggtcagtgtgcctcagctttggagttcatgcctggagtggttcaacagtctctggtgcaagtctaataagagatcaggcatatatatctgttctttgcataatattatggtgcccttattgatatatggtaagggtgtactaggggattaggatgattgtaagagaatgagaaagatgaccaaaaggttggtggtagggaggctttttcttatttccaaatacttgagaaattaccttttggtttacaaatctatgatcaacttattccattaaatagatacattaaaaaaattaaaaactgattcttctgcagagcactggtgtttctttttataaccccttgaaacaagtctctcacctgagcctgtctaaactttcggagggagtttattattgagtctttatctgtgacagtatttggagatttagggatttgatacttaggcctttgaattttagaatacaaaaagagaagcaagccagacatggtggctcacacctgtaatcccaatactgggaagccaaggtgggagtatcgcttgagcccaggagtttgagaccgacatgggcaacatgacaagaccccatctctacaaaaaaattaaaaaattagccaggcatggtggcacatgcctactcccagctcccaaggagactgagatgggaggatccctggagccctgaagattgaggctacagtgagccttgattgtgtcactgcactccagcttgggtgacagagaccctgtctcgagaaattaaaaaaaaaaaaaacttattttcttactaaaagcagtctgattacttagttgcatgcccttcttagtatcatacattatccaaaagttacccttggtttttttttcagtattttttaaaatttttaagttgtgataaaatacacatgaaatttaccttcttattcatgtttaagtgtaca

SEQ ID NO: 434391 - DNA, 1535 bp, Homo sapiens
ctgccactgctttcaactcgacggttctcatctctgcgtatttctttactccactggaaacctaaagatttttcatgatgatggtgtattctgggtcactttctcttgcatagctatcctcattccagtagttttcatgggctgcctaagaatactgaacatactgacttgtggagtcattggctcctattcggtggttttagccattgacagttactggtccacaagcctttcctacatcactttgaacgtactcaagagagcgctcaacaaggatttccacagagctttcacaaatgtgccttttcaaactaatgacttcattatcctggcagtatggggcatgctggctgtaagtggaattacgttacagattcgaagagagagaggacgaccgttcttccctccccacccatacaagttatggaagcaagagagagagcgccgagtgacaaacattctggaccctagctaccacattcctccattgagagagaggctctatggccgattaacccagattaaagggctcttccagaaggagcagccagctggagagagaacgcctttgcttctgtagatgcccaggggcttggtcagtgtgcctcagctttggagttcatgcctggagtggttcaacagtctctggtgcaagtctaataagagatcaggcatatatatctgttctttgcataatattatggtgcccttattgatatatggtaagggtgtactaggggattaggatgattgtaagagaatgagaaagatgaccaaaaggttggtggtagggaggctttttcttatttccaaatacttgagaaattaccttttggtttacaaatctatgatcaacttattccattaaatagatacattaaaaaaattaaaaactgattcttctgcagagcactggtgtttctttttataaccccttgaaacaagtctctcacctgagcctgtctaaactttcggagggagtttattattgagtctttatctgtgacagtatttggagatttagggatttgatacttaggcctttgaattttagaatacaaaaagagaagcaagccagacatggtggctcacacctgtaatcccaatactgggaagccaaggtgggagtatcgcttgagcccaggagtttgagaccgacatgggcaacatgacaagaccccatctctacaaaaaaattaaaaaattagccaggcatggtggcacatgcctactcccagctcccaaggagactgagatgggaggatccctggagccctgaagattgaggctacagtgagccttgattgtgtcactgcactccagcttgggtgacagagaccctgtctcgagaaattaaaaaaaaaaaaaacttattttcttactaaaagcagtctgattacttagttgcatgcccttcttagtatcatacattatccaaaagttacccttggtttttttttcagtattttttaaaatttttaagttgtgataaaatacacatgaaatttaccttcttattcatgtttaagtgtaca

SEQ ID NO: 434392 - DNA, 1662 bp, Homo sapiens
gattcttcctctaattagattttattgttgaagttccttcatatggaagatattttccatagtatttggataagctgaactgtgttttaagaactcatatggatgttgaaggttgttttcagtttatctttccagggaacttctgttcagctctgagtgggtctggtcctttttcatgcctgagggagcagatgtgattgcctgtgattgaagccagtggagagttataaactatttttgttctaacatggatgatgcctaaactcttccactcttccacactgaacatactgacttgtggagtcattggctcctattcggtggttttagccattgacagttactggtccacaagcctttcctacatcactttgaacgtactcaagagagcgctcaacaaggatttccacagagctttcacaaatgtgccttttcaaactaatgacttcattatcctggcagtatggggcatgctggctgtaagtggaattacgttacagattcgaagagagagaggacgaccgttcttccctccccacccatacaagttatggaagcaagagagagagcgccgagtgacaaacattctggaccctagctaccacattcctccattgagagagaggctctatggccgattaacccagattaaagggctcttccagaaggagcagccagctggagagagaacgcctttgcttctgtagatgcccaggggcttggtcagtgtgcctcagctttggagttcatgcctggagtggttcaacagtctctggtgcaagtctaataagagatcaggcatatatatctgttctttgcataatattatggtgcccttattgatatatggtaagggtgtactaggggattaggatgattgtaagagaatgagaaagatgaccaaaaggttggtggtagggaggctttttcttatttccaaatacttgagaaattaccttttggtttacaaatctatgatcaacttattccattaaatagatacattaaaaaaattaaaaactgattcttctgcagagcactggtgtttctttttataaccccttgaaacaagtctctcacctgagcctgtctaaactttcggagggagtttattattgagtctttatctgtgacagtatttggagatttagggatttgatacttaggcctttgaattttagaatacaaaaagagaagcaagccagacatggtggctcacacctgtaatcccaatactgggaagccaaggtgggagtatcgcttgagcccaggagtttgagaccgacatgggcaacatgacaagaccccatctctacaaaaaaattaaaaaattagccaggcatggtggcacatgcctactcccagctcccaaggagactgagatgggaggatccctggagccctgaagattgaggctacagtgagccttgattgtgtcactgcactccagcttgggtgacagagaccctgtctcgagaaattaaaaaaaaaaaaaacttattttcttactaaaagcagtctgattacttagttgcatgcccttcttagtatcatacattatccaaaagttacccttggtttttttttcagtattttttaaaatttttaagttgtgataaaatacacatgaaatttaccttcttattcatgtttaagtgtaca

SEQ ID NO: 434393 - DNA, 2443 bp, Homo sapiens
acgcgcgttgggggtcaggtgccggaagaggaaacctctcgctggggctaggagttcggcggggcgcgcgccggcggctgcggagctggcaggtgcgaagcgtctgcacctggcgggcgatggcgcccgatgcgggcgccccgggatagcgtgggcgaggctgcggggccccggcgcgcacgcccgcacctctccccagccctggcgtgggcccagcccggcccaggcagcaatggggttcctgcagctgctggtcgtagcggtgctggcatccgaacaccgggtggctggtgcagccgaggtcttcgggaattccagcgagggtcttattgaattttctgtggggaaatttagatacttcgagctcaataggccctttccagaggaagctattttgcatgatatttcaagcaatgtgacttttcttattttccaaatacactcacagtatcagaatacaactgtttccttttctccgactctcctttccaattcctcggaaacaggcactgccagtggactggttttcatccttagaccagagcagagtacatgcacttggtacttggggacttcaggcatacagcctgtccagaatatggctatcctactctcctactcagaaagagatcctgtccctggaggctgtaatttggagttcgatttagatattgatcccaacatttacttggagtataatttctttgaaacgactatcaagtttgccccagcaaacctaggctatgcgagaggcgtagatcccccaccatgtgacgctgggacagaccaggactccaggtggaggttgcagtatgatgtctatcagtattttctgcctgagaatgacctcactgaggagatgttgctgaagcatctgcagaggatggtcagtgtgccccaggtgaaggccagtgctctcaaggtggttaccctaacagctaatgataagacaagtgtttccttctcctccctcccgggacaaggtgtcatatacaatgtcattgtttgggacccgtttctaaatacatctgctgcctacattcctgctcacacatacgcttgcagctttgaggcaggagagggtagttgtgcttccctaggaagagtgtcttccaaagtgttcttcactctttttgccctgcttggtttcttcatttgtttctttggacacagattctggaaaacagaattattcttcataggctttatcatcatgggattcttcttttatatactgattacaagactgacacctatcaagtatgatgtgaatctgattctgacagctgtcactggaagcgtcggtggaatgttcttggtagctgtgtggtggcgatttggaatcctctcgatctgcatgctctgtgttggactagtgctggggttcctcatctcgtcagtgactttctttactccactgggtaggcgatatgtaacagatgttttgtgtgttcgagtgactgtttgaatactgcctaattggatttgcatcctggagtggtgttgcatgtcagtgcttctcctgtggagttctggaaatctgcattgatggtgtgacactttcagacagcaccaggactagtaaaagtccctccttcctcaaaggcacagtagatgaaatatagaatgtctttagaggtagctttgtatctatttgttgtgataagtggtatgtgtttattagaaataatggaggtaaaggaaataaggaggtaaaggctctgatggcagctgagtcggggaacctggtactttgtttctggtcttctgttgtaccctcaacctccactcccatccgctgccaaaccccaggtgtccctcaggtacttaatcaccctggggcagtagcacagggctggttctggggtttttttggtgtttttaaaaagtaattcaattgctatcagtttttaaaatctggttaacttataagttaactttctttgccattgtttaataacttacatttcctgattattgtcaaaaacaaacaaaaacagcatctgtactcaaaagtattctatttggttgtttcctttctgtgacaatgttcttaaaatactagaataaagttgatgggactgttagacataaaaatagccatttcatgaggctgtcaactctatagagaatgcaggatataatagagtacaagtcatgtgtcccttgtctctctgaagactttttttttctaagactactggatagtctgatgaaaagcagtgttgtgtaggcttggcgaaatgacagattcacatggggatgtttttgaaatacagattcaaggctctaccctacatgtgctaaataaaatacttcctaatggctgagcatggtggctcatgcctataatcccagcactttgggagaccaagtgggaggattgcttgagctcaagtttgagaccagcctgggcaacatggtgattccccatctctactga

SEQ ID NO: 434394 - DNA, 247 bp, Homo sapiens
gggaagatttggaataggacatgcacactggatcagctcagtaatttatgttttggtcgacttcctattcatgacaatgtttcttctggactgcagactctcctttccaattcctcggaaacaggcactgccagtggactggttttcatccttagaccagagcagagtacatgcacttggtacttggggacttcaggcatacagcctgtccagaatatggctatcctactctcctactcagaaagag

SEQ ID NO: 434395 - DNA, 2963 bp, Homo sapiens
gggaaggccgctgttttttcctcctggcactcagctgcctgccccccaacaataattcctcacctcccacgcacccagctcttggcagtttacaaagaccttttgcgtccccattacctcatgtgatccccacaacacccatgagaggaagatgaatcgtccgatccaagtgaagccagctgccagtgagggccgaggaggctcctgaacaggatgatctcagatcccccctcaaacaacagctggaactctgttctctatcttctagaggaccgaaagctgtttgtggggatgctgggcaagcagcagggtgaggaggacgtcagacgcctgttccagccctttggccacatcgaggagtgcacggtcctgcggagtcctgacggcaccagtaaaggctgtgcctttgtgaagttcgggagtcaaggggaagctcaggcggccatccggggtctgcacggcagccggaccatggcgggcgcctcgtccagcctcgtggtcaagctggcggacaccgaccgggagcgcgcgctgcggcggatgcagcagatggccggccacctgggcgccttccaccccgcgccactgccgctaggggcctgcggcgcctacaccacggcgatcctgcagcaccaggcggccctgctggcggcggcacagggcccaggcctaggcccggtggcggcagtggcggcccagatgcaacacgtggcggcctttagcctggtagctgcgcctctgttgcccgcggcagcagccaactccccgcctggcagcggccctggcaccctcccaggtcttccggcgcccatcggggtcaatggattcggccctctgaccccccagaccaatggccagccgggctccgacacgctctacaataacgggctctccccttatccagcccagagccccggcgtggctgaccccctgcagcaggcctacgctgggatgcaccactacgcagcagcctatccgtcggcctatgccccagtgagcacagcttttccccagcagccttcagccctgccccagcagcagagagaaggccccgaaggctgtaacctcttcatctatcacctgcctcaggagtttggtgatgcggaactcatacagacattcctgccctttggagccgttgtctctgctaaagtctttgtggatcgagccaccaaccagagcaagtgttttgggtttgttagttttgacaatccaactagtgcccagactgctattcaggcgatgaatggctttcaaattggcatgaagaggctcaaggtccagctaaagcggcccaaggatgccaaccggccttactgacctgctttcactgaccagccacagaaagaaacagaagagtgagaagaaaggagaggaaaagcacagaaacgcttgagcagcccttcccgaaggagcagctgcggacggaggtggatcggacccaaggctggtgcctggggctaaggccactctaaggattgtttttatcaagtgggttgttctgtgcctgcagcatagagcgcaggctggcagagcaaatagggctggtgaggagtgactgtccaggggaaccagcagagggcgttgggggtgccaagggcttctccgcaagggaagcccagatttacttctttcaaaatcatatcattccttagagtttagggaccaaaggactattgcttttttaagaatatatatatctatataaattaaaacaaagaaacaaacaaacaaaaaacaagacaaacaactacaaaaaaagacagtatagagtctcataaaagctgcctttaaatatccctaggagacagggtgaaggagacccttgacagccccagcctaggcagatgggggctgtggaaagattgttctgtgtctcattccctcttaagccactcccccaccctgcccttttaaaaataattaaggatttgaggtctaggctcacatgcaggtaattagaacgttatggaagcagtgaacccacaatccacaatccccaaactcagagtgcatcccagaagaggccccaggcagagctcaggttggccctggcctttgccatcccgggaggccccctagccagcaagagtgggattgcctttcctgtggaaccactgcttccccaggcgggaagaaagagggagttctggccacctgagcctttcccttgccaatccaggtagacagaggccctgcctttggctgagctgagacacctcctgtttcccttccccttgaaccagtcccagtgtccccttgctccaggctaccttctgtctcttagtctaagtttgcccacctgtaaagtagattcaggatatctgtagagggctgtgacaacagacttggaaggtttgctactgtatatactgccattgagaaggggaaatttttcaatatgtagaagcttcagaattagaggtccctctttaccccagacctgggagggaagtagatgttttgccaaaatacttcttcattcctttaaaaactacatctttcctatgcaagagtgtctcacatgtgcttaaccgaggtgcttctagttggtgagcagtgttgagcttagaagtggtgtgtgctctgtctgtctgtctttgtctgtctgttgtatacagtgggtgccatataaagctgatcaatggtggtgcttcctgcctgcttctgtgagatgggcaaaagattcagcttagaacaccatgactcaccttgccttggtcagcctttcctgggcctgtagggccttgcacatatttttcccaggaggatttcccctccaccccacaggcatggatcagcttggtctgaggccccagctgtgtggggtccctctaatccccagatgttgctgaggctgaaggcctctgatctgataacatgtcagatagtaaaagatgtgggggtgggggtggagggctcctccttcataacagtttctaagaaaacttgttcccacctgt

SEQ ID NO: 434396 - DNA, 3344 bp, Homo sapiens
gcacggggacctcaagccagaccccagcgttcagccgccacctcggcccgggcccgccccgccccggccccgcccctttcctgcccgccccaccccctctacgcccctccacccggaccccgccccctgggcagccccccgccctctccgcccgggctccgccccctccccctggccctcgccaccggtccagggaggggacggcgggacaggcgggaccagtgggaccggcgggagggctgacagggcggggacatggccgcggcgccgggagggtcagcgcagcccgctggccccggcccgcgcctgggtttcagcaccgcggacagcggcgtcggcatgagcgggctaaaccccggtcccgccgtacccatgaaggaccacgacgccatcaagctcttcgtggggcagatcccgcggggcttggacgagcaggacctcaagccgctgttcgaggagttcggccgcatctacgagctgacggtgctgaaggaccggctcaccggcctccacaaaggctgtgccttcctcacctactgcgcccgggactctgctctcaaggcccagagtgcactgcacgagcagaagaccctgccagggatgaatcgtccgatccaagtgaagccagctgccagtgagggccgaggagaggaccgaaagctgtttgtggggatgctgggcaagcagcagggtgaggaggacgtcagacgcctgttccagccctttggccacatcgaggagtgcacggtcctgcggagtcctgacggcaccagtaaaggctgtgcctttgtgaagttcgggagtcaaggggaagctcaggcggccatccggggtctgcacggcagccggaccatggcgggcgcctcgtccagcctcgtggtcaagctggcggacaccgaccgggagcgcgcgctgcggcggatgcagcagatggccggccacctgggcgccttccaccccgcgccactgccgctaggggcctgcggcgcctacaccacggcgatcctgcagcaccaggcggccctgctggcggcggcacagggcccaggcctaggcccggtggcggcagtggcggcccagatgcaacacgtggcggcctttagcctggtagctgcgcctctgttgcccgcggcagcagccaactccccgcctggcagcggccctggcaccctcccaggtcttccggcgcccatcggggtcaatggattcggccctctgaccccccagaccaatggccagccgggctccgacacgctctacaataacgggctctccccttatccagcccagagccccggcgtggctgaccccctgcagcaggcctacgctgggatgcaccactacgcagcagcctatccgtcggcctatgccccagtgagcacagcttttccccagcagccttcagccctgccccagcagcagagagaaggccccgaaggctgtaacctcttcatctatcacctgcctcaggagtttggtgatgcggaactcatacagacattcctgccctttggagccgttgtctctgctaaagtctttgtggatcgagccaccaaccagagcaagtgttttgggtttgttagttttgacaatccaactagtgcccagactgctattcaggcgatgaatggctttcaaattggcatgaagaggctcaaggtccagctaaagcggcccaaggatgccaaccggccttactgacctgctttcactgaccagccacagaaagaaacagaagagtgagaagaaaggagaggaaaagcacagaaacgcttgagcagcccttcccgaaggagcagctgcggacggaggtggatcggacccaaggctggtgcctggggctaaggccactctaaggattgtttttatcaagtgggttgttctgtgcctgcagcatagagcgcaggctggcagagcaaatagggctggtgaggagtgactgtccaggggaaccagcagagggcgttgggggtgccaagggcttctccgcaagggaagcccagatttacttctttcaaaatcatatcattccttagagtttagggaccaaaggactattgcttttttaagaatatatatatctatataaattaaaacaaagaaacaaacaaacaaaaaacaagacaaacaactacaaaaaaagacagtatagagtctcataaaagctgcctttaaatatccctaggagacagggtgaaggagacccttgacagccccagcctaggcagatgggggctgtggaaagattgttctgtgtctcattccctcttaagccactcccccaccctgcccttttaaaaataattaaggatttgaggtctaggctcacatgcaggtaattagaacgttatggaagcagtgaacccacaatccacaatccccaaactcagagtgcatcccagaagaggccccaggcagagctcaggttggccctggcctttgccatcccgggaggccccctagccagcaagagtgggattgcctttcctgtggaaccactgcttccccaggcgggaagaaagagggagttctggccacctgagcctttcccttgccaatccaggtagacagaggccctgcctttggctgagctgagacacctcctgtttcccttccccttgaaccagtcccagtgtccccttgctccaggctaccttctgtctcttagtctaagtttgcccacctgtaaagtagattcaggatatctgtagagggctgtgacaacagacttggaaggtttgctactgtatatactgccattgagaaggggaaatttttcaatatgtagaagcttcagaattagaggtccctctttaccccagacctgggagggaagtagatgttttgccaaaatacttcttcattcctttaaaaactacatctttcctatgcaagagtgtctcacatgtgcttaaccgaggtgcttctagttggtgagcagtgttgagcttagaagtggtgtgtgctctgtctgtctgtctttgtctgtctgttgtatacagtgggtgccatataaagctgatcaatggtggtgcttcctgcctgcttctgtgagatgggcaaaagattcagcttagaacaccatgactcaccttgccttggtcagcctttcctgggcctgtagggccttgcacatatttttcccaggaggatttcccctccaccccacaggcatggatcagcttggtctgaggccccagctgtgtggggtccctctaatccccagatgttgctgaggctgaaggcctctgatctgataacatgtcagatagtaaaagatgtgggggtgggggtggagggctcctccttcataacagtttctaagaaaacttgttcccacctgt

SEQ ID NO: 434397 - DNA, 6976 bp, Homo sapiens
gacgccttggacgcggttcaggaatccgccgccgctagccggctcgggcctgagcggggagggcgccaggcaggacctctcgcaggctcgctgcgcaggacggcgcccgcctggcgccgcttcccttccagcgtgccgaccggccccgcagcgcctccatccctccggcccgccccggagaagacgcacagctcgggccgcgcgggcgccggggccgcggaaccgcttctgccgggatcttccaggaggaaagcgaagttgcgagcggatgctgcccgcgccggaccccagccgcggagggtcggggccgccggtggagtctcggcggccggggacaagggtgtcccccacctgaagacggcaagctgggtcctgagtgatgcccctcagctgagtgtccaaggctggcccgaggagcccccacggccccacctttccccatggagaaaggactcactttgccccaggactgccgggactttgtgcacagcctgaagatgagaagcaaatacgcccttttcttggtttttgtggtgatagtttttgtcttcatcgaaaaggaaaataaaatcatatcaagggtctcagacaagctgaagcagattccccaagctctagcagatgccaacagcaccgacccagccctgatcttagctgagaacgcatctctcttgtccctgagcgagctcgattcagccttctcccagcttcagagccgtctccgcaacctcagcttgcagctgggcgtggagccagccatggaggccgcaggggaggaagaggaagagcagagaaaggaggaggagccgcccagaccggccgtggcggggccccggcgccacgtgctgctcatggccaccacgcgcaccggctcctcgttcgtgggcgagttcttcaaccagcagggcaacatcttctacctcttcgagccgctgtggcacatcgagcgcacagtgtccttcgagccggggggcgccaacgccgcgggctcggccctggtgtaccgcgacgtgctcaagcagctcttcctgtgcgacctgtacgtgctggagcacttcatcacgccgctgcccgaggaccacctgactcagttcatgttccgccggggctccagccgctccctgtgcgaggaccccgtctgtacgcccttcgtcaagaaggtcttcgagaagtaccactgcaagaaccgccgctgcggccccctcaacgtgacgctggccgcagaggcctgccgccgcaaggagcacatggccctcaaggcggtgcgcatccggcagctggagttcctgcagccgctggccgaggacccccgcctggacctgcgcgtcatccagctggtgcgcgacccccgggccgtgctggcctcgcgcatggtggccttcgccggcaagtataagacctggaagaagtggctggacgacgagggccaggacggcctgagggaagaggaggtgcagcggctgcggggcaactgcgagagcatccgcctgtccgcggagctggggctgcggcagcccgcctggctgcggggccgctacatgctggtgcgctacgaggacgtggcacgcgggccgctgcagaaggcccgcgagatgtaccgcttcgccggcatccccctgaccccgcaggtggaagactggatccaaaagaacacgcaggcggcccacgacggcagcggcatctactccacgcagaagaactcctcggagcagttcgagaagtggcgcttcagcatgcccttcaagctggcccaggtggtgcaggccgcctgcggccctgccatgcgcctcttcggctacaaactggcgcgggacgccgccgccctcaccaaccgctcagtcagcctgctggaggagaggggcaccttctgggtcacgtaggggggccggggccccgtatgcccctcctcgtgaaaggcctgccccgtctttctgccgcagccctcgcagagggcgggtgcacagcgccatgagcgggcagcgcctcctgtagcagtagggcccccagacagcgctccagccaaagcggcggccccagggttaattgcggagaacaggacagtgcccggtccccttgagggccatcacacccagacccaacgggttgcagcctcctgagcaggcctaggcaggcccgggcctgttggcaagcttcgatctcacacacacagaaacatacattcgtgcctggagaccctgcaggccagagtccaaatatttaacaatcagaaggggcaaggctctgaccagtgacagtcagacctcctgctttatttggtgttaaccgtttcttgtctggatggtgaagtctggaatctgggtgggtccttggaggaggggctaggacagccgtgggtgtcaaaggtggcatttgaggctcgtttgaggtgacagtggctgtttaccaactagtacagagcgattcagcgttttcatgaatgggttggctgtgctggttactgatgaatatgggccccttatagagctgcaaaacacacacatgcgtatagacatacatacatgtacaccatacatagacaagcatcataaaggcacaagtgcacacacatctatgcagacaagcttcctcgctgcttatgcccacagggtttttctgtatgacacacctcagaggagcctgtgcttaacatttgtaggattatttcgagggcagggcaggggaaagaaacgcgttaaagggccatgacatgacacagttccctggccgggtttggactgaacagtggattcagaactgcagcgttcaaagcccctgcccgccttagattctcatggctacctcctctgacccatccacatccttgcggctggcaggcaggatgttttgaaatggtgcagccaaaggccccgtctagcttggctggctcccgaacatgtccatatttgaaggctgcctcaggcctggcaggcagaagcagctgtggtccctggaggcaaaaggcagctcacggggccttccatttccagccaggcctcatctggggtagggccaagaggaaagtacagagtgcccgtgggggagaagtcccaccaggatgccccccctcccctgagaagcccgccttctccctcgtggacaggagtcagccagttggttgctgtggttacagccagtgcctgaattcctccttagggccctgggaagagtattgcttaacgcaggatgtgctgggtgttttgtttcgggcttttatttatggcttggtgtctttcttgtttcatggctgtgtttttgcttttgtttctgtaggagcgcctcttccaagcagtggaggcctgagggcttgagggaggctggggaaaaccagcagggagcacttggctcctggcagagggagaggacaggaggaggagccttccccaggaggaacgaggagaggtggccacgtggcaggccacagtgccctatgggcttttctgtttgaaccccatgtgggatgaatctcaaagccaccagcgttcttgcctagtgtccagagcagcagagatttgcagccctcgcccctccctgagaagaagctggatttgaaaatccctcacaggccctaacatgtttcctgggtgggcaggggcctcatgacaagcgacaagtgtacccagagtagaaggccttccccactcccacctcaaacccaggagcagaactcagtatccagagcttacaaggagctgcaagggtttgccgagggctgcccagctctgcttctggtttcctggacaatttctctgtcagatacggcccattgtaaacccagagggctgcattttgggttgagtaatatggacaccatggaagtacaggatctgagtccaacattgccatgggggagggaagagtgtgtcctggcaggaagccaccattggagaaggtgaggccagtaaccatctcatgggattcgctataatcagcctatttgagctgctgggtctctgtcactgtggactccagtcattcaaggaggtctccactcttgggttttttttattttcttttcttttgctattttgcctgaacaccccaacactcttggttttagagtccaagagtaagttgtgcagagacatggttctaatttggagttcaaaggaacaccagctctgaaaacatgaccgtggggccaggatgtttctggcaggcccagaagtgctggccgttcttccccagcctccccactgctccctcctctgttccccatgtggaggtcggaggggctgggactggggagggggcagccacctccatccaaggctcttcctaggggccctgctaatgtggacagtagactttatccctccttcttactctgggccaagacctcccactccgccctctgaggatggtaccaagaatgggcctttgggacttctcaggacattgacaatgtgcacactgcaggttgacttaatttatttattttttgaaaagaagagacagaaaataccttattatctgcagggactcaaagctgtacccaaatcaagaaagacaaaataacaatagaaaccattcacacactccgttcatgcatggacaccagaagacgattcagaacacaagaggagaatgagctggagcgccagcaccacgatggccccaggacgttgtttaagatctgagatcccttggtttctctcttgttgatctgagatgctacatcagggcccttgctgctgtattacctctgcccgggtgtttgagacaggtcacaagcgcgtggatgtttcctggaagtgtattcccctggggctcagcgatgctctgggaacccttggggtttggggaaggacagtgtggtgtgactattggcttgaaacgttatggatatggttggagtcacccatgtggatatgattttcagcttggagctgggatggagaagatggaagcactggtggccgggcctctttttccagcgaggccagccctggcttctcctctgttccagcttgtctgccagaagccttcccctgcaaggtgcccacctgcccggagacagagggagcagctgaggcctctctccactggccgccagcctccctagcacaaggggaccattcagcaatgagtgtttactcatgttctttcttgttgatgagttctgcggcccagcatatagaaatggctcagaacgttccaggccttggtgagacacagcagcgtccaatgctcacaggctgtccccactctgcctgttcccatcttcccctcgggacctgtttataaattgaggaatggatgagggccctggagggtccttgggagtagttagtggagggcaggattctcaggtccccatagagagggaaagagaagaccagatgtgcatagaagccagtctctgtcacatacaccgcaggtggtcaccgagttattttccaaaagctgaggaacataaagcaaatttaggctttgtccttctgcaatacatgcacttgaaaataaacagaaaagagatgtttaataacaagtttacttccggtctgctagcaccctcagcctgggagctactgccagaggctggcgtagtggggcagctgctgaccaaaccccacagaacagagggcaccaggcatcacacgacatctttccctcccatctctgccatctgtctgtctggcaatggaaggagcttcagcaggaggtccttcccagaaggttgattcttggcctgggtggtagaggagatatcctgaccctaaagtcttccagccccgggtcatcctctcctatactagggcctattgaccgtagaggccaggtgcggtggctcatacctgtaatcccagcatttggggaggccaaggtgggaggattgcttgagcccaagagttggagaccagcctgggcaacatggtgagaccaattgactgtagggcttgtcccttgctaagacaggagcagaagactggatggctgtgtcctcaaggcagtcccctcccatccccattcccaaagtcagaaagtgaagccagatctcaagggctgatacctgaggcaaggagagctaaggggagagaaattggggctgagtggaagcagatgcctgcacaagccaagtgtgtcttattgatctgtacaagctgatagaaggaccatctgctgaaatccagggctcctgagttggtgggtttgcttgtgaagcttctaggacaaggcgcagccagatggaagggagagggtccagggcttcctaaatgcagccgcatcacctgtcaactcgctgcagtttcagagacagtggaagctgctctttacctcaaaagcacaaagcagaattggcaacttcacatgtctcaagagctccaagatcctttggtctcgtgtcctttggcaccccgtaactggactggggacaaatttgttacgtgtttccaaggctacagacatggcgccatcctcacaggcctagctcatgtcatggatcaggtgctttgctggggggatacaatgacccatgtggtctgcgtcttctgccattggcttgaactgggcaccccctgaagtctccatctcagctgtatattctagtccaaattttcctggctcccctgctccctcccaggtcctgcacactgtctttttgccaacacctcagccctgtttgctatttcatgtctgcatggtacgagacaccccttcacggcatacactgccatggtatgtacatatgcatccacgtgtgtgtatgtgtagcatgtagctcattctgctcagcctctggcgccgttccacattgctcccagccccattgctgtcactgtcgtcccagatgtccttgccatggccacagacaatctgccgtctcctggaaacgctggggctgcccttcagagagctggcagccccagcagtcagggcctgctttgcagaatagaatgtgaacccaactcctgatggcctacttgacttatttaattaaagatgaaatcatgcaatgagcaaaacctgcagcgtg

SEQ ID NO: 434398 - DNA, 5120 bp, Homo sapiens
  misc_feature (165)..(165): n is a, c, g, or t
ttcctcgctgcttatgcccacagggtttttctgtatgacacacctcagaggagcctgtgattaacatttgtaggattatttcgagggcagggcaggggaaagaaacgcgttaaagggccatgacatgacacagttccctggccgggtttggactgaacagtggantcagaactgcagcgttcaaagcccctgcccgccttagattctcatggctacctcctctgacccatccacatccttgcggctggcaggcaggatgttttgaaatggtgcaggcccgggcctgttggcaagcttcgatctcacacacacagaaacatacattcgtgcctggagaccctgcaggccagagtccaaatatttaacaatcagaaggggcaaggctctgaccagtgacagtcagacctcctgctttatttggtgttaaccgtttcttgtctggatggtgaagtctggaatctgggtgggtccttggaggaggggctaggacagccgtgggtgtcaaaggtggcatttgaggctcgtttgaggtgacagtggctgtttaccaactagtacagagcgattcagcgttttcatgaatgggttggctgtgctggttactgatgaatatgggccccttatagagctgcaaaacacacacatgcgtatagacatacatacatgtacaccatacatagacaagcatcataaaggcacaagtgcacacacatctatgcagacaagcttcctcgctgcttatgcccacagggtttttctgtatgacacacctcagaggagcctgtgcttaacatttgtaggattatttcgagggcagggcaggggaaagaaacgcgttaaagggccatgacatgacacagttccctggccgggtttggactgaacagtggattcagaactgcagcgttcaaagcccctgcccgccttagattctcatggctacctcctctgacccatccacatccttgcggctggcaggcaggatgttttgaaatggtgcagccaaaggccccgtctagcttggctggctcccgaacatgtccatatttgaaggctgcctcaggcctggcaggcagaagcagctgtggtccctggaggcaaaaggcagctcacggggccttccatttccagccaggcctcatctggggtagggccaagaggaaagtacagagtgcccgtgggggagaagtcccaccaggatgccccccctcccctgagaagcccgccttctccctcgtggacaggagtcagccagttggttgctgtggttacagccagtgcctgaattcctccttagggccctgggaagagtattgcttaacgcaggatgtgctgggtgttttgtttcgggcttttatttatggcttggtgtctttcttgtttcatggctgtgtttttgcttttgtttctgtaggagcgcctcttccaagcagtggaggcctgagggcttgagggaggctggggaaaaccagcagggagcacttggctcctggcagagggagaggacaggaggaggagccttccccaggaggaacgaggagaggtggccacgtggcaggccacagtgccctatgggcttttctgtttgaaccccatgtgggatgaatctcaaagccaccagcgttcttgcctagtgtccagagcagcagagatttgcagccctcgcccctccctgagaagaagctggatttgaaaatccctcacaggccctaacatgtttcctgggtgggcaggggcctcatgacaagcgacaagtgtacccagagtagaaggccttccccactcccacctcaaacccaggagcagaactcagtatccagagcttacaaggagctgcaagggtttgccgagggctgcccagctctgcttctggtttcctggacaatttctctgtcagatacggcccattgtaaacccagagggctgcattttgggttgagtaatatggacaccatggaagtacaggatctgagtccaacattgccatgggggagggaagagtgtgtcctggcaggaagccaccattggagaaggtgaggccagtaaccatctcatgggattcgctataatcagcctatttgagctgctgggtctctgtcactgtggactccagtcattcaaggaggtctccactcttgggttttttttattttcttttcttttgctattttgcctgaacaccccaacactcttggttttagagtccaagagtaagttgtgcagagacatggttctaatttggagttcaaaggaacaccagctctgaaaacatgaccgtggggccaggatgtttctggcaggcccagaagtgctggccgttcttccccagcctccccactgctccctcctctgttccccatgtggaggtcggaggggctgggactggggagggggcagccacctccatccaaggctcttcctaggggccctgctaatgtggacagtagactttatccctccttcttactctgggccaagacctcccactccgccctctgaggatggtaccaagaatgggcctttgggacttctcaggacattgacaatgtgcacactgcaggttgacttaatttatttattttttgaaaagaagagacagaaaataccttattatctgcagggactcaaagctgtacccaaatcaagaaagacaaaataacaatagaaaccattcacacactccgttcatgcatggacaccagaagacgattcagaacacaagaggagaatgagctggagcgccagcaccacgatggccccaggacgttgtttaagatctgagatcccttggtttctctcttgttgatctgagatgctacatcagggcccttgctgctgtattacctctgcccgggtgtttgagacaggtcacaagcgcgtggatgtttcctggaagtgtattcccctggggctcagcgatgctctgggaacccttggggtttggggaaggacagtgtggtgtgactattggcttgaaacgttatggatatggttggagtcacccatgtggatatgattttcagcttggagctgggatggagaagatggaagcactggtggccgggcctctttttccagcgaggccagccctggcttctcctctgttccagcttgtctgccagaagccttcccctgcaaggtgcccacctgcccggagacagagggagcagctgaggcctctctccactggccgccagcctccctagcacaaggggaccattcagcaatgagtgtttactcatgttctttcttgttgatgagttctgcggcccagcatatagaaatggctcagaacgttccaggccttggtgagacacagcagcgtccaatgctcacaggctgtccccactctgcctgttcccatcttcccctcgggacctgtttataaattgaggaatggatgagggccctggagggtccttgggagtagttagtggagggcaggattctcaggtccccatagagagggaaagagaagaccagatgtgcatagaagccagtctctgtcacatacaccgcaggtggtcaccgagttattttccaaaagctgaggaacataaagcaaatttaggctttgtccttctgcaatacatgcacttgaaaataaacagaaaagagatgtttaataacaagtttacttccggtctgctagcaccctcagcctgggagctactgccagaggctggcgtagtggggcagctgctgaccaaaccccacagaacagagggcaccaggcatcacacgacatctttccctcccatctctgccatctgtctgtctggcaatggaaggagcttcagcaggaggtccttcccagaaggttgattcttggcctgggtggtagaggagatatcctgaccctaaagtcttccagccccgggtcatcctctcctatactagggcctattgaccgtagaggccaggtgcggtggctcatacctgtaatcccagcatttggggaggccaaggtgggaggattgcttgagcccaagagttggagaccagcctgggcaacatggtgagaccaattgactgtagggcttgtcccttgctaagacaggagcagaagactggatggctgtgtcctcaaggcagtcccctcccatccccattcccaaagtcagaaagtgaagccagatctcaagggctgatacctgaggcaaggagagctaaggggagagaaattggggctgagtggaagcagatgcctgcacaagccaagtgtgtcttattgatctgtacaagctgatagaaggaccatctgctgaaatccagggctcctgagttggtgggtttgcttgtgaagcttctaggacaaggcgcagccagatggaagggagagggtccagggcttcctaaatgcagccgcatcacctgtcaactcgctgcagtttcagagacagtggaagctgctctttacctcaaaagcacaaagcagaattggcaacttcacatgtctcaagagctccaagatcctttggtctcgtgtcctttggcaccccgtaactggactggggacaaatttgttacgtgtttccaaggctacagacatggcgccatcctcacaggcctagctcatgtcatggatcaggtgctttgctggggggatacaatgacccatgtggtctgcgtcttctgccattggcttgaactgggcaccccctgaagtctccatctcagctgtatattctagtccaaattttcctggctcccctgctccctcccaggtcctgcacactgtctttttgccaacacctcagccctgtttgctatttcatgtctgcatggtacgagacaccccttcacggcatacactgccatggtatgtacatatgcatccacgtgtgtgtatgtgtagcatgtagctcattctgctcagcctctggcgccgttccacattgctcccagccccattgctgtcactgtcgtcccagatgtccttgccatggccacagacaatctgccgtctcctggaaacgctggggctgcccttcagagagctggcagccccagcagtcagggcctgctttgcagaatagaatgtgaacccaactcctgatggcctacttgacttatttaattaaagatgaaatcatgcaatgagcaaaacctgcagcgtg

SEQ ID NO: 434399 - DNA, 535 bp, Homo sapiens
acaaatcttgcccccagtccagagggtcctaatctgagaactccaaaatacagcctggagacaaatggtggggagggtttcccctaaatttggacatctccagattaagacctccgccgaatccgtgaggctttccctctccaaggagctcctaagagaatttcccagtaaaatcgcctcaactgcggtaaataggctgttccccgcgccagcatttgagaagagctggtccccagagtgtaaaggagttaggatgttggcaggaggaaggatgtgtcgccggatgaggaaaagaaagaatagggaaatttggatgcagagacacagagaaaatgccatgtgaagatggatcagagacagaagtgatgcggctgcaagccaaggaatgtgaagaatggccagccaccaccggaagctaggggagacgccagcacagattctccctgagagtatccagaagaaaccaaccctccaacacctggatttcagacttctgaccttgagaagtgtgagccaataaaacaactgcagtgga

SEQ ID NO: 434400 - DNA, 932 bp, Homo sapiens
ggtgcaagcctgtaatcccagctgttcaggaggctgaggcatgagaattgcttgaacccaggaggtggaggttgcagtgagctgaaattgcaccactgcactccaggctgggtgaccgagcaagactctgtctcaaaaaaaagaaaaaaaaacttattttttgagacagagtctcactctgtcgcccaggctggattgcagtggggcaaacacagttcactgcagcctcaatttcttgggctcaagcaactatcctgcctcagcctcccgaggagtagctgggatcataggtgcttgccaccacacctggctaattttttaaatattttgtagacacagggtcttgccacattgcccaggctggtcttgaactcctgggctcaagttatcctcccgcctcggtctcccaaagttctggaattacagatgttagttaccacccggaccaattttaggattcctttagccagtgaccttggtgtgaccttgtacttctgcagcattttataccttctgcggcacacccttgtagtgggtcgaattgtgttcccccaaaagatatgttctagtcctaattcccagtacctgtgaatgtgacttatttagaaatagggtctttgcagatgtaatctagttcaaatgaggtcatactggattagggcgggtcctcatccaataactgttgttcttattagaatagggaaatttggatgcagagacacagagaaaatgccatgtgaagatggatcagagacagaagtgatgcggctgcaagccaaggaatgtgaagaatggccagccaccaccggaagctaggggagacgccagcacagattctccctgagagtatccagaagaaaccaaccctccaacacctggatttcagacttctgaccttgagaagtgtgagccaataaaacaactgcagtgga

SEQ ID NO: 434401 - DNA, 289 bp, Homo sapiens
aattaataagggaaagctaatggccgggcagcacctatgatataattttagagaccaggattatgccatgtttagacacagagaaaatgccatgtgaagatggatcagagacagaagtgatgcggctgcaagccaaggaatgtgaagaatggccagccaccaccggaagctaggggagacgccagcacagattctccctgagagtatccagaagaaaccaaccctccaacacctggatttcagacttctgaccttgagaagtgtgagccaataaaacaactgcagtgga

SEQ ID NO: 434402 - DNA, 280 bp, Homo sapiens
  misc_feature (29)..(29): n is a, c, g, or t
  misc_feature (32)..(32): n is a, c, g, or t
atagtacaggccacaacgacggaagaganccnccccttcccgactaatcggtgagtcgtcttagagacacagagaaaatgccatgtgaagatggatcagagacagaagtgatgcggctgcaagccaaggaatgtgaagaatggccagccaccaccggaagctaggggagacgccagcacagattctccctgagagtatccagaagaaaccaaccctccaacacctggatttcagacttctgaccttgagaagtgtgagccaataaaacaactgcagtgga

SEQ ID NO: 434403 - DNA, 957 bp, Homo sapiens
ggtgcaagcctgtaatcccagctgttcaggaggctgaggcatgagaattgcttgaacccaggaggtggaggttgcagtgagctgaaattgcaccactgcactccaggctgggtgaccgagcaagactctgtctcaaaaaaaagaaaaaaaaacttattttttgagacagagtctcactctgtcgcccaggctggattgcagtggggcaaacacagttcactgcagcctcaatttcttgggctcaagcaactatcctgcctcagcctcccgaggagtagctgggatcataggtgcttgccaccacacctggctaattttttaaatattttgtagacacagggtcttgccacattgcccaggctggtcttgaactcctgggctcaagttatcctcccgcctcggtctcccaaagttctggaattacagatgttagttaccacccggaccaattttaggattcctttagccagtgaccttggtgtgaccttgtacttctgcagcattttataccttctgcggcacacccttgtagtgggtcgaattgtgttcccccaaaagatatgttctagtcctaattcccagtacctgtgaatgtgacttatttagaaatagggtctttgcagatgtaatctagttcaaatgaggtcatactggattagggcgggtcctcatccaataactgttgttcttattagaatagggaaatttggatgcagagacacagagaaaatgccatgtgaagatggatcagagacagaagtgatgcggctgcaagccaaggaatgtgaagaatggccagccaccaccggaagctaggggagacgccagcacagattctccctgagagtatccagaagaaaccaaccctccaacacctggatttcagacttctgaccttgagaagtgtgagccaataaaacaactgcagtggagtcagtggttcttgttttaagccac

SEQ ID NO: 434404 - DNA, 424 bp, Homo sapiens
ccaaggagcgagtccaccgaggccatcgccaggtggagcggcggccccggcgaggtaccctcggccagcaggagggagaagcggagggcgcgtcccagaggcgggggccaagggtctgccactcacccgcgccttcggcgggctgcggcggcccgacgacgccgttcaggtagagaatgggcagcagaatagggaaatttggatgcagagacacagagaaaatgccatgtgaagatggatcagagacagaagtgatgcggctgcaagccaaggaatgtgaagaatggccagccaccaccggaagctaggggagacgccagcacagattctccctgagagtatccagaagaaaccaaccctccaacacctggatttcagacttctgaccttgagaagtgtgagccaataaaacaactgcagtgga

SEQ ID NO: 434405 - DNA, 991 bp, Homo sapiens
cgggagccgcaacctagaagccagagttgtgtatcagattcaactaggagaaaatcccacctccaggctccattaatccttccaatggagtggaagtttctctcacagagaaactagtaaggggatccaatgggaaaagaacgttcacacggactagaagacgaaaccaatggaatggaaaattgtcctcgcgttggtagaagcagccaatgagatgaaaagagcccgcctccaaagtggctgcagaggcaatggggtgaatcgtgctcagaggcgcgctccaatggggtagcagggctcgcccggccgccactaccccgcttccccgcgcccggagtccccacccacggccggccgcggagccgagtgctgacccgggtgagaggttcccgcggctcagggaagatggcggcagccgtggtgctggctgctgggttgcgcgcggcgcgcagagccgtggcggccacgggggtgcgcggggggcaggtccgaggagctgcaggtgtgactgatgggaatgaagtggccaaggcccagcaggcaactcctgggggagcagccccaaccatcttctcccggatcctggacaagagcctcccagctgacattctctatgaggaccagcagtgtcttgtgttccgtgatgtggcccctcaggctcctgtgcacttcctggtcattcctaagaagcccattcctcggattagccaggctgaagaagaagaccagcagcttctaggacacctactccttgtggccaagcagacagcaaaggctgagggcctgggagatggataccgacttgtgatcaacgatgggaagctgggtgcacaatctgtgtatcatctgcacattcatgtacttgggggccggcagctccagtggcctccaggttgaacctgccaactgattaaaggacaccagactctggatgcttggatggaaagggaaaaatggaccctgtgatgctaataaaactgttctcccttaa

SEQ ID NO: 434406 - DNA, 1195 bp, Homo sapiens
cgggagccgcaacctagaagccagagttgtgtatcagattcaactaggagaaaatcccacctccaggctccattaatccttccaatggagtggaagtttctctcacagagaaactagtaaggggatccaatgggaaaagaacgttcacacggactagaagacgaaaccaatggaatggaaaattgtcctcgcgttggtagaagcagccaatgagatgaaaagagcccgcctccaaagtggctgcagaggcaatggggtgaatcgtgctcagaggcgcgctccaatggggtagcagggctcgcccggccgccactaccccgcttccccgcgcccggagtccccacccacggccggccgcggagccgagtgctgacccgggtgagaggttcccgcggctcagggaagatggcggcagccgtggtgctggctgctgggttgcgcgcggcgcgcagagccgtggcggccacgggggtgcgcggggggcaggtccgaggagctgcaggtgtgactgatgggaatgaagtggccaaggcccagcaggcaactcctgggggagcagccccaaccatcttctcccggatcctggacaagagcctcccagctgacattctctatgaggaccagcagtgtcttgtgttccgtgatgtggcccctcaggctcctgtgcacttcctggtcattcctaagaagcccattcctcggattagccaggctgaagaagaagaccagcagcttctaggacacctactccttgtggccaagcagacagcaaaggctgagggcctgggagatggataccgacttgtgatcaacgatgggaagctgggtgcacaatctgtgtatcatctgcacattcatgtacttgggggccggcagctccagtggcctccaggttgaacctgccaactgattaaaggacaccagactctggatgcttggatggaaagggaaaaatggaccctgtgatgctaataaaactgttctcccttaaaaaaaaaaataaaaaaacaaaaaaaaaaaaactctcggggggcctttattgcggggggggggaaaaagggggcatgcacagcgcgccccggggccaaacagcgggtttccgggccccagtttttctggcaccacgggggcgaaactggggggggccccaataggggggcccgataaacccagaaagcccgggttacccggtagc

SEQ ID NO: 434407 - DNA, 838 bp, Homo sapiens
cgggagccgcaacctagaagccagagttgtgtatcagattcaactaggagaaaatcccacctccaggctccattaatccttccaatggagtggaagtttctctcacagagaaactagtaaggggatccaatgggaaaagaacgttcacacggactagaagacgaaaccaatggaatggaaaattgtcctcgcgttggtagaagcagccaatgagatgaaaagagcccgcctccaaagtggctgcagaggcaatggggtgaatcgtgctcagaggcgcgctccaatggggtagcagggctcgcccggccgccactaccccgcttccccgcgcccggagtccccacccacggccggccgcggagccgagtgctgacccgggtgagaggttcccgcggctcagggaagatggcggcagccgtggtgctggctgctgggttgcgcgcggcgcgcagagccgtggcggccacgggggtgcgcggggggcaggtgagaagtggcgcgggagcgagtagggggtcctgcgggctccgaagccatccggggccagggggtcccgaaggcgcgcagagccgcgcagagctcctgcctgtggcctctgcccctccgaggcacaagctccggggctgtgtggtgaggtcgaactggtggctccggagaacgagctggtgctgattcccgccctgcgcaggccggggcgccgaggtcgggacagggtcagtgcagcggtgccgccttctttccactgcctgcagcccagctggcccgatgcccctgcaggaaatgagctttctcttcttggagccagtgctctgccctcctcaggcttctggcctcctaa

SEQ ID NO: 434408 - DNA, 974 bp, Homo sapiens
aggcttaaagatcagaaaacaagtaacggaaataagtggaaatgtactaacaaggtgagagtggaaagagattcaagccatcgcaagagattatggaaaccatccctttattttatattagaagctgagagaaggaatttatctgaggtaattcagtggtatggtaaggtaggaactgagaccaaaatccccagtctctcattctagatcctttccctaaacagtgctatatttcgtggacacatgagcaggaatcaattgcactgctgaatcctgataataataccgcctgttatctaaccaggtccagcaccttctggccctaccctttgctgctggtgctctgaaattcaggaactttcctcctgggtgggaacgatgaataggttattagaaggacgaaattaacaactatcagagcccagcttctgccagctccctcctttgaatatggtcgatccaccttcaggtccgaggagctgcaggtgtgactgatgggaatgaagtggccaaggcccagcaggcaactcctgggggagcagccccaaccatcttctcccggatcctggacaagagcctcccagctgacattctctatgaggaccagcagtgtcttgtgttccgtgatgtggcccctcaggctcctgtgcacttcctggtcattcctaagaagcccattcctcggattagccaggctgaagaagaagaccagcagcttctaggacacctactccttgtggccaagcagacagcaaaggctgagggcctgggagatggataccgacttgtgatcaacgatgggaagctgggtgcacaatctgtgtatcatctgcacattcatgtacttgggggccggcagctccagtggcctccaggttgaacctgccaactgattaaaggacaccagactctggatgcttggatggaaagggaaaaatggaccctgtgatgctaataaaactgttctcccttaa

SEQ ID NO: 434409 - DNA, 1111 bp, Homo sapiens
cgggagccgcaacctagaagccagagttgtgtatcagattcaactaggagaaaatcccacctccaggctccattaatccttccaatggagtggaagtttctctcacagagaaactagtaaggggatccaatgggaaaagaacgttcacacggactagaagacgaaaccaatggaatggaaaattgtcctcgcgttggtagaagcagccaatgagatgaaaagagcccgcctccaaagtggctgcagaggcaatggggtgaatcgtgctcagaggcgcgctccaatggggtagcagggctcgcccggccgccactaccccgcttccccgcgcccggagtccccacccacggccggccgcggagccgagtgctgacccgggtgagaggttcccgcggctcagggaagatggcggcagccgtggtgctggctgctgggttgcgcgcggcgcgcagagccgtggcggccacgggggtgcgcggggggcaggtccgaggagctgcaggtgtgactgatgggaatgaagtggccaaggcccagcaggcaactcctgggggagcagccccaaccatcttctcccggatcctggacaagagcctcccagctgacattctctatgaggaccagcagtgtcttgtgttccgtgatgtggcccctcaggctcctgtgcacttcctggtcattcctaagaagcccattcctcggattagccaggctgaagaagaagaccagcagcttctaggacacctactccttgtggccaagcagacagcaaaggctgagggcctgggagatggataccgacttggtgagtgacttttggcccttggtccctcacctatgaattctcattcctacttctcaatatgatcttcattcttcgacctctgccatgatcctgactccctaaccccaagctcaatttcagtgatcaacgatgggaagctgggtgcacaatctgtgtatcatctgcacattcatgtacttgggggccggcagctccagtggcctccaggttgaacctgccaactgattaaaggacaccagactctggatgcttggatggaaagggaaaaatggaccctgtgatgctaataaaactgttctcccttaa

SEQ ID NO: 434410 - DNA, 1003 bp, Homo sapiens
aggcttaaagatcagaaaacaagtaacggaaataagtggaaatgtactaacaaggtgagagtggaaagagattcaagccatcgcaagagattatggaaaccatccctttattttatattagaagctgagagaaggaatttatctgaggtaattcagtggtatggtaaggtaggaactgagaccaaaatccccagtctctcattctagatcctttccctaaacagtgctatatttcgtggacacatgagcaggaatcaattgcactgctgaatcctgataataataccgcctgttatctaaccaggtccagcaccttctggccctaccctttgctgctggtgctctgaaattcaggaactttcctcctgggtgggaacgatgaataggttattagaaggacgaaattaacaactatcagagcccagcttctgccagctccctcctttgaatatggtcgatccaccttcaggtccgaggagctgcaggtgtgactgatgggaatgaagtggccaaggcccagcaggcaactcctgggggagcagccccaaccatcttctcccggatcctggacaagagcctcccagctgacattctctatgaggaccagcagtgtcttgtgttccgtgatgtggcccctcaggctcctgtgcacttcctggtcattcctaagaagcccattcctcggattagccaggctgaagaagaagaccagcagccacctatgtccctccgctctctctatagcttctaggacacctactccttgtggccaagcagacagcaaaggctgagggcctgggagatggataccgacttgtgatcaacgatgggaagctgggtgcacaatctgtgtatcatctgcacattcatgtacttgggggccggcagctccagtggcctccaggttgaacctgccaactgattaaaggacaccagactctggatgcttggatggaaagggaaaaatggaccctgtgatgctaataaaactgttctcccttaa

SEQ ID NO: 434411 - DNA, 788 bp, Homo sapiens
aggcttaaagatcagaaaacaagtaacggaaataagtggaaatgtactaacaaggtgagagtggaaagagattcaagccatcgcaagagattatggaaaccatccctttattttatattagaagctgagagaaggaatttatctgaggtaattcagtggtatggtaaggtaggaactgagaccaaaatccccagtctctcattctagatcctttccctaaacagtgctatatttcgtggacacatgagcaggaatcaattgcactgctgaatcctgataataataccgcctgttatctaaccaggtccagcaccttctggccctaccctttgctgctggtgctctgaaattcaggaactttcctcctgggtgggaacgatgaataggttattagaaggacgaaattaacaactatcagagcccagcttctgccagctccctcctttgaatatggtcgatccaccttcaggtccgaggagctgcaggtgtgactgatgggaatgaagtggccaaggcccagcaggcaactcctgggggagcagccccaaccatcttctcccggatcctggacaagagcctcccagctgacattctctatgaggaccagcagtgtcttgtgttccgtgatgtggcccctcaggctcctgtgcacttcctggtcattcctaagaagcccattcctcggattagccaggctgaagaagaagaccagcaggtgggaagaacagggccagggtttggctgggaggagcccctggacccagctagaggtcttgctccctatgaat

SEQ ID NO: 434412 - DNA, 883 bp, Homo sapiens
cgggagccgcaacctagaagccagagttgtgtatcagattcaactaggagaaaatcccacctccaggctccattaatccttccaatggagtggaagtttctctcacagagaaactagtaaggggatccaatgggaaaagaacgttcacacggactagaagacgaaaccaatggaatggaaaattgtcctcgcgttggtagaagcagccaatgagatgaaaagagcccgcctccaaagtggctgcagaggcaatggggtgaatcgtgctcagaggcgcgctccaatggggtagcagggctcgcccggccgccactaccccgcttccccgcgcccggagtccccacccacggccggccgcggagccgagtgctgacccgggtccgaggagctgcaggtgtgactgatgggaatgaagtggccaaggcccagcaggcaactcctgggggagcagccccaaccatcttctcccggatcctggacaagagcctcccagctgacattctctatgaggaccagcagtgtcttgtgttccgtgatgtggcccctcaggctcctgtgcacttcctggtcattcctaagaagcccattcctcggattagccaggctgaagaagaagaccagcagcttctaggacacctactccttgtggccaagcagacagcaaaggctgagggcctgggagatggataccgacttgtgatcaacgatgggaagctgggtgcacaatctgtgtatcatctgcacattcatgtacttgggggccggcagctccagtggcctccaggttgaacctgccaactgattaaaggacaccagactctggatgcttggatggaaagggaaaaatggaccctgtgatgctaataaaactgttctcccttaa

SEQ ID NO: 434413 - DNA, 1157 bp, Homo sapiens
cgggagccgcaacctagaagccagagttgtgtatcagattcaactaggagaaaatcccacctccaggctccattaatccttccaatggagtggaagtttctctcacagagaaactagtaaggggatccaatgggaaaagaacgttcacacggactagaagacgaaaccaatggaatggaaaattgtcctcgcgttggtagaagcagccaatgagatgaaaagagcccgcctccaaagtggctgcagaggcaatggggtgaatcgtgctcagaggcgcgctccaatggggtagcagggctcgcccggccgccactaccccgcttccccgcgcccggagtccccacccacggccggccgcggagccgagtgctgacccgggtgagaggttcccgcggctcagggaagatggcggcagccgtggtgctggctgctgggttgcgcgcggcgcgcagagccgtggcggccacgggggtgcgcggggggcaggtccgaggagctgcaggtgtgactgatgggaatgaagtggccaaggcccagcaggcaactcctgggggagcagccccaaccatcttctcccggatcctggacaagagcctcccagctgacattctctatgaggaccagcaggctcctgtgcacttcctggtcattcctaagaagcccattcctcggattagccaggctgaagaagaagaccagcagcttctaggacacctactccttgtggccaagcagacagcaaaggctgagggcctgggagatggataccgacttgtgatcaacgatgggaagctgggtgcacaatctgtgtatcatctgcacattcatgtacttgggggccggcagctccagtggcctccaggttgaacctgccaactgattaaaggacaccagactctggatgcttggatggaaagggaaaaatggaccctgtgatgctaataaaactgttctcccttaaaaaaaaaaaaaaaaaagagaaacaacagcggccacaaacaaacaaagaacacacaaaaaaggacaccgacaaaacgcgaaaaagaagaacaaaagagacgaaagaacaagacacggcagggcgacacaacgcagacacgcagagagcgaacggagagacgaacgagcagagaacaaaaacacaagagacgagcgac

SEQ ID NO: 434414 - DNA, 2649 bp, Homo sapiens
cgcccacgccgcagccacaaaatggcggcgggtgggagcggcgggcgtgcgtcgtgcccgccgggggtcggggtcggcccgggcacggggggcagtcccgggcccagcgccaacgccgccgccaccccggcccccggcaacgcggccgccgccgccgccgccgccgccgccgccgccgccgcccctgggccgacgccgcccgccccgccgggccccgggacagacgcgcaggccgcgggcgcggagcgggcggaggaggcggcgggcccgggggcggcggcgctgcagcgcgaggccgcgtacaactggcaggccagcaagcccaccgtgcaggagcgcttcgccttcctcttcaacaacgaggtgctgtgcgacgtgcacttcctggtgggcaaggggctcagctcgcagcgcatccccgcgcacaggttcgtgctggccgtgggcagcgccgtctttgatgccatgttcaacgggggaatggccacaacatccacggagattgagctgcccgacgtggaacccgctgccttcctcgcactgctcaagtttctctactcggacgaggtgcagattggcccggagacggtgatgaccacgctatacaccgccaagaagtacgcggtgccagcgctcgaggcccattgcgtggagttcctgaagaagaacctgcgagccgacaacgccttcatgctgctcacgcaggcgcgactcttcgatgaaccgcagctggccagcctgtgcctggagaacatcgacaaaaacactgcagacgccatcaccgcggagggcttcaccgacattgacctggacacgctggtggctgtcctggagcgcgacacactgggcatccgtgaggtgcggctgttcaatgccgttgtccgctggtccgaggccgagtgtcagcggcagcagctgcaggtgacgccagagaacaggcggaaggttctgggcaaggccctgggcctcattcgcttcccgctcatgaccatcgaggagttcgctgcaggtcccgcacagtcgggcatcctggtggaccgcgaggtggtcagcctcttcctgcacttcaccgtcaaccccaagccacgagtggagttcattgaccggccccgctgctgcctgcgtgggaaggagtgcagcatcaaccgcttccagcaggtggagagtcgctggggctacagcgggaccagtgaccgcatcaggttctcagtcaacaagcgcatcttcgtggtgggatttgggctgtatggatccatccacgggcccaccgactaccaagtgaacatccagattattcacaccgatagcaacaccgtcttgggccagaacgacacgggcttcagctgcgacggctcagccagcaccttccgcgtcatgttcaaggagccggtggaggtgctgcccaacgtcaactacacggcctgtgccacgctcaagggcccagactcccactacggcaccaaaggcctgcgcaaggtgacacacgagtcgcccaccacgggcgccaagacctgcttcaccttttgctacgcggccgggaacaacaatggcacatccgtggaggacggccagatccccgaggtcatcttctacacctaggctgcccgacaccgacaccgccctccctccgtggggatagccgcagccccaggccatcatctgctgctggggtccccccaccacgcggtgccaggcccagtgtcccccaggccgtctgtccactccatgccacctttctcagcatcaggacggggttgccctgtgttcaccacgagtgtggctgctggatcagggcagccggggaggtggccaggccagtggccaggccctgtggagacaatccctcaggactagggacagggctgtgccggcctgggccagggcccacggacccgcagctcagggcgcctgcccacgtcgtctgccggcggtgcgccgcgggcgtccctcgcgtctcttcactgcacattgcaatgcatttgcgattcccatttctctgctaggagccagcctgggtggcgctgctcccagagccgtgggtcccagaccttgcgttccttttgttcctgtccgtttatcaggacacgggccccacctgtcacgtgcccgaggccacccaagcccagcctgcggggcgttcccactgcctggatgccggcttgagttctgcgcacgcaggattcagtgtggggacggcccctgccggataggcctagccctggcccaggtggtgagcggtttgcagtgtccgttctcatccacctgatgggcccagataaaggcccccgctgtccagcctccctggacggccctcgcggtccctgcagcccaagatgggactcagaccctgtgccccagagctcccctgccgcagaatggggccccagccggccccgaccgggtccaggagcactgctcgcctgtacatactgttgccctagcccacctggtgccgtgggagccacccccaggtgctgggggcacagcccctccccactccggccacgcccccacccaccccgcgtgtttctgccctgtgactcctggaacctgcgtcctccccaaagccatgggaggggtgtcctcctcagaccatgcccccagatgatttttttaaataaagaaacaaatgcacctgccttgagcgca

SEQ ID NO: 434415 - DNA, 2677 bp, Homo sapiens
ggtcgccttgctggagaggcctctgcctgagctgagaggaggctggagctcactccccgggcttcatcttgtggctgcctcagcctccctgcccctaaaaccactacgaacccacttgagaggtgtcctcgggaggatgcccgcagaaaggcctgcccgggtccctgctggcataggcccttccagcaccttccactaactaagcctctgtttccctaagagcacaggcgtcctccagctctgtcacctgactgtcagaagtcatgtctgctgtttgtcttgggatggagctgccggggacacggcccctcccaccacaagtggccaagggcatgttgtggtcgggaagcttcaccggtcggccccggccacctcacctctgcctgccactcggggtcctgggccctgctgccccccgagtgcagctgcaacgccccttttgcctaaagcagcaggccctgccgacagggacctgagcatctttttcttccttccttggcctctgaggtcctgagagggaactccccaactctcccgccccagtcagcggtcacaggggagtctctgggcccacaacagggccggcctggtggctgagaccttggtggctcctggccacgctcaggaaggcccgtgtggtcagggctgcatttgaaccggccccgcactggggatctgccgagggctgggtgctgatgtccccaccgcgccccccgtcgatgtctcttgccaggcgcgactcttcgatgaaccgcagctggccagcctgtgcctggagaacatcgacaaaaacactgcagacgccatcaccgcggagggcttcaccgacattgacctggacacgctggtggctgtcctggagcgcgacacactgggcatccgtgaggtgcggctgttcaatgccgttgtccgctggtccgaggccgagtgtcagcggcagcagctgcaggtgacgccagagaacaggcggaaggttctgggcaaggccctgggcctcattcgcttcccgctcatgaccatcgaggagttcgctgcaggtcccgcacagtcgggcatcctggtggaccgcgaggtggtcagcctcttcctgcacttcaccgtcaaccccaagccacgagtggagttcattgaccggccccgctgctgcctgcgtgggaaggagtgcagcatcaaccgcttccagcaggtggagagtcgctggggctacagcgggaccagtgaccgcatcaggttctcagtcaacaagcgcatcttcgtggtgggatttgggctgtatggatccatccacgggcccaccgactaccaagtgaacatccagattattcacaccgatagcaacaccgtcttgggccagaacgacacgggcttcagctgcgacggctcagccagcaccttccgcgtcatgttcaaggagccggtggaggtgctgcccaacgtcaactacacggcctgtgccacgctcaagggcccagactcccactacggcaccaaaggcctgcgcaaggtgacacacgagtcgcccaccacgggcgccaagacctgcttcaccttttgctacgcggccgggaacaacaatggcacatccgtggaggacggccagatccccgaggtcatcttctacacctaggctgcccgacaccgacaccgccctccctccgtggggatagccgcagccccaggccatcatctgctgctggggtccccccaccacgcggtgccaggcccagtgtcccccaggccgtctgtccactccatgccacctttctcagcatcaggacggggttgccctgtgttcaccacgagtgtggctgctggatcagggcagccggggaggtggccaggccagtggccaggccctgtggagacaatccctcaggactagggacagggctgtgccggcctgggccagggcccacggacccgcagctcagggcgcctgcccacgtcgtctgccggcggtgcgccgcgggcgtccctcgcgtctcttcactgcacattgcaatgcatttgcgattcccatttctctgctaggagccagcctgggtggcgctgctcccagagccgtgggtcccagaccttgcgttccttttgttcctgtccgtttatcaggacacgggccccacctgtcacgtgcccgaggccacccaagcccagcctgcggggcgttcccactgcctggatgccggcttgagttctgcgcacgcaggattcagtgtggggacggcccctgccggataggcctagccctggcccaggtggtgagcggtttgcagtgtccgttctcatccacctgatgggcccagataaaggcccccgctgtccagcctccctggacggccctcgcggtccctgcagcccaagatgggactcagaccctgtgccccagagctcccctgccgcagaatggggccccagccggccccgaccgggtccaggagcactgctcgcctgtacatactgttgccctagcccacctggtgccgtgggagccacccccaggtgctgggggcacagcccctccccactccggccacgcccccacccaccccgcgtgtttctgccctgtgactcctggaacctgcgtcctccccaaagccatgggaggggtgtcctcctcagaccatgcccccagatgatttttttaaataaagaaacaaatgcacctgccttgagcgca

SEQ ID NO: 434416 - DNA, 2339 bp, Homo sapiens
gatcttgctctgttgcccaggctggagggcagtggtggagtcatagctcatcaaaagctcaaccttccaggctcaagtgatgcttccgtctcagccttctgagtagctgggacaacaggttcgtgctggccgtgggcagcgccgtctttgatgccatgttcaacgggggaatggccacaacatccacggagattgagctgcccgacgtggaacccgctgccttcctcgcactgctcaagtttctctactcggacgaggtgcagattggcccggagacggtgatgaccacgctatacaccgccaagaagtacgcggtgccagcgctcgaggcccattgcgtggagttcctgaagaagaacctgcgagccgacaacgccttcatgctgctcacgcaggcgcgactcttcgatgaaccgcagctggccagcctgtgcctggagaacatcgacaaaaacactgcagacgccatcaccgcggagggcttcaccgacattgacctggacacgctggtggctgtcctggagcgcgacacactgggcatccgtgaggtgcggctgttcaatgccgttgtccgctggtccgaggccgagtgtcagcggcagcagctgcaggtgacgccagagaacaggcggaaggttctgggcaaggccctgggcctcattcgcttcccgctcatgaccatcgaggagttcgctgcaggtcccgcacagtcgggcatcctggtggaccgcgaggtggtcagcctcttcctgcacttcaccgtcaaccccaagccacgagtggagttcattgaccggccccgctgctgcctgcgtgggaaggagtgcagcatcaaccgcttccagcaggtggagagtcgctggggctacagcgggaccagtgaccgcatcaggttctcagtcaacaagcgcatcttcgtggtgggatttgggctgtatggatccatccacgggcccaccgactaccaagtgaacatccagattattcacaccgatagcaacaccgtcttgggccagaacgacacgggcttcagctgcgacggctcagccagcaccttccgcgtcatgttcaaggagccggtggaggtgctgcccaacgtcaactacacggcctgtgccacgctcaagggcccagactcccactacggcaccaaaggcctgcgcaaggtgacacacgagtcgcccaccacgggcgccaagacctgcttcaccttttgctacgcggccgggaacaacaatggcacatccgtggaggacggccagatccccgaggtcatcttctacacctaggctgcccgacaccgacaccgccctccctccgtggggatagccgcagccccaggccatcatctgctgctggggtccccccaccacgcggtgccaggcccagtgtcccccaggccgtctgtccactccatgccacctttctcagcatcaggacggggttgccctgtgttcaccacgagtgtggctgctggatcagggcagccggggaggtggccaggccagtggccaggccctgtggagacaatccctcaggactagggacagggctgtgccggcctgggccagggcccacggacccgcagctcagggcgcctgcccacgtcgtctgccggcggtgcgccgcgggcgtccctcgcgtctcttcactgcacattgcaatgcatttgcgattcccatttctctgctaggagccagcctgggtggcgctgctcccagagccgtgggtcccagaccttgcgttccttttgttcctgtccgtttatcaggacacgggccccacctgtcacgtgcccgaggccacccaagcccagcctgcggggcgttcccactgcctggatgccggcttgagttctgcgcacgcaggattcagtgtggggacggcccctgccggataggcctagccctggcccaggtggtgagcggtttgcagtgtccgttctcatccacctgatgggcccagataaaggcccccgctgtccagcctccctggacggccctcgcggtccctgcagcccaagatgggactcagaccctgtgccccagagctcccctgccgcagaatggggccccagccggccccgaccgggtccaggagcactgctcgcctgtacatactgttgccctagcccacctggtgccgtgggagccacccccaggtgctgggggcacagcccctccccactccggccacgcccccacccaccccgcgtgtttctgccctgtgactcctggaacctgcgtcctccccaaagccatgggaggggtgtcctcctcagaccatgcccccagatgatttttttaaataaagaaacaaatgcacctgccttgagcgca

SEQ ID NO: 434417 - DNA, 2535 bp, Homo sapiens
gccgcttgcattgtttcgctctgtatgttgctgtgcttagtgctgccatgtgtgtgggccgtgtcgtcttctttcgctgcttgtggtgcctctgtgtatggtgcgctgctggcttcgtgttccggcttgggtgacgcctctgtctgtccgccttccccgtaaatgtctctaccatgtccgtggccacttctctctcggcggctattgccggtggtttaccccctcaccccgtaattgttgtatgtcccctcgggcttaatattcttgggggttgggggcccactgttgtcaccgccccccagtggggtcttcctcccaagggcccggcggcccgcgttttttcccgccgagcggttgttactcggcggccccgcgtcggtgtttatttcggccccctcttggggccccctcttttcccaaaaatgggttctcctttttgtggcccccccgggggttttttttttgcgccccccccccttttttttttgtttgttttgtttttttttttttttttttttttttttttttttgtgttgataaagctttatttataaacacactcacagggccagatttgggccacgggccatagttgccagcccggctttaactgctggtcctcacgttagtctcactgcctcctgcagggtgggcatgtgggtgtcgtgttcacgcagccccttcctccaccccacagacacgctggtggctgtcctggagcgcgacacactgggcatccgtgaggtgcggctgttcaatgccgttgtccgctggtccgaggccgagtgtcagcggcagcagctgcaggtgacgccagagaacaggcggaaggttctgggcaaggccctgggcctcattcgcttcccgctcatgaccatcgaggagttcgctgcaggtcccgcacagtcgggcatcctggtggaccgcgaggtggtcagcctcttcctgcacttcaccgtcaaccccaagccacgagtggagttcattgaccggccccgctgctgcctgcgtgggaaggagtgcagcatcaaccgcttccagcaggtggagagtcgctggggctacagcgggaccagtgaccgcatcaggttctcagtcaacaagcgcatcttcgtggtgggatttgggctgtatggatccatccacgggcccaccgactaccaagtgaacatccagattattcacaccgatagcaacaccgtcttgggccagaacgacacgggcttcagctgcgacggctcagccagcaccttccgcgtcatgttcaaggagccggtggaggtgctgcccaacgtcaactacacggcctgtgccacgctcaagggcccagactcccactacggcaccaaaggcctgcgcaaggtgacacacgagtcgcccaccacgggcgccaagacctgcttcaccttttgctacgcggccgggaacaacaatggcacatccgtggaggacggccagatccccgaggtcatcttctacacctaggctgcccgacaccgacaccgccctccctccgtggggatagccgcagccccaggccatcatctgctgctggggtccccccaccacgcggtgccaggcccagtgtcccccaggccgtctgtccactccatgccacctttctcagcatcaggacggggttgccctgtgttcaccacgagtgtggctgctggatcagggcagccggggaggtggccaggccagtggccaggccctgtggagacaatccctcaggactagggacagggctgtgccggcctgggccagggcccacggacccgcagctcagggcgcctgcccacgtcgtctgccggcggtgcgccgcgggcgtccctcgcgtctcttcactgcacattgcaatgcatttgcgattcccatttctctgctaggagccagcctgggtggcgctgctcccagagccgtgggtcccagaccttgcgttccttttgttcctgtccgtttatcaggacacgggccccacctgtcacgtgcccgaggccacccaagcccagcctgcggggcgttcccactgcctggatgccggcttgagttctgcgcacgcaggattcagtgtggggacggcccctgccggataggcctagccctggcccaggtggtgagcggtttgcagtgtccgttctcatccacctgatgggcccagataaaggcccccgctgtccagcctccctggacggccctcgcggtccctgcagcccaagatgggactcagaccctgtgccccagagctcccctgccgcagaatggggccccagccggccccgaccgggtccaggagcactgctcgcctgtacatactgttgccctagcccacctggtgccgtgggagccacccccaggtgctgggggcacagcccctccccactccggccacgcccccacccaccccgcgtgtttctgccctgtgactcctggaacctgcgtcctccccaaagccatgggaggggtgtcctcctcagaccatgcccccagatgatttttttaaataaagaaacaaatgcacctgccttgagcgca

SEQ ID NO: 434418 - DNA, 2561 bp, Homo sapiens
cgcccacgccgcagccacaaaatggcggcgggtgggagcggcgggcgtgcgtcgtgcccgccgggggtcggggtcggcccgggcacggggggcagtcccgggcccagcgccaacgccgccgccaccccggcccccggcaacgcggccgccgccgccgccgccgccgccgccgccgccgccgcccctgggccgacgccgcccgccccgccgggccccgggacagacgcgcaggccgcgggcgcggagcgggcggaggaggcggcgggcccgggggcggcggcgctgcagcgcgaggccgcgtacaactggcaggccagcaagcccaccgtgcaggagcgcttcgccttcctcttcaacaacgaggtgctgtgcgacgtgcacttcctggtgggcaaggggctcagctcgcagcgcatccccgcgcacaggttcgtgctggccgtgggcagcgccgtctttgatgccatgttcaacgggggaatggccacaacatccacggagattgagctgcccgacgtggaacccgctgccttcctcgcactgctcaagtttctctactcggacgaggtgcagattggcccggagacggtgatgaccacgctatacaccgccaagaagtacgcggtgccagcgctcgaggcccattgcgtggagttcctgaagaagaacctgcgagccgacaacgccttcatgctgctcacgcaggcgcgactcttcgatgaaccgcagctggccagcctgtgcctggagaacatcgacaaaaacactgcagacgccatcaccgcggagggcttcaccgacattgacctggacacgctggtggctgtcctggagcgcgacacactgggcatccgtgaggtgcggctgttcaatgccgttgtccgctggtccgaggccgagtgtcagcggcagcagctgcaggtcccgcacagtcgggcatcctggtggaccgcgaggtggtcagcctcttcctgcacttcaccgtcaaccccaagccacgagtggagttcattgaccggccccgctgctgcctgcgtgggaaggagtgcagcatcaaccgcttccagcaggtggagagtcgctggggctacagcgggaccagtgaccgcatcaggttctcagtcaacaagcgcatcttcgtggtgggatttgggctgtatggatccatccacgggcccaccgactaccaagtgaacatccagattattcacaccgatagcaacaccgtcttgggccagaacgacacgggcttcagctgcgacggctcagccagcaccttccgcgtcatgttcaaggagccggtggaggtgctgcccaacgtcaactacacggcctgtgccacgctcaagggcccagactcccactacggcaccaaaggcctgcgcaaggtgacacacgagtcgcccaccacgggcgccaagacctgcttcaccttttgctacgcggccgggaacaacaatggcacatccgtggaggacggccagatccccgaggtcatcttctacacctaggctgcccgacaccgacaccgccctccctccgtggggatagccgcagccccaggccatcatctgctgctggggtccccccaccacgcggtgccaggcccagtgtcccccaggccgtctgtccactccatgccacctttctcagcatcaggacggggttgccctgtgttcaccacgagtgtggctgctggatcagggcagccggggaggtggccaggccagtggccaggccctgtggagacaatccctcaggactagggacagggctgtgccggcctgggccagggcccacggacccgcagctcagggcgcctgcccacgtcgtctgccggcggtgcgccgcgggcgtccctcgcgtctcttcactgcacattgcaatgcatttgcgattcccatttctctgctaggagccagcctgggtggcgctgctcccagagccgtgggtcccagaccttgcgttccttttgttcctgtccgtttatcaggacacgggccccacctgtcacgtgcccgaggccacccaagcccagcctgcggggcgttcccactgcctggatgccggcttgagttctgcgcacgcaggattcagtgtggggacggcccctgccggataggcctagccctggcccaggtggtgagcggtttgcagtgtccgttctcatccacctgatgggcccagataaaggcccccgctgtccagcctccctggacggccctcgcggtccctgcagcccaagatgggactcagaccctgtgccccagagctcccctgccgcagaatggggccccagccggccccgaccgggtccaggagcactgctcgcctgtacatactgttgccctagcccacctggtgccgtgggagccacccccaggtgctgggggcacagcccctccccactccggccacgcccccacccaccccgcgtgtttctgccctgtgactcctggaacctgcgtcctccccaaagccatgggaggggtgtcctcctcagaccatgcccccagatgatttttttaaataaagaaacaaatgcacctgccttgagcgca

SEQ ID NO: 434419 - DNA, 2656 bp, Homo sapiens
  misc_feature (2630)..(2630): n is a, c, g, or t
cgcccacgccgcagccacaaaatggcggcgggtgggagcggcgggcgtgcgtcgtgcccgccgggggtcggggtcggcccgggcacggggggcagtcccgggcccagcgccaacgccgccgccaccccggcccccggcaacgcggccgccgccgccgccgccgccgccgccgccgccgccgcccctgggccgacgccgcccgccccgccgggccccgggacagacgcgcaggccgcgggcgcggagcgggcggaggaggcggcgggcccgggggcggcggcgctgcagcgcgaggccgcgtacaactggcaggccagcaagcccaccgtgcaggagcgcttcgccttcctcttcaacaacgaggtgctgtgcgacgtgcacttcctggtgggcaaggggctcagctcgcagcgcatccccgcgcacaggttcgtgctggccgtgggcagcgccgtctttgatgccatgttcaacgggggaatggccacaacatccacggagattgagctgcccgacgtggaacccgctgccttcctcgcactgctcaagtttctctactcggacgaggtgcagattggcccggagacggtgatgaccacgctatacaccgccaagaagtacgcggtgccagcgctcgaggcccattgcgtggagttcctgaagaagaacctgcgagccgacaacgccttcatgctgctcacgcaggcgcgactcttcgatgaaccgcagctggccagcctgtgcctggagaacatcgacaaaaacactgcagacgccatcaccgcggagggcttcaccgacattgacctggacacgctggtggctgtcctggagcgcgacacactgggcatccgtgaggtgcggctgttcaatgccgttgtccgctggtccgaggccgagtgtcagcggcagcagctgcaggtgacgccagagaacaggcggaaggttctgggcaaggccctgggcctcattcgcttcccgctcatgaccatcgaggagttcgctgcaggtcccgcacagtcgggcatcctggtggaccgcgaggtggtcagcctcttcctgcacttcaccgtcaaccccaagccacgagtggagttcattgaccggccccgctgctgcctgcgtgggaaggagtgcagcatcaaccgcttccagcaggtggagagtcgctggggctacagcgggaccagtgaccgcatcaggttctcagtcaacaagcgcatcttcgtggtgggatttgggctgtatggatccatccacgggcccaccgactaccaagtgaacatccagattattcacaccgatagcaacaccgtcttgggccagaacgacacgggcttcagctgcgacggctcagccagcaccttccgcgtcatgttcaaggagccggtggaggtgctgcccaacgtcaactacacggcctgtgccacgctcaagggcccagactcccactacggcaccaaaggcctgcgcaaggtgacacacgagtcgcccaccacgggcgccaagacctgcttcaccttttgctacgcggccgggaacaacaatggcacatccgtggaggacggccagatccccgaggtcatcttctacacctaggctgcccgacaccgacaccgccctccctccgtggggatagccgcagccccaggccatcatctgctgctggggtccccccaccacgcggtgccaggcccagtgtcccccaggccgtctgtccactccatgccacctttctcagcatcaggacggggttgccctgtgttcaccacgagtgtggctgctggatcagggcagccggggaggtggccaggccagtggccaggccctgtggagacaatccctcaggactagggacagggctgtgccggcctgggccagggcccacggacccgcagctcagggcgcctgcccacgtcgtctgccggcggtgcgccgcgggcgtccctcgcgtctcttcactgcacattgcaatgcatttgcgattcccatttctctgctaggagccagcctgggtggcgctgctcccagagccgtgggtcccagaccttgcgttccttttgttcctgtccgtttatcaggacacgggccccacctgtcacgtgcccgaggccacccaagcccagcctgcggggcgttcccactgcctggatgccggcttgagttctgcgcacgcaggattcagtgtggggacggcccctgccggataggcctagccctggcccaggtggtgagcggtttgcagtgtccgttctcatccacctgatgggcccagataaaggcccccgctgtccagcctccctggacggccctcgcggtccctgcagcccaagatgggactcagaccctgtgccccagagctcccctgccgcagaatggggccccagccggccccgaccgggtccaggagcactgctcgcctgtacatactgttgccctagcccacctggtgccgtgggagccacccccaggtgctgggggcacagcccctccccactccggccacgcccccacccaccccgcgtgtttctgccctgtgactcctggaacctgcgtcctccccaaagccatgggaggggtgtcctcctcagacacatagcacataaaaacccgatggatgtttttttagnaattagagagaaaacaagaaacccag

SEQ ID NO: 434420 - DNA, 2003 bp, Homo sapiens
cgcccacgccgcagccacaaaatggcggcgggtgggagcggcgggcgtgcgtcgtgcccgccgggggtcggggtcggcccgggcacggggggcagtcccgggcccagcgccaacgccgccgccaccccggcccccggcaacgcggccgccgccgccgccgccgccgccgccgccgccgccgcccctgggccgacgccgcccgccccgccgggccccgggacagacgcgcaggccgcgggcgcggagcgggcggaggaggcggcgggcccgggggcggcggcgctgcagcgcgaggccgcgtacaactggcaggccagcaagcccaccgtgcaggagcgcttcgccttcctcttcaacaacgaggtgctgtgcgacgtgcacttcctggtgggcaaggggctcagctcgcagcgcatccccgcgcacaggttcgtgctggccgtgggcagcgccgtctttgatgccatgttcaacgggggaatggccacaacatccacggagattgagctgcccgacgtggaacccgctgccttcctcgcactgctcaagtttctctactcggacgaggtgcagattggcccggagacggtgatgaccacgctatacaccgccaagaagtacgcggtgccagcgctcgaggcccattgcgtggagttcctgaagaagaacctgcgagccgacaacgccttcatgctgctcacgcaggcgcgactcttcgatgaaccgcagctggccagcctgtgcctggagaacatcgacaaaaacactgcagacgccatcaccgcggagggcttcaccgacattgacctggacacgctggtggctgtcctggagcgcgacacactgggcatccgtgaggtgcggctgttcaatgccgttgtccgctggtccgaggccgagtgtcagcggcagcagctgcaggtgacgccagagaacaggcggaaggttctgggcaaggccctgggcctcattcgcttcccgctcatgaccatcgaggagttcgctgcaggtcccgcacagtcgggcatcctggtggaccgcgaggtggtcagcctcttcctgcacttcaccgtcaaccccaagccacgagtggagttcattgaccggccccgctgctgcctgcgtgggaaggagtgcagcatcaaccgcttccagcaggtggagagtcgctggggctacagcgggaccagtgaccgcatcaggttctcagtcaacaagcgcatcttcgtggtgggatttgggctgtatggatccatccacgggcccaccgactaccaagtgaacatccagattattcacaccgatagcaacaccgtcttgggccagaacgacacgggcttcagctgcgacggctcagccagcaccttccgcgtcatgttcaaggagccggtggaggtgctgcccaacgtcaactacacggcctgtgccacgctcaagggcccagactcccactacggcaccaaaggcctgcgcaaggtgacacacgagtcgcccaccacgggcgccaagacctgcttcaccttttgctacgcggccgggaacaacaatggcacatccgtggaggacggccagatccccgaggtcatcttctacacctaggctgcccgacaccgacaccgccctccctccgtggggatagccgcagccccaggccatcatctgctgctggggtccccccaccacgcggtgccaggcccagtgtcccccaggccgtctgtccactccatgccacctttctcagcatcaggacggggttgccctgtgttcaccacgagtgtggctgctggatcagggcagccggggaggtggccaggccagtggccaggccctgtggagacaatccctccccactccggccacgcccccacccaccccgcgtgtttctgccctgtgactcctggaacctgcgtcctccccaaagccatgggaggggtgtcctcctcagaccatgcccccagatgatttttttaaataaagaaacaaatgcacctgccttgagcgca

SEQ ID NO: 434421 - DNA, 828 bp, Homo sapiens
cgcccacgccgcagccacaaaatggcggcgggtgggagcggcgggcgtgcgtcgtgcccgccgggggtcggggtcggcccgggcacggggggcagtcccgggcccagcgccaacgccgccgccaccccggcccccggcaacgcggccgccgccgccgccgccgccgccgccgccgccgccgcccctgggccgacgccgcccgccccgccgggccccgggacagacgcgcaggccgcgggcgcggagcgggcggaggaggcggcgggcccgggggcggcggcgctgcagcgcgaggccgcgtacaactggcaggccagcaagcccaccgtgcaggagcgcttcgccttcctcttcaacaacgaggtgctgtgcgacgtgcacttcctggtgggcaaggggctcagctcgcagcgcatccccgcgcacaggttcgtgctggccgtgggcagcgccgtctttgatgccatgttcaacgggggaatggccacaacatccacggagattgagctgcccgacgtggaacccgctgccttcctcgcactgctcaagtttctctactcggacgaggtgcagattggcccggagacggtgatgaccacgctatacaccgccaagaagtacgcggtgccagcgctcgaggcccattgcgtggagttcctgaagaagaacctgcgagccgacaacgccttcatgctgctcacgcaggctggagtgcaatggcgcgatctcagctcactgcaaccttcgcctccagcgttcaagcgattctcctgcctcagcctccacagtagctgggattacaggcccccaccaccgcgcctggctaaa

SEQ ID NO: 434422 - DNA, 1797 bp, Homo sapiens
gccgcttgcattgtttcgctctgtatgttgctgtgcttagtgctgccatgtgtgtgggccgtgtcgtcttctttcgctgcttgtggtgcctctgtgtatggtgcgctgctggcttcgtgttccggcttgggtgacgcctctgtctgtccgccttccccgtaaatgtctctaccatgtccgtggccacttctctctcggcggctattgccggtggtttaccccctcaccccgtaattgttgtatgtcccctcgggcttaatattcttgggggttgggggcccactgttgtcaccgccccccagtggggtcttcctcccaagggcccggcggcccgcgttttttcccgccgagcggttgttactcggcggccccgcgtcggtgtttatttcggccccctcttggggccccctcttttcccaaaaatgggttctcctttttgtggcccccccgggggttttttttttgcgccccccccccttttttttttgtttgttttgtttttttttttttttttttttttttttttttttgtgttgataaagctttatttataaacacactcacagggccagatttgggccacgggccatagttgccagcccggctttaactgctggtcctcacgttagtctcactgcctcctgcagggtgggcatgtgggtgtcgtgttcacgcagccccttcctccaccccacagacacgctggtggctgtcctggagcgcgacacactgggcatccgtgaggtgcggctgttcaatgccgttgtccgctggtccgaggccgagtgtcagcggcagcagctgcaggtgacgccagagaacaggcggaaggttctgggcaaggccctgggcctcattcgcttcccgctcatgaccatcgaggagttcgctgcaggtaacagagctcgggctcaggggctggtttgggaggggagtggcacacaggtgggcatctgggtaccgaggatagtgcccccgagttcactgcggaaagcctggcagatgcctggcatatacagataggaagaaacctggcttgtgaggacgcgtccacagggccatctgttagccccggcccggctctgtccccaccgtgcacactgccagaccccgcctctcgtgtctgtccagctgttttggtggcatcttcccaggagggaagggagtccccgtctcgcgcccttgtgctacctgctggtgcaggtaccagtgtctgtgacgagctcaggagggctctgacatggccggggtggctgtcatgcgcccgagtgggccttggggtcccctgctgcagggcctgggttccagggtgacgtgaaggggcagcgctaacgatgcctcctgccctcgtggctgctcactgcctgacgccatccagctctggagcaaaacaggcctggaactttccagaaggggctgggacagagccctggggctggtgcacactcgccgtctggccttccccaggtccacgcggcccccgctcttgcttagctgaaggtcgccagatttagcaagagggtctctgtcgcccaggctgagtgcggtggtacaatcacagctcactgcagcctcgacctcctgggctcaagtgatcctcctgcttcagactccggagtagctgggatcacaggtgccaccaccacacaaggcttatatttgtatttttttgtggggacagggtcttgctatgtcacctgggctggtcatgaactgggctccagccatcctcccatctcggcctcacaaagtgctgggattatggacatgggccaccgagcctggctagatacatac

SEQ ID NO: 434423 - DNA, 1948 bp, Homo sapiens
catggggcgggggcctcctgggctattgtacaaataaacctgaggcaggaaaaaaaaaaaaaacactgcagacgccatcaccgcggagggcttcaccgacattgacctggacacgctggtggctgtcctggagcgcgacacactgggcatccgtgaggtgcggctgttcaatgccgttgtccgctggtccgaggccgagtgtcagcggcagcagctgcaggtgacgccagagaacaggcggaaggttctgggcaaggccctgggcctcattcgcttcccgctcatgaccatcgaggagttcgctgcaggtcccgcacagtcgggcatcctggtggaccgcgaggtggtcagcctcttcctgcacttcaccgtcaaccccaagccacgagtggagttcattgaccggccccgctgctgcctgcgtgggaaggagtgcagcatcaaccgcttccagcaggtggagagtcgctggggctacagcgggaccagtgaccgcatcaggttctcagtcaacaagcgcatcttcgtggtgggatttgggctgtatggatccatccacgggcccaccgactaccaagtgaacatccagattattcacaccgatagcaacaccgtcttgggccagaacgacacgggcttcagctgcgacggctcagccagcaccttccgcgtcatgttcaaggagccggtggaggtgctgcccaacgtcaactacacggcctgtgccacgctcaagggcccagactcccactacggcaccaaaggcctgcgcaaggtgacacacgagtcgcccaccacgggcgccaagacctgcttcaccttttgctacgcggccgggaacaacaatggcacatccgtggaggacggccagatccccgaggtcatcttctacacctaggctgcccgacaccgacaccgccctccctccgtggggatagccgcagccccaggccatcatctgctgctggggtccccccaccacgcggtgccaggcccagtgtcccccaggccgtctgtccactccatgccacctttctcagcatcaggacggggttgccctgtgttcaccacgagtgtggctgctggatcagggcagccggggaggtggccaggccagtggccaggccctgtggagacaatccctcaggactagggacagggctgtgccggcctgggccagggcccacggacccgcagctcagggcgcctgcccacgtcgtctgccggcggtgcgccgcgggcgtccctcgcgtctcttcactgcacattgcaatgcatttgcgattcccatttctctgctaggagccagcctgggtggcgctgctcccagagccgtgggtcccagaccttgcgttccttttgttcctgtccgtttatcaggacacgggccccacctgtcacgtgcccgaggccacccaagcccagcctgcggggcgttcccactgcctggatgccggcttgagttctgcgcacgcaggattcagtgtggggacggcccctgccggataggcctagccctggcccaggtggtgagcggtttgcagtgtccgttctcatccacctgatgggcccagataaaggcccccgctgtccagcctccctggacggccctcgcggtccctgcagcccaagatgggactcagaccctgtgccccagagctcccctgccgcagaatggggccccagccggccccgaccgggtccaggagcactgctcgcctgtacatactgttgccctagcccacctggtgccgtgggagccacccccaggtgctgggggcacagcccctccccactccggccacgcccccacccaccccgcgtgtttctgccctgtgactcctggaacctgcgtcctccccaaagccatgggaggggtgtcctcctcagaccatgcccccagatgatttttttaaataaagaaacaaatgcacctgccttgagcgca

SEQ ID NO: 434424 - DNA, 2687 bp, Homo sapiens
cgcccacgccgcagccacaaaatggcggcgggtgggagcggcgggcgtgcgtcgtgcccgccgggggtcggggtcggcccgggcacggggggcagtcccgggcccagcgccaacgccgccgccaccccggcccccggcaacgcggccgccgccgccgccgccgccgccgccgccgccgccgcccctgggccgacgccgcccgccccgccgggccccgggacagacgcgcaggccgcgggcgcggagcgggcggaggaggcggcgggcccgggggcggcggcgctgcagcgcgaggccgcgtacaactggcaggccagcaagcccaccgtgcaggagcgcttcgccttcctcttcaacaacgaggtgctgtgcgacgtgcacttcctggtgggcaaggggctcagctcgcagcgcatccccgcgcacaggttcgtgctggccgtgggcagcgccgtctttgatgccatgttcaacgggggaatggccacaacatccacggagattgagctgcccgacgtggaacccgctgccttcctcgcactgctcaagtttctctactcggacgaggtgcagattggcccggagacggtgatgaccacgctatacaccgccaagaagtacgcggtgccagcgctcgaggcccattgcgtggagttcctgaagaagaacctgcgagccgacaacgccttcatgctgctcacgcaggcgcgactcttcgatgaaccgcagctggccagcctgtgcctggagaacatcgacaaaaacactgcagacgccatcaccgcggagggcttcaccgacattgacctggacacgctggtggctgtcctggagcgcgacacactgggcatccgtgaggtgcggctgttcaatgccgttgtccgctggtccgaggccgagtgtcagcggcagcagctgcaggtgacgccagagaacaggcggaaggttctgggcaaggccctgggcctcattcgcttcccgctcatgaccatcgaggagttcgctgcaggtcccgcacagtcgggcatcctggtggaccgcgaggtggtcagcctcttcctgcacttcaccgtcaaccccaagccacgagtggagttcattgaccggccccgctgctgcctgcgtgggaaggagtgcagcatcaaccgcttccagcaggtggagagtcgctggggctacagcgggaccagtgaccgcatcaggttctcagtcaacaagcgcatcttcgtggtgggatttgggctgtatggatccatccacgggcccaccgactaccaagtgaacatccagattattcacaccgatagcaacaccgtcttgggccagaacgacacgggcttcagctgcgacggctcagccagcaccttccgcgtcatgttcaaggagccggtggaggtgctgcccaacgtcaactacacggcctgtgccacgctcaagggcccagactcccactacggcaccaaaggcctgcgcaaggtgacacacgagtcgcccaccacgggcgccaagacctgcttcaccttttgctacgcggccgggaacaacaatggcacatccgtggaggacggccagatccccgaggtcatcttctacacctaggctgcccgacaccgacaccgccctccctccgtggggatagccgcagccccaggccatcatctgctgctggggtccccccaccacgcggtgccaggcccagtgtcccccaggccgtctgtccactccatgccacctttctcagcatcaggacggggttgccctgtgttcaccacgagtgtggctgctggatcagggcagccggggaggtggccaggccagtggccaggccctgtggagacaatccctcaggactagggacagggctgtgccggcctgggccagggcccacggacccgcagctcagggcgcctgcccacgtcgtctgccggcggtgcgccgcgggcgtccctcgcgtctcttcactgcacattgcaatgcatttgcgattcccatttctctgctaggagccagcctgggtggcgctgctcccagagccgtgggtcccagaccttgcgttccttttgttcctgtccgtttatcaggacacgggccccacctgtcacgtgcccgaggccacccaagcccagcctgcggggcgttcccactgcctggatgccggcttgagttctgcgcacgcaggattcagtgtggggacggcccctgccggataggcctagccctggcccaggtggtgagcggtttgcagtgtccgttctcatccacctgatgggcccagataaaggcccccgctgtccagcctccctggacggccctcgcggtccctgcagcccaagatgggactcagaccctgtgccccagagctcccctgccgcagaatggggccccagccggccccgaccgggtccaggagcactgctcgcctgtacatactgttgccctagcccacctggtgccgtgggagccacccccaggtgctgggggcacagcccctccccactccggccacgcccccacccaccccgcgtgtttctgccctgtgactcctggaacctgcgtcctccccaaagccatgggaggggtgtcctcctcagaccatgcccccagatgatttttttaaataaagaaacaaatgcacctgccttgagcgcaaaaaaaaaaacaacaacaaacaaaaaaccaaaaacaaa

SEQ ID NO: 434425 - DNA, 1526 bp, Homo sapiens
gcatgggggtgggctcgccccagctcaccttaggctatccctgggtatccacgctgctgcctgtcatctgccacggcaggttctcagtcaacaagcgcatcttcgtggtgggatttgggctgtatggatccatccacgggcccaccgactaccaagtgaacatccagattattcacaccgatagcaacaccgtcttgggccagaacgacacgggcttcagctgcgacggctcagccagcaccttccgcgtcatgttcaaggagccggtggaggtgctgcccaacgtcaactacacggcctgtgccacgctcaagggcccagactcccactacggcaccaaaggcctgcgcaaggtgacacacgagtcgcccaccacgggcgccaagacctgcttcaccttttgctacgcggccgggaacaacaatggcacatccgtggaggacggccagatccccgaggtcatcttctacacctaggctgcccgacaccgacaccgccctccctccgtggggatagccgcagccccaggccatcatctgctgctggggtccccccaccacgcggtgccaggcccagtgtcccccaggccgtctgtccactccatgccacctttctcagcatcaggacggggttgccctgtgttcaccacgagtgtggctgctggatcagggcagccggggaggtggccaggccagtggccaggccctgtggagacaatccctcaggactagggacagggctgtgccggcctgggccagggcccacggacccgcagctcagggcgcctgcccacgtcgtctgccggcggtgcgccgcgggcgtccctcgcgtctcttcactgcacattgcaatgcatttgcgattcccatttctctgctaggagccagcctgggtggcgctgctcccagagccgtgggtcccagaccttgcgttccttttgttcctgtccgtttatcaggacacgggccccacctgtcacgtgcccgaggccacccaagcccagcctgcggggcgttcccactgcctggatgccggcttgagttctgcgcacgcaggattcagtgtggggacggcccctgccggataggcctagccctggcccaggtggtgagcggtttgcagtgtccgttctcatccacctgatgggcccagataaaggcccccgctgtccagcctccctggacggccctcgcggtccctgcagcccaagatgggactcagaccctgtgccccagagctcccctgccgcagaatggggccccagccggccccgaccgggtccaggagcactgctcgcctgtacatactgttgccctagcccacctggtgccgtgggagccacccccaggtgctgggggcacagcccctccccactccggccacgcccccacccaccccgcgtgtttctgccctgtgactcctggaacctgcgtcctccccaaagccatgggaggggtgtcctcctcagaccatgcccccagatgatttttttaaataaagaaacaaatgcacctgccttgagcgca

SEQ ID NO: 434426 - DNA, 1503 bp, Homo sapiens
cgcccacgccgcagccacaaaatggcggcgggtgggagcggcgggcgtgcgtcgtgcccgccgggggtcggggtcggcccgggcacggggggcagtcccgggcccagcgccaacgccgccgccaccccggcccccggcaacgcggccgccgccgccgccgccgccgccgccgccgccgccgcccctgggccgacgccgcccgccccgccgggccccgggacagacgcgcaggccgcgggcgcggagcgggcggaggaggcggcgggcccgggggcggcggcgctgcagcgcgaggccgcgtacaactggcaggccagcaagcccaccgtgcaggagcgcttcgccttcctcttcaacaacgaggtgctgtgcgacgtgcacttcctggtgggcaaggggctcagctcgcagcgcatccccgcgcacaggttcgtgctggccgtgggcagcgccgtctttgatgccatgttcaacgggggaatggccacaacatccacggagattgagctgcccgacgtggaacccgctgccttcctcgcactgctcaagtttctctactcggacgaggtgcagattggcccggagacggtgatgaccacgctatacaccgccaagaagtacgcggtgccagcgctcgaggcccattgcgtggagttcctgaagaagaacctgcgagccgacaacgccttcatgctgctcacgcaggcgcgactcttcgatgaaccgcagctggccagcctgtgcctggagaacatcgacaaaaacactgcagacgccatcaccgcggagggcttcaccgacattgacctggacacgctggtggctgtcctggagcgcgacacactgggcatccgtgaggtgcggctgttcaatgccgttgtccgctggtccgaggccgagtgtcagcggcagcagctgcaggtgacgccagagaacaggcggaaggttctgggcaaggccctgggcctcattcgcttcccgctcatgaccatcgaggagttcgctgcaggtcccgcacagtcgggcatcctggtggaccgcgaggtggtcagcctcttcctgcacttcaccgtcaaccccaagccacgagtggagttcattgaccggccccgctgctgcctgcgtgggaaggagtgcagcatcaaccgcttccagcaggtggagagtcgctggggctacagcgggaccagtgaccgcatcaggttctcagtcaacaagcgcatcttcgtggtgggatttgggctgtatggatccatccacgggcccaccgactaccaagtgaacatccagcctagcccacctggtgccgtgggagccacccccaggtgctgggggcacagcccctccccactccggccacgcccccacccaccccgcgtgtttctgccctgtgactcctggaacctgcgtcctccccaaagccatgggaggggtgtcctcctcagaccatgcccccagatgatttttttaaataaagaaacaaatgcacctgccttgagcgca

SEQ ID NO: 434427 - DNA, 1693 bp, Homo sapiens
ttagaacaattgctccccaataatttattttacaaacaggaatatgaaaaataaatggtggtaggaggaaggacccactaagaacaccatttttaaattttgctaagtaaggacattgagggaaaaaactcaaactctgatctaccatcattgtttaatgttcggcaaacatgaagcattttaataccaaaaaaagtgaggagaataaatctcagcataaaggaacaactttttaaactgaatttagcactatgaaaaatgtacctcattttctgtaattttagcgagtttcccgcggatgtacactggccccatggattggcgctggggatcaccagtttagaggtgccagtgccttctgacaaaggcccatggatccatatgactgcctgtctgttctttttagagacgggcccacactgcagagaagtgattgtgaaggtctccaaccctgtcatgcccccacctgccaccttgacttgggagagggacactcacaaaagcatgtcaaatcgacatccatttctttctctttccctcaggtctcagggagttttcctcttctcctcggactctttctctcaaggcctcttctacaaaaacccctgcccagagggttactgctaaaatgaaactcccgtgtctgtccccttccctggcccccaactgacttgcctgcctctgcttgctgctgtccctgcctattccccttcatgctggctctagaaagatgcaatctttttcccaggccccagcctctctggcctccctgccatccagcttctagcctcccttctctggaatctatggaagaatcatcaagcagcttctggaaatccaggagtctgtccttggtcatggtcatcttcaacctgtctgtgttcttgagaacgttcatgtgctcccagaaacattctttttgtctgcctttcctggtctggccacatttgactgtgtcacttctctcttttctcactcttctctgccctccacagacctccgtgctgccaggacttcctaacggaagggcttggctggctccccgaagccatccagaactggacccgagggacccagctcaacttgaatgtccttttatctgcccaggagatgggaagatgctgagaccatgcttcagtgctgtcccacatctgtctttctgagtttagacttggtttttccattatattccattcaactgatttttccatgatattccacaatgtcttacctaactctagctttctatactcaacagcaatgcctcctgagagcctcctgggtgtcaagtactctgttgtgtgcttttgaggactagggtgttagcaaggcacagtctctgactttgcagggctcacagattcatggggaaaattgatgttccagttacagtgaggcaaggcaatctggcagtaactccatagagaggaatgacaggctgggcctaggaatggaggggagcgggtaatagaggatcctaaggaaactgagagaagaggggctggagtgcggctggtctgcgctcctgtgcattgccttggctaacattttacttgtccttctgaatcaccctggcattgtcaacaaagaataatgtatgatccttcttggagtaaaaagccttcagcagtgcttcacaaaaaattctattgtatattttgtgtcctacctcaaattaattaaaaaaaaaaaa

SEQ ID NO: 434428 - DNA, 4107 bp, Homo sapiens
  misc_feature (2039)..(2040): n is a, c, g, or t
gcaaaatggtccctcacctcttgctgctctgtctcctccccttggtgcgagccaccgagccccacgagggccgggccgacgagcagagcgcggaggcggccctggccgtgcccaatgcctcgcacttcttctcttggaacaactacaccttctccgactggcagaactttgtgggcaggaggcgctacggcgctgagtcccagaaccccacggtgaaagccctgctcattgtggcttactccttcatcattgtcttctcactctttggcaacgtcctggtctgtcatgtcatcttcaagaaccagcgaatgcactcggccaccagcctcttcatcgtcaacctggcagttgccgacataatgatcacgctgctcaacacccccttcactttggttcgctttgtgaacagcacatggatatttgggaagggcatgtgccatgtcagccgctttgcccagtactgctcactgcacgtctcagcactgacactgacagccattgcggtggatcgccaccaggtcatcatgcaccccttgaaaccccggatctcaatcacaaagggtgtcatctacatcgctgtcatctggaccatggctacgttcttttcactcccacatgctatctgccagaaattatttaccttcaaatacagtgaggacattgtgcgctccctctgcctgccagacttccctgagccagctgacctcttctggaagtacctggacttggccaccttcatcctgctctacatcctgcccctcctcatcatctctgtggcctacgctcgtgtggccaagaaactgtggctgtgtaatatgattggcgatgtgaccacagagcagtactttgccctgcggcgcaaaaagaagaagaccatcaagatgttgatgctggtggtagtcctctttgccctctgctggttccccctcaactgctacgtcctcctcctgtccagcaaggtcatccgcaccaacaatgccctctactttgccttccactggtttgccatgagcagcacctgctataaccccttcatatactgctggctgaacgagaacttcaggattgagctaaaggcattactgagcatgtgtcaaagacctcccaagcctcaggaggacaggcaaccctccccagttccttccttcagggtggcctggacagagaagaatgatggccagagggctccccttgccaataacctcctgcccacctcccaactccagtctgggaagacagacctgtcatctgtggaacccattgtgacgatgagttagaagaggttgggaagagggagtgggaggggtctgtctccacctgaggcagggaaagagagcctattctcacacatgatcttcagagtgctggaaacacactcctgcagaagctgtaggactcttgaattcctaggaaactgtccagcctcctagccccatgtgatgtgaaaactaaaaggcaccaccaactagacatgtgttcataaattcccatctaagaaacactgggaggcacagcagcctgtatctctgaggaagaggagcgaggacaacgttggcccagatgggggctgaatcattcaactgcctccatctgtggggcagctgctgccttacagcccttcctactagactgagcatcccgaagggagacctaaatcatactttgggtgtggtgacccagatgcacagagctctgcttgaaacaggtacacgggccagggaaatgccagcaagccagagcgggcgtggagatttttatgcctcactttctggagtcactgggccatgatgaatcataagtcttcagtggcctagcaatatccagataagaaaggaccaacttgggttccttaaaacaaagggaaattattattgccacttagaaaaattcagaaaagcacacactcacatacacacacacaaaatcactctcttatcccatccatttgtgataacatctgtgaacatgctgtggctctatttgcaacattttccttcgtgtgtgtgattgtgtgcatgtgtgcatgacctttttttttnntttttttttttttttttgagatggaatctcgctctgtcacccaggttggagttcagtggcacaatctcggctcactgcaagctctgcctcccaggttcatgccgttctcctgcctcagcctccctagtagctgggactacaggtgcccgccaccatgcccggctaatcttttgcatttttagtagagacggggtttcaccgtgttagccaggatggtctcgatctcctgacctcgtgatccacctgcctaggcctcccaaagtgttgggattacaggcgtgagccaccccgcccggcccttttttttcatttatactttttcatttagattgtaatgattaacagaaacaggggtacctttcccaggggtgtccaccagaagagttgaagaagaggtgagaagatcccaaggtgaagcctgtcaccacgcagacagaactgccccctattgtagacagtggtgggaagggcctggctcacatgcccctccttagaggcagcctcaagatgaaccagggaatcaaactcaaccaggaggcatgattccttctctcctgcaattgcacaaaaacaagtggtggtgaaacattgttctgttttcacaagagatgagggagcaggctttccaatatgctggaagtaattgtgcttagacacctcatcctcccaagctgtctagaaaggccatttcgctgtgttgtctaaataatgagggttttttcacaccatttctcaaaaggagatttgctgtcaacatcattttggtggttcaggtgtcactttcacttacagaaacttatgcatccttaagagatctcaattcttaagggtctaacttgccagagaaatctcattccagggactgattgtttttatcaccttctgtctggtcctgagtgactcactgtgtcacccagaaaagagacctgtcaggcagaatcgagcttaattcacctgctctaaacaattgttactgacacactgcttttaggttttcttctagcaccagataaactctgaaatcaaagcatggatatgagctcagtaggaaactaaggtttgagggagaaagagtttgtcacttagacctcttggctgttaactgaaactgaacttgctcacatcatctgcttccctgtaatgaactatgagggttctttatcctagtttctatttatgaagatggttgaaaattttcaagacacaagattttgaaaactcactgaattatgggcaaaaccatgactttcattgggcagacagagtcttctaagcccacagggatccccagatggatttttcaggacaaatggctcatgtgcctgtacttattgtctctgtggtgtgtcaagaagtagctaatggtttcatctgaaagctgccatagaaattctgtgaaccagaatgagacaaggcagcaggcatacagaaggtttgtcctgctctgggaagcatggaggatgttgtacttcactcctctctgagggtgtctaggaatacagaagctccttgacttacatctcaataaacccatcgtaagtccaaaatattggaagttgaaaatgcattgaatacacccaacctactgaacatcgtagcttagccaagcctaccttaaatgctctgagaacacttatattagcctacagctgggaaaaatcatttaacacaaagcctatcttctaatgaagtatggaatatctcatgtaatttattgaatactgtactgaaggtgaaaaccagaatggttgtatggatatgcgaagtatggtttctactgaatgtgtattgctttcccatcatcataaaatttttaaaaatcctaagttgaatcattgttagtccgggaccttcagtactgccaagtcccagagaaaacgcttttactctggggagaacccactgatggctcattagatctgtcccttccccgaggtccgtgtgtgactttgagcaaaaagtgacttctttttgtgaatgtaaaatttgtgaaacttgagtttttccaatgtgctgtaaagtgttttattgtaaattgctcatctcaataaaatttacttcaggttt

SEQ ID NO: 434429 - DNA, 2065 bp, Homo sapiens
caaatgcaggaattttctatagagtctgttatagctagccttctacaggcttaactcttctcatgatggagtattgaccatcaccaacaggaaatcttttgttttaggcactccaggaaattatcagggagttctctctgtagataaccaaagtttccctagttgtacttctacccatttttcttagtgtgatcatttaaagcagtgcctcaccaactatcagagatgggggccagtaatttttgtttcatttttttccagttcattacaaatcaatgcatatgtctgtaaaacacaaaatcacacccttaaatgtgatggcaacatcaaattgccataaaagtttctaaacttttcaccccaatttctgaatttatcacagactggtaaaaaacagctcacaagccagcaccacgggcagaccacactttgcacagtgctcaaacgtaggcctaacaacctggcttggcttggcacttctaaaaaccgatcctgaggcaaggcttcttgtaaaagagtttatactggaagttaaaaatcatcaaattattagatactgggaatggagtagtaaagtagacagagcagggaaggaataaagtatgaattttcaagctggttacccatctgggcaactggagctcagttttgctgggaaagtctggaagacagtgtcagatataactaagagttattcccatcaaggggaaaggaaactgtgcttttcatccaccaaatccttgcttaacattggaatacagatgcttccaagacattaactttgtggcacttctggcttttcctacacacttattgtgtatgccaccatgtctagggggaaaaaggcccacaggcaaagaggtaccagcattcataccaccagctttcagcttgtagaggtggccgccaagaggaactcgtagttggcagtgccaactacaactactacaccaaccagctggaaactatacaaagagtatgaacaaagttcacaggagaaacaaggctctgcaacatatgaaaatatattctacttcattcataatgagacgcatgaaaattgtaactgtatcaataccatttctcacctagtagatgggcaaaaatccaaatgtttgagcacacattctgtgggtgaggctgtggaaacgtaggttcacatacattgctcttggatatgcagattaggaccgctcctgtggagagcagttagggaatatctttcaaaattaaaaaatgcagagttaagttttgatccaggagtctcactcctgagaatttatgctatagatatgcctacaagcatttgagatgaaaaagaagcattgctatttgtttttcttgtttttcatgaataacattgtaaaagtagaatatgggcagtgattcaagcattcatctttgggactggttaaggaaactatgatgctttcacagaatgaaattctatgcagctgtttaaaacaaaccaagacaccttctttcacatatatggaaagatgtccaaaatatactgttaagtttttaaaaaggtacaaaataacatatatagtatgattccttttgcatatgtgtatttgcttttaattgcctaaagaaactctcagaaggattcaaaagatccataccaaacaagatgggagaacagaggagtagtgacaggagtagaagcactgtagaccttttcatatcattttggtttttaaattacatgagtaggttacctaattattaaaataaatttaatttaaaaggtaatgggggataggaagaaatttgttaaaagatacaaaattacagctagataggaagattaagttgtagtgttctatagctctgtaggatgactacagttaacaataatatatattctaaatagctagaaggaggatattgaatgttctcaacagaaagaaatgataaatgcttaagatgatggatatactaattaccctaatctgatcactgtatattttgtgtattgcaatgtcactatgtaccccataaatatgtataattatcgtgtgtcaattaaaaatttttaattaaaaaattataaacaaaa

SEQ ID NO: 434430 - DNA, 717 bp, Homo sapiens
  misc_feature (44)..(45): n is a, c, g, or t
  misc_feature (130)..(130): n is a, c, g, or t
agataggcctgcaataagactgcaggcccaagatatttgtctcnngttccaccagtaacttggggcaacttggtgtacaacaaggcacagagaatgcactcgtagaggccgtccagtttctcacgctctnctatggactgcagatactgctgcttgccttcctgagattcatctttttaaaaaggtacaaaataacatatatagtatgattccttttgcatatgtgtatttgcttttaattgcctaaagaaactctcagaaggattcaaaagatccataccaaacaagatgggagaacagaggagtagtgacaggagtagaagcactgtagaccttttcatatcattttggtttttaaattacatgagtaggttacctaattattaaaataaatttaatttaaaaggtaatgggggataggaagaaatttgttaaaagatacaaaattacagctagataggaagattaagttgtagtgttctatagctctgtaggatgactacagttaacaataatatatattctaaatagctagaaggaggatattgaatgttctcaacagaaagaaatgataaatgcttaagatgatggatatactaattaccctaatctgatcactgtatattttgtgtattgcaatgtcactatgtaccccataaatatgtataattatcgtgtgtcaattaaaaatttttaattaaaaaattataaacaaaa

SEQ ID NO: 434431 - DNA, 927 bp, Homo sapiens
gccgtgagccgaggccgcgccctcccttgcccccccgcctgggggaccagagcgagaacttatttccaaaaaaaaaaaaaaaggtaccaatttggactctgcctcccaaagtgatgggattacaggcctaagacacgatgcccagcctcattttcatttattcttgtaactggcatttaccacctgacccattaggttttgccttagtagttgagatctgatctgaattgaaatgttaattcatattctgaattattaaaagaacggctctatacaaattttactctcatagtaggatcttttataccaatatcacatccatattttaacgcatgaccatacaacacctctttacagttactaacatgtggttagtgtctcattgagtaatataggctgataatggcacgttgcaaagtgttgaccatatcattttatttattataattttggaagattcttttggatacagaatggacagagtaacaaaattgctgcattatttaagattgtctgttacttgaacatgccactgttttagacaggctccttccttttattttgaatcacttgagttcctgttctgtttgttgctttttcatgatgatgaaagattagtgagtttttccccagtagcattcccaagccaacttgcccaagaatcagagacaaagtcacaagaagggccaactctctcctgctgagaaggaataaaatttttaacactcttgtaagtatgtgaaaaacttcttactcagctgtggaagttgagctaagaataacaaaggaaaaaaagattatgaagcctgctgtcatgtctgagatttgactgattaatccagtgcgttaaaaatataacacgactttaccgaatagtaaagggcgactgctttcttcagaacctccttgcagcagactaaaggatgt

SEQ ID NO: 434432 - DNA, 1535 bp, Homo sapiens
  misc_feature (2)..(2): n is a, c, g, or t
  misc_feature (23)..(23): n is a, c, g, or t
anttttggggggaatttggcccnttggagggccaaggaatttggggcacggggcctttttaatcacctcagcccccacccacatctcccagagtattgcaattcagaacatttgggtcaaggtggagcaaggcactgacagtggccccacagggcatgtgtcactaatcactgtcccatggtctacgcacggcatctggctgctctgtctactgtgacttcttcctgtgtaatctcagtggggcccgtgtccacccacacatcgtgacccacataggggagaggttgcttttcttttgtgggctgagagtaggacaatgcaaatgaatgatctctagtagacagaaaagaacttggtctcttttttaaaatttcaaagagccagaagttctatgcctccttcaaagtaggcagaacaacgcagccaagatctactgtctgccatgctctgtgcaatgaagtctgcaggcctgaggaccatgtactgctgtccttcctcagagctctgcacaaacactgccaagtcctgaagacgcattcctttcctgccaacctctttccagataagcccttgaggtctcgggctgacctacacacacacacacacacacacacacacacacacacaccccccacacacacacacacgacagagaacatgccataaacatccttgaacccatgcaggaaagcccatcccatattctgaaaaaatgccaaattaggtttttctttctttttggaaatcagtcattacagtaaccgaaaccattgggttcagcgaaaatggaaagatttagctgaatgtagtcagtccaattaagttggatgcaactgagtgatttagttgcttgggtaacccagtgcttgcttgctttcttcattctctgggtggaaactaagatcaagacacatgtttggggataagttaaatgtctgagctattttgctcggtttatcctaagagaactttattatgggatgaggaggtgacccaagatgagaagtggagggggacagcgatgttttctaaacatcgtccagtgttgactggcttccttactttgcacagtgaacacaactaaccacattaattcagctttgtgaagtccctgctctctgtgggtctatgagtcagcagcaacattggcctaacctccgtcccagcctcctggctcaccacatgtgtacagtgctgtttgcagttgtactcattatccatccatctctctgccatccccaagcatcgctgggtgtaaaacgcaaactctccaccgacactgccatgcgtggtcatgtcttgatgccttcaggggctcagtagctatcaaagaggcctggagggcctgggcaggcttgacgatgcctgaccgagttcaagacccacaccctgtagcaataccaagtgctattacataatcaatggacgatttatacttttattttttatgattatttgtttctatattgctgttagaaaaagtgaaataaaaatacttcaaaagaagatatccatataaaaataaaaggagagaa

SEQ ID NO: 434433 - DNA, 4062 bp, Homo sapiens
ctggctggctctggggaccccccggctgttgccacagagaggaaagacctgtggcctcagattcagacagcctgagcttgtccccacaacttattgctgggagatctcgggtctccagccacctgcccttcccgagaagagagagctctgggccttcttcctgccagtctggtcttcgagtgcgttcaggacagatagaccttggcacaggctgccccgagattcctgcgacgctgtctgttcctgccttctgtggagcatggcacccacaggcttccaggacggatcatagacccgagcctccaggagggcgccctgtgcggctcactgcgcggtccctctcagctcccctgccacccagcctctgaggccggctcctgtcccggaaatgccctcgggcacctggatgaggccatcccagagcgggacccaactgtgccacccaccaagcctccccctgcgccccccgtgccctcgcatgtccggctgccagggcagactgtagaatgtctgtgccccagatccacgtggaagaagtgggtgcagaagagggggcgggagcagccgcaccacccgatgaccacctccggagcctgaaggccctcaccgagaaactgaggctggagacccgcaggccctcctacctggaatggcaggccaggctggaggagcagacctggcccttcccgaggccggctgcggaccacaggcgagcttggaggagggggagcgtggggggcaggagcccttgctccccctgagagaggctgggcagcaccccccttctgccaggagtgccagccaaggtgccagacccctgtccactggcaagctggaaggctttcagagcatcgatgaagctatagcctggctcaggaaggaactgacggagatgcggctgcaggaccagcaactggccagacagctcatgcgcctgcgtggcgacatcaacaagctgaaaatcgaacacacctgccgcctccacaggaggatgctcaacgatgccacctacgagctggaggagcgggatgagctggccgacctcttctgtgactcccctcttgcctcctccttcagcctctccacaccactcaagcttattggcgtgaccaagatgaacatcaactctcggaggttctctctctgctgaggagccctcagactgggcggaggggctggagcggagggcttgggctggaggggtgtcagaggaagctgaggccaagttactccagtgggtctcccggaggcaggggtccctgggactggcgactcaagggccccaggacctattcagtggtgctctcccacccaggggccctgggtgtggatgccagtgtctctgtgactggctcttgcttactacccaaagagctctgcagaagggccgctccaaccaagatgttaaaggagacctgggttcccaccataatccatccctccacggtcacgttcctgtttcctggaatcactggtgctatgaactgggattcccaaagggaggccccccaacaaagctgtcatttttgcagaaggctgtcccgcaagggccttgggggaaattaggcatgtcagatgtgcctgtctcacgtgctgttgctgtcctctaagtattgtctcaaattcaccctaagtacatgactcagcaacattgacagggagctactaggaagggaaaatcgaaaggcatgacaaatgggcacttggggacgcagccccagtggctggcagccagtgtctctggtgagcctgacactacaaggctgtgtaaattgtaaattctggcgtgtgctgggacatgtgatgggggcactagcgtagcttgggtgcaacaagcacagatgtccccattgtctcccctggccacatgcatctccaaagagcctcttcactgccacccacaccccagggtgacagcctgggagaccactggtgactgaaccaggcaggtcctgaaagcattttccataactgaattctcctgcaggggcgtgaccggggcctcctggtggattctggtggtgtcaccttactgccctctctggaaagacaatctagggagcccagaggcccatcctgagcctcctctgagattttgtgcctgacctaaacaactagttttaataagactgttactgatgtgttgttcacttgttagtaactgatttttgtccaaatgcggaagccacttgtgtaggtcaactacagtgcgtaggatttgattttaagagtttctccctcccaacaggcttgaggatcagcaagttaagaccccagcaggttagggaggtcagtctggggtcatacggcatggcaggggtccctcggccagacccgtagaatcctgagataaggagtgtttctgacctttggtgtcatctagtcgagtcctctcattagtaaaggagcaaagtgaaacctgggggaggagaaggacttccctcaggttgcacagctgtttaggctatagaatattgatgtgtgaaaccattattgataatgcctagtagatcacatgtcaatgaacttgaaccccaaagatggtcgtgatgctttgccaaacccgcacactgccaacccctctactctccacctcagcccccacccacatctcccagagtattgcaattcagaacatttgggtcaaggtggagcaaggcactgacagtggccccacagggcatgtgtcactaatcactgtcccatggtctacgcacggcatctggctgctctgtctactgtgacttcttcctgtgtaatctcagtggggcccgtgtccacccacacatcgtgacccacataggggagaggttgcttttcttttgtgggctgagagtaggacaatgcaaatgaatgatctctagtagacagaaaagaacttggtctcttttttaaaatttcaaagagccagaagttctatgcctccttcaaagtaggcagaacaacgcagccaagatctactgtctgccatgctctgtgcaatgaagtctgcaggcctgaggaccatgtactgctgtccttcctcagagctctgcacaaacactgccaagtcctgaagacgcattcctttcctgccaacctctttccagataagcccttgaggtctcgggctgacctacacacacacacacacacacacacacacacacacacaccccccacacacacacacacgacagagaacatgccataaacatccttgaacccatgcaggaaagcccatcccatattctgaaaaaatgccaaattaggtttttctttctttttggaaatcagtcattacagtaaccgaaaccattgggttcagcgaaaatggaaagatttagctgaatgtagtcagtccaattaagttggatgcaactgagtgatttagttgcttgggtaacccagtgcttgcttgctttcttcattctctgggtggaaactaagatcaagacacatgtttggggataagttaaatgtctgagctattttgctcggtttatcctaagagaactttattatgggatgaggaggtgacccaagatgagaagtggagggggacagcgatgttttctaaacatcgtccagtgttgactggcttccttactttgcacagtgaacacaactaaccacattaattcagctttgtgaagtccctgctctctgtgggtctatgagtcagcagcaacattggcctaacctccgtcccagcctcctggctcaccacatgtgtacagtgctgtttgcagttgtactcattatccatccatctctctgccatccccaagcatcgctgggtgtaaaacgcaaactctccaccgacactgccatgcgtggtcatgtcttgatgccttcaggggctcagtagctatcaaagaggcctggagggcctgggcaggcttgacgatgcctgaccgagttcaagacccacaccctgtagcaataccaagtgctattacataatcaatggacgatttatacttttattttttatgattatttgtttctatattgctgttagaaaaagtgaaataaaaatacttcaaaagaagatatccatataaaaataaaaggagagaa

SEQ ID NO: 434434 - DNA, 971 bp, Homo sapiens
  misc_feature (8)..(8): n is a, c, g, or t
cacggacnacgagtcctgctcaggaagtctctggatcctaggctcatctccacaggggtagaacacacagacagcagagacacgacagagaacatgccataaacatccttgaacccatgcaggaaagcccatcccatattctgaaaaaatgccaaattaggtttttctttctttttggaaatcagtcattacagtaaccgaaaccattgggttcagcgaaaatggaaagatttagctgaatgtagtcagtccaattaagttggatgcaactgagtgatttagttgcttgggtaacccagtgcttgcttgctttcttcattctctgggtggaaactaagatcaagacacatgtttggggataagttaaatgtctgagctattttgctcggtttatcctaagagaactttattatgggatgaggaggtgacccaagatgagaagtggagggggacagcgatgttttctaaacatcgtccagtgttgactggcttccttactttgcacagtgaacacaactaaccacattaattcagctttgtgaagtccctgctctctgtgggtctatgagtcagcagcaacattggcctaacctccgtcccagcctcctggctcaccacatgtgtacagtgctgtttgcagttgtactcattatccatccatctctctgccatccccaagcatcgctgggtgtaaaacgcaaactctccaccgacactgccatgcgtggtcatgtcttgatgccttcaggggctcagtagctatcaaagaggcctggagggcctgggcaggcttgacgatgcctgaccgagttcaagacccacaccctgtagcaataccaagtgctattacataatcaatggacgatttatacttttattttttatgattatttgtttctatattgctgttagaaaaagtgaaataaaaatacttcaaaagaagatatccatataaaaataaaaggagagaa

SEQ ID NO: 434435 - DNA, 3929 bp, Homo sapiens
  misc_feature (3872)..(3872): n is a, c, g, or t
agcgccgagaattcaccggagctcggggaggcgaggcgggagccctgagctgaggccgggcagcgcggacccgcgcaggaggaggcggcggggacaccggcgagtccccagcagggcccctgggctcccggaagggtctccagccacctgcccttcccgagaagagagagctctgggccttcttcctgccagtctggtcttcgagtgcgttcaggacagatagaccttggcacaggctgccccgagattcctgcgacgctgtctgttcctgccttctgtggagcatggcacccacaggcttccaggacggatcatagacccgagcctccaggagggcgccctgtgcggctcactgcgcggtccctctcagctcccctgccacccagcctctgaggccggctcctgtcccggaaatgccctcgggcacctggatgaggccatcccagagcgggacccaactgtgccacccaccaagcctccccctgcgccccccgtgccctcgcatgtccggctgccagggcagactgtagaatgtctgtgccccagatccacgtggaagaagtgggtgcagaagagggggcgggagcagccgcaccacccgatgaccacctccggagcctgaaggccctcaccgagaaactgaggctggagacccgcaggccctcctacctggaatggcaggccaggctggaggagcagacctggcccttcccgaggccggctgcggaccacaggcgagcttggaggagggggagcgtggggggcaggagcccttgctccccctgagagaggctgggcagcaccccccttctgccaggagtgccagccaaggtgccagacccctgtccactggcaagctggaaggctttcagagcatcgatgaagctatagcctggctcaggaaggaactgacggagatgcggctgcaggaccagcaactggccagacagctcatgcgcctgcgtggcgacatcaacaagctgaaaatcgaacacacctgccgcctccacaggaggatgctcaacgatgccacctacgagctggaggagcgggatgagctggccgacctcttctgtgactcccctcttgcctcctccttcagcctctccacaccactcaagcttattggcgtgaccaagatgaacatcaactctcggaggttctctctctgctgaggagccctcagactgggcggaggggctggagcggagggcttgggctggaggggtgtcagaggaagctgaggccaagttactccagtgggtctcccggaggcaggggtccctgggactggcgactcaagggccccaggacctattcagtggtgctctcccacccaggggccctgggtgtggatgccagtgtctctgtgactggctcttgcttactacccaaagagctctgcagaagggccgctccaaccaagatgttaaaggagacctgggttcccaccataatccatccctccacggtcacgttcctgtttcctggaatcactggtgctatgaactgggattcccaaagggaggccccccaacaaagctgtcatttttgcagaaggctgtcccgcaagggccttgggggaaattaggcatgtcagatgtgcctgtctcacgtgctgttgctgtcctctaagtattgtctcaaattcaccctaagtacatgactcagcaacattgacagggagctactaggaagggaaaatcgaaaggcatgacaaatgggcacttggggacgcagccccagtggctggcagccagtgtctctggtgagcctgacactacaaggctgtgtaaattgtaaattctggcgtgtgctgggacatgtgatgggggcactagcgtagcttgggtgcaacaagcacagatgtccccattgtctcccctggccacatgcatctccaaagagcctcttcactgccacccacaccccagggtgacagcctgggagaccactggtgactgaaccaggcaggtcctgaaagcattttccataactgaattctcctgcaggggcgtgaccggggcctcctggtggattctggtggtgtcaccttactgccctctctggaaagacaatctagggagcccagaggcccatcctgagcctcctctgagattttgtgcctgacctaaacaactagttttaataagactgttactgatgtgttgttcacttgttagtaactgatttttgtccaaatgcggaagccacttgtgtaggtcaactacagtgcgtaggatttgattttaagagtttctccctcccaacaggcttgaggatcagcaagttaagaccccagcaggttagggaggtcagtctggggtcatacggcatggcaggggtccctcggccagacccgtagaatcctgagataaggagtgtttctgacctttggtgtcatctagtcgagtcctctcattagtaaaggagcaaagtgaaacctgggggaggagaaggacttccctcaggttgcacagctgtttaggctatagaatattgatgtgtgaaaccattattgataatgcctagtagatcacatgtcaatgaacttgaaccccaaagatggtcgtgatgctttgccaaacccgcacactgccaacccctctactctccacctcagcccccacccacatctcccagagtattgcaattcagaacatttgggtcaaggtggagcaaggcactgacagtggccccacagggcatgtgtcactaatcactgtcccatggtctacgcacggcatctggctgctctgtctactgtgacttcttcctgtgtaatctcagtggggcccgtgtccacccacacatcgtgacccacataggggagaggttgcttttcttttgtgggctgagagtaggacaatgcaaatgaatgatctctagtagacagaaaagaacttggtctcttttttaaaatttcaaagagccagaagttctatgcctccttcaaagtaggcagaacaacgcagccaagatctactgtctgccatgctctgtgcaatgaagtctgcaggcctgaggaccatgtactgctgtccttcctcagagctctgcacaaacactgccaagtcctgaagacgcattcctttcctgccaacctctttccagataagcccttgaggtctcgggctgacctacacacacacacacacacacacacacacacacacacaccccccacacacacacacacgacagagaacatgccataaacatccttgaacccatgcaggaaagcccatcccatattctgaaaaaatgccaaattaggtttttctttctttttggaaatcagtcattacagtaaccgaaaccattgggttcagcgaaaatggaaagatttagctgaatgtagtcagtccaattaagttggatgcaactgagtgatttagttgcttgggtaacccagtgcttgcttgctttcttcattctctgggtggaaactaagatcaagacacatgtttggggataagttaaatgtctgagctattttgctcggtttatcctaagagaactttattatgggatgaggaggtgacccaagatgagaagtggagggggacagcgatgttttctaaacatcgtccagtgttgactggcttccttactttgcacagtgaacacaactaaccacattaattcagctttgtgaagtccctgctctctgtgggtctatgagtcagcagcaacattggcctaacctccgtcccagcctcctggctcaccacatgtgtacagtgctgtttgcagttgtactcattatccatccatctctctgccatccccaagcatcgctgggtgtaaaacgcaaactctccaccgactcggtcaggcatcgtcaagcctgcccaggccctccaggcctntttgatagctactgagcccctgaaggcatcaagacgtgaccacgcatggcagtgccc

SEQ ID NO: 434436 - DNA, 3428 bp, Homo sapiens
  misc_feature (3373)..(3374): n is a, c, g, or t
  misc_feature (3382)..(3382): n is a, c, g, or t
  misc_feature (3396)..(3396): n is a, c, g, or t
  misc_feature (3399)..(3399): n is a, c, g, or t
  misc_feature (3401)..(3401): n is a, c, g, or t
agcgccgagaattcaccggagctcggggaggcgaggcgggagccctgagctgaggccgggcagcgcggacccgcgcaggaggaggcggcggggacaccggcgagtccccagcagggcccctgggctcccggaagggtctccagccacctgcccttcccgagaagagagagctctgggccttcttcctgccagtctggtcttcgagtgcgttcaggacagatagaccttggcacaggctgccccgagattcctgcgacgctgtctgttcctgccttctgtggagcatggcacccacaggcttccaggacggatcatagacccgagcctccaggagggcgccctgtgcggctcactgcgcggtccctctcagctcccctgccacccagcctctgaggccggctcctgtcccggaaatgccctcgggcacctggatgaggccatcccagagcgggacccaactgtgccacccaccaagcctccccctgcgccccccgtgccctcgcatgtccggctgccagggcagactgtagaatgtctgtgccccagatccacgtggaagaagtgggtgcagaagagggggcgggagcagccgcaccacccgatgaccacctccggagcctgaaggccctcaccgagaaactgaggctggagacccgcaggccctcctacctggaatggcaggccaggctggaggagcagacctggcccttcccgaggccggctgcggaccacaggcgagcttggaggagggggagcgtggggggcaggagcccttgctccccctgagagaggctgggcagcaccccccttctgccaggagtgccagccaaggtgccagacccctgtccactggcaagctggaaggctttcagagcatcgatgaagctatagcctggctcaggaaggaactgacggagatgcggctgcaggaccagcaactggccagacagctcatgcgcctgcgtggcgacatcaacaagctgaaaatcgaacacacctgccgcctccacaggaggatgctcaacgatgccacctacgagctggaggagcgggatgagctggccgacctcttctgtgactcccctcttgcctcctccttcagcctctccacaccactcaagcttattggcgtgaccaagatgaacatcaactctcggaggttctctctctgctgaggagccctcagactgggcggaggggctggagcggagggcttgggctggaggggtgtcagaggaagctgaggccaagttactccagtgggtctcccggaggcaggggtccctgggactggcgactcaagggccccaggacctattcagtggtgctctcccacccaggggccctgggtgtggatgccagtgtctctgtgactggctcttgcttactacccaaagagctctgcagaagggccgctccaaccaagatgttaaaggagacctgggttcccaccataatccatccctccacggtcacgttcctgtttcctggaatcactggtgctatgaactgggattcccaaagggaggccccccaacaaagctgtcatttttgcagaaggctgtcccgcaagggccttgggggaaattaggcatgtcagatgtgcctgtctcacgtgctgttgctgtcctctaagtattgtctcaaattcaccctaagtacatgactcagcaacattgacagggagctactaggaagggaaaatcgaaaggcatgacaaatgggcacttggggacgcagccccagtggctggcagccagtgtctctggtgagcctgacactacaaggctgtgtaaattgtaaattctggcgtgtgctgggacatgtgatgggggcactagcgtagcttgggtgcaacaagcacagatgtccccattgtctcccctggccacatgcatctccaaagagcctcttcactgccacccacaccccagggtgacagcctgggagaccactggtgactgaaccaggcaggtcctgaaagcattttccataactgaattctcctgcaggggcgtgaccggggcctcctggtggattctggtggtgtcaccttactgccctctctggaaagacaatctagggagcccagaggcccatcctgagcctcctctgagattttgtgcctgacctaaacaactagttttaataagactgttactgatgtgttgttcacttgttagtaactgatttttgtccaaatgcggaagccacttgtgtaggtcaactacagtgcgtaggatttgattttaagagtttctccctcccaacaggcttgaggatcagcaagttaagaccccagcaggttagggaggtcagtctggggtcatacggcatggcaggggtccctcggccagacccgtagaatcctgagataaggagtgtttctgacctttggtgtcatctagtcgagtcctctcattagtaaaggagcaaagtgaaacctgggggaggagaaggacttccctcaggttgcacagctgtttaggctatagaatattgatgtgtgaaaccattattgataatgcctagtagatcacatgtcaatgaacttgaaccccaaagatggtcgtgatgctttgccaaacccgcacactgccaacccctctactctccacctcagcccccacccacatctcccagagtattgcaattcagaacatttgggtcaaggtggagcaaggcactgacagtggccccacagggcatgtgtcactaatcactgtcccatggtctacgcacggcatctggctgctctgtctactgtgacttcttcctgtgtaatctcagtggggcccgtgtccacccacacatcgtgacccacataggggagaggttgcttttcttttgtgggctgagagtaggacaatgcaaatgaatgatctctagtagacagaaaagaacttggtctcttttttaaaatttcaaagagccagaagttctatgcctccttcaaagtaggcagaacaacgcagccaagatctactgtctgccatgctctgtgcaatgaagtctgcaggcctgaggaccatgtactgctgtccttcctcagagctctgcacaaacactgccaagtcctgaagacgcattcctttcctgccaacctctttccagataagcccttgaggtctcgggctgacctacacacacacacacacacacacacacacacacacacaccccccacacacacacacacgacagagaacatgccataaacatccttgaacccatgcaggaaagcccatcccatattctgaaaaaatgccaaattaggtttttctttctttttggaaatcagtcattacagtaaccgaaaccattgggttcaaggatgtttatggcatgttctctgtcgtgtgtgtgtgtgtgnncctctatntgtgtgcgtgtgtnttncnggcttaccgctctccaattctttatca

SEQ ID NO: 434437 - DNA, 2670 bp, Homo sapiens
agcgccgagaattcaccggagctcggggaggcgaggcgggagccctgagctgaggccgggcagcgcggacccgcgcaggaggaggcggcggggacaccggcgagtccccagcagggcccctgggctcccggaagggtctccagccacctgcccttcccgagaagagagagctctgggccttcttcctgccagtctggtcttcgagtgcgttcaggacagatagaccttggcacaggctgccccgagattcctgcgacgctgtctgttcctgccttctgtggagcatggcacccacaggcttccaggacggatcatagacccgagcctccaggagggcgccctgtgcggctcactgcgcggtccctctcagctcccctgccacccagcctctgaggccggctcctgtcccggaaatgccctcgggcacctggatgaggccatcccagagcgggacccaactgtgccacccaccaagcctccccctgcgccccccgtgccctcgcatgtccggctgccagggcagactgtagaatgtctgtgccccagatccacgtggaagaagtgggtgcagaagagggggcgggagcagccgcaccacccgatgaccacctccggagcctgaaggccctcaccgagaaactgaggctggagacccgcaggccctcctacctggaatggcaggccaggctggaggagcagacctggcccttcccgaggccggctgcggaccacaggcgagcttggaggagggggagcgtggggggcaggagcccttgctccccctgagagaggctgggcagcaccccccttctgccaggagtgccagccaaggtgccagacccctgtccactggcaagctggaaggctttcagagcatcgatgaagctatagcctggctcaggaaggaactgacggagatgcggctgcaggaccagcaactggccagacagctcatgcgcctgcgtggcgacatcaacaagctgaaaatcgaacacacctgccgcctccacaggaggatgctcaacgatgccacctacgagctggaggagcgggatgagctggccgacctcttctgtgactcccctcttgcctcctccttcagcctctccacaccactcaagcttattggcgtgaccaagatgaacatcaactctcggaggttctctctctgctgaggagccctcagactgggcggaggggctggagcggagggcttgggctggaggggtgtcagaggaagctgaggccaagttactccagtgggtctcccggaggcaggggtccctgggactggcgactcaagggccccaggacctattcagtggtgctctcccacccaggggccctgggtgtggatgccagtgtctctgtgactggctcttgcttactacccaaagagctctgcagaagggccgctccaaccaagatgttaaaggagacctgggttcccaccataatccatccctccacggtcacgttcctgtttcctggaatcactggtgctatgaactgggattcccaaagggaggccccccaacaaagctgtcatttttgcagaaggctgtcccgcaagggccttgggggaaattaggcatgtcagatgtgcctgtctcacgtgctgttgctgtcctctaagtattgtctcaaattcaccctaagtacatgactcagcaacattgacagggagctactaggaagggaaaatcgaaaggcatgacaaatgggcacttggggacgcagccccagtggctggcagccagtgtctctggtgagcctgacactacaaggctgtgtaaattgtaaattctggcgtgtgctgggacatgtgatgggggcactagcgtagcttgggtgcaacaagcacagatgtccccattgtctcccctggccacatgcatctccaaagagcctcttcactgccacccacaccccagggtgacagcctgggagaccactggtgactgaaccaggcaggtcctgaaagcattttccataactgaattctcctgcaggggcgtgaccggggcctcctggtggattctggtggtgtcaccttactgccctctctggaaagacaatctagggagcccagaggcccatcctgagcctcctctgagattttgtgcctgacctaaacaactagttttaataagactgttactgatgtgttgttcacttgttagtaactgatttttgtccaaatgcggaagccacttgtgtaggtcaactacagtgcgtaggatttgattttaagagtttctccctcccaacaggcttgaggatcagcaagttaagaccccagcaggttagggaggtcagtctggggtcatacggcatggcaggggtccctcggccagacccgtagaatcctgagataaggagtgtttctgacctttggtgtcatctagtcgagtcctctcattagtaaaggagcaaagtgaaacctgggggaggagaaggacttccctcaggttgcacagctgtttaggctatagaatattgatgtgtgaaaccattattgataatgcctagtagatcacatgtcaatgaacttgaaccccaaagatggtcgtgatgctttgccaaacccgcacactgccaacccctctactctctgacccaaatgttctgaattgcagtactctgggagatgtgggtgggctcactgag

SEQ ID NO: 434438 - DNA, 302 bp, Homo sapiens
ggggattctcgcttgctccaagcagagctggaggtgacagcgggtttctctgcttaccagttggggtggactattccttctcattctccatggatgccccttgctagggcaggctcgtagcctagggcggcagaggtcgggcagcaggacgtcctccattcacatccccaccacaggctggggctgaggaaaacgtctggactggaaagttctgctctcctttcttaagcgtctgcgtgccatgtcggagaggaatcccaggacaccgcgaggtggtcctgctgcctgttcagcttttgcca

SEQ ID NO: 434439 - DNA, 609 bp, Homo sapiens
agcagcgccgagaattcaccggagctcggggaggcgaggcgggagccctgagctgaggccgggcagcgcggacccgcgcaggaggaggcggcggggacaccggcgagtccccagcagggcccctgggctcccggaaggtgggttcgcgccggcggcggggactttcccagggactgggaggtgtggccgcggcgggcggcgcagtctgggcaggggctgaggcgtcgcaggtccccagcgcgagcactggcccggagcagcccgatcccaaagcgccctggaggggacgcgctcctaccgcccccccgggagaggccgctcatgcgctcccgcgggttcgctgccctcccagaggagccgggcagccagggctggacttcatctcctagctccctgctggccgtgtccgggctcggattctgggtggaggttcggggtctgccgtctgagagggagggccgcactcagcctctccgggtccactcccaggcggctggtgacctccaagcccagcctggctcctgtgtataggttcagtgagatggaagtttctgtccccacggatgcggtccctaactaatgggaggtggcccagggcacctggaccca

SEQ ID NO: 434440 - DNA, 4087 bp, Homo sapiens
agcgccgagaattcaccggagctcggggaggcgaggcgggagccctgagctgaggccgggcagcgcggacccgcgcaggaggaggcggcggggacaccggcgagtccccagcagggcccctgggctcccggaagggtctccagccacctgcccttcccgagaagagagagctctgggccttcttcctgccagtctggtcttcgagtgcgttcaggacagatagaccttggcacaggctgccccgagattcctgcgacgctgtctgttcctgccttctgtggagcatggcacccacaggcttccaggacggatcatagacccgagcctccaggagggcgccctgtgcggctcactgcgcggtccctctcagctcccctgccacccagcctctgaggccggctcctgtcccggaaatgccctcgggcacctggatgaggccatcccagagcgggacccaactgtgccacccaccaagcctccccctgcgccccccgtgccctcgcatgtccggctgccagggcagactgtagaatgtctgtgccccagatccacgtggaagaagtgggtgcagaagagggggcgggagcagccgcaccacccgatgaccacctccggagcctgaaggccctcaccgagaaactgaggctggagacccgcaggccctcctacctggaatggcaggccaggctggaggagcagacctggcccttcccgaggccggctgcggaccacaggcgagcttggaggagggggagcgtggggggcaggagcccttgctccccctgagagaggctgggcagcaccccccttctgccaggagtgccagccaaggtgccagacccctgtccactggcaagctggaaggctttcagagcatcgatgaagctatagcctggctcaggaaggaactgacggagatgcggctgcaggaccagcaactggccagacagctcatgcgcctgcgtggcgacatcaacaagctgaaaatcgaacacacctgccgcctccacaggaggatgctcaacgatgccacctacgagctggaggagcgggatgagctggccgacctcttctgtgactcccctcttgcctcctccttcagcctctccacaccactcaagcttattggcgtgaccaagatgaacatcaactctcggaggttctctctctgctgaggagccctcagactgggcggaggggctggagcggagggcttgggctggaggggtgtcagaggaagctgaggccaagttactccagtgggtctcccggaggcaggggtccctgggactggcgactcaagggccccaggacctattcagtggtgctctcccacccaggggccctgggtgtggatgccagtgtctctgtgactggctcttgcttactacccaaagagctctgcagaagggccgctccaaccaagatgttaaaggagacctgggttcccaccataatccatccctccacggtcacgttcctgtttcctggaatcactggtgctatgaactgggattcccaaagggaggccccccaacaaagctgtcatttttgcagaaggctgtcccgcaagggccttgggggaaattaggcatgtcagatgtgcctgtctcacgtgctgttgctgtcctctaagtattgtctcaaattcaccctaagtacatgactcagcaacattgacagggagctactaggaagggaaaatcgaaaggcatgacaaatgggcacttggggacgcagccccagtggctggcagccagtgtctctggtgagcctgacactacaaggctgtgtaaattgtaaattctggcgtgtgctgggacatgtgatgggggcactagcgtagcttgggtgcaacaagcacagatgtccccattgtctcccctggccacatgcatctccaaagagcctcttcactgccacccacaccccagggtgacagcctgggagaccactggtgactgaaccaggcaggtcctgaaagcattttccataactgaattctcctgcaggggcgtgaccggggcctcctggtggattctggtggtgtcaccttactgccctctctggaaagacaatctagggagcccagaggcccatcctgagcctcctctgagattttgtgcctgacctaaacaactagttttaataagactgttactgatgtgttgttcacttgttagtaactgatttttgtccaaatgcggaagccacttgtgtaggtcaactacagtgcgtaggatttgattttaagagtttctccctcccaacaggcttgaggatcagcaagttaagaccccagcaggttagggaggtcagtctggggtcatacggcatggcaggggtccctcggccagacccgtagaatcctgagataaggagtgtttctgacctttggtgtcatctagtcgagtcctctcattagtaaaggagcaaagtgaaacctgggggaggagaaggacttccctcaggttgcacagctgtttaggctatagaatattgatgtgtgaaaccattattgataatgcctagtagatcacatgtcaatgaacttgaaccccaaagatggtcgtgatgctttgccaaacccgcacactgccaacccctctactctccacctcagcccccacccacatctcccagagtattgcaattcagaacatttgggtcaaggtggagcaaggcactgacagtggccccacagggcatgtgtcactaatcactgtcccatggtctacgcacggcatctggctgctctgtctactgtgacttcttcctgtgtaatctcagtggggcccgtgtccacccacacatcgtgacccacataggggagaggttgcttttcttttgtgggctgagagtaggacaatgcaaatgaatgatctctagtagacagaaaagaacttggtctcttttttaaaatttcaaagagccagaagttctatgcctccttcaaagtaggcagaacaacgcagccaagatctactgtctgccatgctctgtgcaatgaagtctgcaggcctgaggaccatgtactgctgtccttcctcagagctctgcacaaacactgccaagtcctgaagacgcattcctttcctgccaacctctttccagataagcccttgaggtctcgggctgacctacacacacacacacacacacacacacacacacacacaccccccacacacacacacacgacagagaacatgccataaacatccttgaacccatgcaggaaagcccatcccatattctgaaaaaatgccaaattaggtttttctttctttttggaaatcagtcattacagtaaccgaaaccattgggttcagcgaaaatggaaagatttagctgaatgtagtcagtccaattaagttggatgcaactgagtgatttagttgcttgggtaacccagtgcttgcttgctttcttcattctctgggtggaaactaagatcaagacacatgtttggggataagttaaatgtctgagctattttgctcggtttatcctaagagaactttattatgggatgaggaggtgacccaagatgagaagtggagggggacagcgatgttttctaaacatcgtccagtgttgactggcttccttactttgcacagtgaacacaactaaccacattaattcagctttgtgaagtccctgctctctgtgggtctatgagtcagcagcaacattggcctaacctccgtcccagcctcctggctcaccacatgtgtacagtgctgtttgcagttgtactcattatccatccatctctctgccatccccaagcatcgctgggtgtaaaacgcaaactctccaccgacactgccatgcgtggtcatgtcttgatgccttcaggggctcagtagctatcaaagaggcctggagggcctgggcaggcttgacgatgcctgaccgagttcaagacccacaccctgtagcaataccaagtgctattacataatcaatggacgatttatacttttattttttatgattatttgtttctatattgctgttagaaaaagtgaaataaaaatacttcaaaagaagatatccatataaaaataaaaggagagaa

SEQ ID NO: 434441 - DNA, 4457 bp, Homo sapiens
agcgccgagaattcaccggagctcggggaggcgaggcgggagccctgagctgaggccgggcagcgcggacccgcgcaggaggaggcggcggggacaccggcgagtccccagcagggcccctgggctcccggaagatgaagaaaatgagacttagcaagcctgacaagacgtagagctaggccatctgatcccaactctagtgtctgcatctggagacagtggttctccaccccggctgcacactcggatcatcgggggagctgaacactgctgtctaagtcccatctctcgaccaattgaatcagaatccagttcctcagggggattctcgcttgctccaagcagagctggaggtgctgccatgcgggcacttaggtgaacacgagaagcctcgttctagaacaatgagtcacagcctgcttgtttagccatccagcccaggtgccaccgccttcttccctccacagctgcaggtttatttgcttctgtctctgaagaggtgagggtctccagccacctgcccttcccgagaagagagagctctgggccttcttcctgccagtctggtcttcgagtgcgttcaggacagatagaccttggcacaggctgccccgagattcctgcgacgctgtctgttcctgccttctgtggagcatggcacccacaggcttccaggacggatcatagacccgagcctccaggagggcgccctgtgcggctcactgcgcggtccctctcagctcccctgccacccagcctctgaggccggctcctgtcccggaaatgccctcgggcacctggatgaggccatcccagagcgggacccaactgtgccacccaccaagcctccccctgcgccccccgtgccctcgcatgtccggctgccagggcagactgtagaatgtctgtgccccagatccacgtggaagaagtgggtgcagaagagggggcgggagcagccgcaccacccgatgaccacctccggagcctgaaggccctcaccgagaaactgaggctggagacccgcaggccctcctacctggaatggcaggccaggctggaggagcagacctggcccttcccgaggccggctgcggaccacaggcgagcttggaggagggggagcgtggggggcaggagcccttgctccccctgagagaggctgggcagcaccccccttctgccaggagtgccagccaaggtgccagacccctgtccactggcaagctggaaggctttcagagcatcgatgaagctatagcctggctcaggaaggaactgacggagatgcggctgcaggaccagcaactggccagacagctcatgcgcctgcgtggcgacatcaacaagctgaaaatcgaacacacctgccgcctccacaggaggatgctcaacgatgccacctacgagctggaggagcgggatgagctggccgacctcttctgtgactcccctcttgcctcctccttcagcctctccacaccactcaagcttattggcgtgaccaagatgaacatcaactctcggaggttctctctctgctgaggagccctcagactgggcggaggggctggagcggagggcttgggctggaggggtgtcagaggaagctgaggccaagttactccagtgggtctcccggaggcaggggtccctgggactggcgactcaagggccccaggacctattcagtggtgctctcccacccaggggccctgggtgtggatgccagtgtctctgtgactggctcttgcttactacccaaagagctctgcagaagggccgctccaaccaagatgttaaaggagacctgggttcccaccataatccatccctccacggtcacgttcctgtttcctggaatcactggtgctatgaactgggattcccaaagggaggccccccaacaaagctgtcatttttgcagaaggctgtcccgcaagggccttgggggaaattaggcatgtcagatgtgcctgtctcacgtgctgttgctgtcctctaagtattgtctcaaattcaccctaagtacatgactcagcaacattgacagggagctactaggaagggaaaatcgaaaggcatgacaaatgggcacttggggacgcagccccagtggctggcagccagtgtctctggtgagcctgacactacaaggctgtgtaaattgtaaattctggcgtgtgctgggacatgtgatgggggcactagcgtagcttgggtgcaacaagcacagatgtccccattgtctcccctggccacatgcatctccaaagagcctcttcactgccacccacaccccagggtgacagcctgggagaccactggtgactgaaccaggcaggtcctgaaagcattttccataactgaattctcctgcaggggcgtgaccggggcctcctggtggattctggtggtgtcaccttactgccctctctggaaagacaatctagggagcccagaggcccatcctgagcctcctctgagattttgtgcctgacctaaacaactagttttaataagactgttactgatgtgttgttcacttgttagtaactgatttttgtccaaatgcggaagccacttgtgtaggtcaactacagtgcgtaggatttgattttaagagtttctccctcccaacaggcttgaggatcagcaagttaagaccccagcaggttagggaggtcagtctggggtcatacggcatggcaggggtccctcggccagacccgtagaatcctgagataaggagtgtttctgacctttggtgtcatctagtcgagtcctctcattagtaaaggagcaaagtgaaacctgggggaggagaaggacttccctcaggttgcacagctgtttaggctatagaatattgatgtgtgaaaccattattgataatgcctagtagatcacatgtcaatgaacttgaaccccaaagatggtcgtgatgctttgccaaacccgcacactgccaacccctctactctccacctcagcccccacccacatctcccagagtattgcaattcagaacatttgggtcaaggtggagcaaggcactgacagtggccccacagggcatgtgtcactaatcactgtcccatggtctacgcacggcatctggctgctctgtctactgtgacttcttcctgtgtaatctcagtggggcccgtgtccacccacacatcgtgacccacataggggagaggttgcttttcttttgtgggctgagagtaggacaatgcaaatgaatgatctctagtagacagaaaagaacttggtctcttttttaaaatttcaaagagccagaagttctatgcctccttcaaagtaggcagaacaacgcagccaagatctactgtctgccatgctctgtgcaatgaagtctgcaggcctgaggaccatgtactgctgtccttcctcagagctctgcacaaacactgccaagtcctgaagacgcattcctttcctgccaacctctttccagataagcccttgaggtctcgggctgacctacacacacacacacacacacacacacacacacacacaccccccacacacacacacacgacagagaacatgccataaacatccttgaacccatgcaggaaagcccatcccatattctgaaaaaatgccaaattaggtttttctttctttttggaaatcagtcattacagtaaccgaaaccattgggttcagcgaaaatggaaagatttagctgaatgtagtcagtccaattaagttggatgcaactgagtgatttagttgcttgggtaacccagtgcttgcttgctttcttcattctctgggtggaaactaagatcaagacacatgtttggggataagttaaatgtctgagctattttgctcggtttatcctaagagaactttattatgggatgaggaggtgacccaagatgagaagtggagggggacagcgatgttttctaaacatcgtccagtgttgactggcttccttactttgcacagtgaacacaactaaccacattaattcagctttgtgaagtccctgctctctgtgggtctatgagtcagcagcaacattggcctaacctccgtcccagcctcctggctcaccacatgtgtacagtgctgtttgcagttgtactcattatccatccatctctctgccatccccaagcatcgctgggtgtaaaacgcaaactctccaccgacactgccatgcgtggtcatgtcttgatgccttcaggggctcagtagctatcaaagaggcctggagggcctgggcaggcttgacgatgcctgaccgagttcaagacccacaccctgtagcaataccaagtgctattacataatcaatggacgatttatacttttattttttatgattatttgtttctatattgctgttagaaaaagtgaaataaaaatacttcaaaagaagatatccatataaaaataaaaggagagaa

SEQ ID NO: 434442 - DNA, 3622 bp, Homo sapiens
agcgccgagaattcaccggagctcggggaggcgaggcgggagccctgagctgaggccgggcagcgcggacccgcgcaggaggaggcggcggggacaccggcgagtccccagcagggcccctgggctcccggaagggtctccagccacctgcccttcccgagaagagagagctctgggccttcttcctgccagtctggtcttcgagtgcgttcaggacagatagaccttggcacaggctgccccgagattcctgcgacgctgtctgttcctgccttctgtggagcatggcacccacaggcttccaggacggatcatagacccgagcctccaggagggcgccctgtgcggctcactgcgcggtccctctcagctcccctgccacccagcctctgaggccggctcctgtcccggaaatgccctcgggcacctggatgaggccatcccagagcgggacccaactgtgccacccaccaagcctccccctgcgccccccgtgccctcgcatgtccggctgccagggcagactgtagaatgtctgtgccccagatccacgtggaagaagtgggtgcagaagagggggcgggagcagccgcaccacccgatgaccacctccggagcctgaaggccctcaccgagaaactgaggctggagacccgcaggccctcctacctggaatggcaggccaggctggaggagcagacctggcccttcccgaggccggctgcggaccacaggcgagcttggaggagggggagcgtggggggcaggagcccttgctccccctgagagaggctgggcagcaccccccttctgccaggagtgccagccaaggtgccagacccctgtccactggcaagctggaaggctttcagagcatcgatgaagctatagcctggctcaggaaggaactgacggagatgcggctgcaggaccagcaactggccagacagctcatgcgcctgcgtggcgacatcaacaagctgaaaatcgaacacacctgccgcctccacaggaggatgctcaacgatgccacctacgagctggaggagcgggatgagctggccgacctcttctgtgactcccctcttgcctcctccttcagcctctccacaccactcaagcttattggcgtgaccaagatgaacatcaactctcggaggttctctctctgctgaggagccctcagactgggcggaggggctggagcggagggcttgggctggaggggtgtcagaggaagctgaggccaagttactccagtgggtctcccggaggcaggggtccctgggactggcgactcaagggccccaggacctattcagtggtgctctcccacccaggggccctgggtgtggatgccagtgtctctgtgactggctcttgcttactacccaaagagctctgcagaagggccgctccaaccaagatgttaaaggagacctgggttcccaccataatccatcccccagggtgacagcctgggagaccactggtgactgaaccaggcaggtcctgaaagcattttccataactgaattctcctgcaggggcgtgaccggggcctcctggtggattctggtggtgtcaccttactgccctctctggaaagacaatctagggagcccagaggcccatcctgagcctcctctgagattttgtgcctgacctaaacaactagttttaataagactgttactgatgtgttgttcacttgttagtaactgatttttgtccaaatgcggaagccacttgtgtaggtcaactacagtgcgtaggatttgattttaagagtttctccctcccaacaggcttgaggatcagcaagttaagaccccagcaggttagggaggtcagtctggggtcatacggcatggcaggggtccctcggccagacccgtagaatcctgagataaggagtgtttctgacctttggtgtcatctagtcgagtcctctcattagtaaaggagcaaagtgaaacctgggggaggagaaggacttccctcaggttgcacagctgtttaggctatagaatattgatgtgtgaaaccattattgataatgcctagtagatcacatgtcaatgaacttgaaccccaaagatggtcgtgatgctttgccaaacccgcacactgccaacccctctactctccacctcagcccccacccacatctcccagagtattgcaattcagaacatttgggtcaaggtggagcaaggcactgacagtggccccacagggcatgtgtcactaatcactgtcccatggtctacgcacggcatctggctgctctgtctactgtgacttcttcctgtgtaatctcagtggggcccgtgtccacccacacatcgtgacccacataggggagaggttgcttttcttttgtgggctgagagtaggacaatgcaaatgaatgatctctagtagacagaaaagaacttggtctcttttttaaaatttcaaagagccagaagttctatgcctccttcaaagtaggcagaacaacgcagccaagatctactgtctgccatgctctgtgcaatgaagtctgcaggcctgaggaccatgtactgctgtccttcctcagagctctgcacaaacactgccaagtcctgaagacgcattcctttcctgccaacctctttccagataagcccttgaggtctcgggctgacctacacacacacacacacacacacacacacacacacacaccccccacacacacacacacgacagagaacatgccataaacatccttgaacccatgcaggaaagcccatcccatattctgaaaaaatgccaaattaggtttttctttctttttggaaatcagtcattacagtaaccgaaaccattgggttcagcgaaaatggaaagatttagctgaatgtagtcagtccaattaagttggatgcaactgagtgatttagttgcttgggtaacccagtgcttgcttgctttcttcattctctgggtggaaactaagatcaagacacatgtttggggataagttaaatgtctgagctattttgctcggtttatcctaagagaactttattatgggatgaggaggtgacccaagatgagaagtggagggggacagcgatgttttctaaacatcgtccagtgttgactggcttccttactttgcacagtgaacacaactaaccacattaattcagctttgtgaagtccctgctctctgtgggtctatgagtcagcagcaacattggcctaacctccgtcccagcctcctggctcaccacatgtgtacagtgctgtttgcagttgtactcattatccatccatctctctgccatccccaagcatcgctgggtgtaaaacgcaaactctccaccgacactgccatgcgtggtcatgtcttgatgccttcaggggctcagtagctatcaaagaggcctggagggcctgggcaggcttgacgatgcctgaccgagttcaagacccacaccctgtagcaataccaagtgctattacataatcaatggacgatttatacttttattttttatgattatttgtttctatattgctgttagaaaaagtgaaataaaaatacttcaaaagaagatatccatataaaaataaaaggagagaa

SEQ ID NO: 434443 - DNA, 625 bp, Homo sapiens
gttgttttgtagtgtgaatgagcatgagtcactgatctaagccctttcactggatgaagtgaaaagattttttttcaacaaaagagggagagagagaatcaagactctgataaacatagtactatttttaaaagaaatccaataacaataaagattgttctattctctgccttcccatttagatagggtttaaaccagcaggaggcatccgcagtgcaaaggattcccttgcttggctctctcttgtaaaggaggagcttggagatgagtggctgaagccagaactctttcgaataggtgccagtactctgctctcggacattgagaggcaggtgagtaatcatctctgtctttggaataaattaacaagtgttttttgagaaaggaattgaaaagtcaaattgagaactggagataaaaactcatctgattgacctcatcctacccaatcctctaccttttcttccaagcaaaccgccatcagaagtgagtagggtggagattctgctgaagcacatactagtgaggctttctaatgaaatgttcattaaaactatttattattatttgatagtataattattaactgatgtgtataattatagaatgattgttaattaaactc

SEQ ID NO: 434444 - DNA, 711 bp, Homo sapiens
  misc_feature (3)..(3): n is a, c, g, or t
  misc_feature (272)..(272): n is a, c, g, or t
  misc_feature (274)..(274): n is a, c, g, or t
  misc_feature (288)..(288): n is a, c, g, or t
  misc_feature (292)..(293): n is a, c, g, or t
  misc_feature (310)..(310): n is a, c, g, or t
  misc_feature (319)..(320): n is a, c, g, or t
  misc_feature (322)..(325): n is a, c, g, or t
  misc_feature (328)..(328): n is a, c, g, or t
  misc_feature (331)..(331): n is a, c, g, or t
  misc_feature (337)..(337): n is a, c, g, or t
  misc_feature (350)..(350): n is a, c, g, or t
atncaccaggtggcctgcggtcatatactcctggatccttcgggctgcttgaattcggcacgttctcatctttcatttttgccgtggataggcgcttttattaattgttgtcctaatgaaatttctgacattgtcatatacaacgatgaatatcattaaaatttttaaaataataaaaaaaaaaaaaaaaaaaaaaaaaaaaaaaaaaaaaaaaaaaaaaaaaaaaaaaaaaaaaaaaaaaaaaaaaaaaaaaaaaaaaaaaaaaaaaaaananaaaaaaataataanaaannaacaataaaaaataaanaaaaaaaannannnnatnaanaaaaanaatactaaaaaantaaaaaaaaaaaaaaccttttaataaatatttttttaatccataatttccacccaaattaattgtctatctaacttacccctcatctttttacataataaaacatttgaattgtttaaacaacatactaattgctggattttttaaaaaactcggatttttggaaaacatcaaaaagtggtggatgaaaataaaagctctcaccccattgggggtggcccctcttacccaaaatagtgttttattggtggcctgagcataatccaaatattattctccttctctgttcacaagtgtggatttgtttcaaaaagggcctatttttttacctaatagggtatttcattctctcccccctcctt

SEQ ID NO: 434445 - DNA, 1999 bp, Homo sapiens
  misc_feature (1959)..(1959): n is a, c, g, or t
ggcccgctccaacatcagaatggtaacagctttcaggagcctaccagccggcagctccggagctgcccgcgccatgtccgcgcacaatcggggcaccgagctcgaccttagctggatctccaaaatacaagtgaatcacccggcagttctgaggcgtgcggaacaaatccaggctcgcagaaccgtgaaaaaggagtggcaggctgcttggctcctgaaagctgttacctttatagatcttactacactttcaggtgatgatacatcttccaacattcaaaggctctgttataaagccaaatacccaatccgggaagatctcttaaaagctttaaatatgcatgataaaggcattactacagccgccgtttgtgtttatcccgcccgggtgtgtgatgctgtaaaagcactcaaggctgcaggctgtaatatccctgtggcatcagtggccgctggatttccagctggacagactcatttgaagacacgattagaagagatcagattggctgtggaagatggagctacagaaatcgacgtggtaattaacagaagcttggtgctgacaggccagtgggaagccctgtatgatgagattcgtcagtttcgcaaggcctgtggggaggctcatcttaaaactatattagcgacaggagaacttggaactcttactaatgtctataaagccagtatgatagcaatgatggcaggatcagattttattaagacctctactggaaaagaaacagtaaatgccaccttcccggtagctatagtaatgctgcgggccattagagatttcttctggaaaactggaaacaagatagggtttaaaccagcaggaggcatccgcagtgcaaaggattcccttgcttggctctctcttgtaaaggaggagcttggagatgagtggctgaagccagaactctttcgaataggtgccagtactctgctctcggacattgagaggcagatttaccatcatgtgactggaagatatgcagcttatcatgatcttccaatgtcttaaatcagtcaccagttccagaaaagttctttacgacaatgtttaaaaattatttttctacgtaattgctaaaattatttaattaaaaaattgggcagtaggtaactggcattcctctctttaaaatttctaccgaacttaatggaatggaaaaagcaaactcatccacatgtggtactcatttcaggcacatctgaaatgatcttaattactagaagatctgcactattaactttgtgaagagtttctcctaaaaactttaagtaaaatgttaatggtagctttgataacatcaaattctaagggagaaaaaaacaatattaaaccgcccaagcagtgtgccctagcagaggaaaatgcaacatctcgcaagcgctgctgtaacgacttcaggagtcactgattcagcactaatttcctgctgtgaaaactcatctttcatttttgccgtggataggcgcttttattaattgttgtcctaatgaaatttctgacattgtcatatacaacgatgaatatcattaaaatttttaaaataataaagttcctatagtttatttttttaaaaaacttaaaaattgttacaatacataatgaaaaaataatccattaaacataaaaagagggggggcgccccccaagagagtttcccccgcggggggccgcccaaggctctttaagcgcgtcgttactcccggcgttttctctggctgttcacagagggggtggcctcccccatattagggtgagcgcgctcgcattaatatatatagggcgctagcgagcaccgcgtggccgcgcctcgctttccacccacacgcgttccgttggtacgctgggcgacaaacaacctgcgtgccgtaccgcggcgggggcacctcttttggggcgacagcgggaacccccctttaatcttctcggggggggggggngcacccatctacttggagacacgaacaccttacccttcgg

SEQ ID NO: 434446 - DNA, 2095 bp, Homo sapiens
  misc_feature (1665)..(1665): n is a, c, g, or t
  misc_feature (1667)..(1667): n is a, c, g, or t
  misc_feature (1681)..(1681): n is a, c, g, or t
  misc_feature (1685)..(1686): n is a, c, g, or t
  misc_feature (1703)..(1703): n is a, c, g, or t
  misc_feature (1862)..(1862): n is a, c, g, or t
ggcccgctccaacatcagaatggtaacagctttcaggagcctaccagccggcagctccggagctgcccgcgccatgtccgcgcacaatcggggcaccgagctcgaccttagctggatctccaaaatacaagtgaatcacccggcagttctgaggcgtgcggaacaaatccaggctcgcagaaccgtgaaaaaggagtggcaggctgcttggctcctgaaagctgttacctttatagatcttactacactttcaggtgatgatacatcttccaacattcaaaggctctgttataaagccaaatacccaatccgggaagatctcttaaaagctttaaatatgcatgataaaggcattactacagccgccgtttgtgtttatcccgcccgggtgtgtgatgctgtaaaagcactcaaggctgcaggctgtaatatccctgtggcatcagtggccgctggatttccagctggacagactcatttgaagacacgattagaagagatcagattggctgtggaagatggagctacagaaatcgacgtggtaattaacagaagcttggtgctgacaggccagtgggaagccctgtatgatgagattcgtcagtttcgcaaggcctgtggggaggctcatcttaaaactatattagcgacaggagaacttggaactcttactaatgtctataaagccagtatgatagcaatgatggcaggatcagattttattaagacctctactggaaaagaaacagtaaatgccaccttcccggtagctatagtaatgctgcgggccattagagatttcttctggaaaactggaaacaagatagggtttaaaccagcaggaggcatccgcagtgcaaaggattcccttgcttggctctctcttgtaaaggaggagcttggagatgagtggctgaagccagaactctttcgaataggtgccagtactctgctctcggacattgagaggcagatttaccatcatgtgactggaagatatgcagcttatcatgatcttccaatgtcttaaatcagtcaccagttccagaaaagttctttacgacaatgtttaaaaattatttttctacgtaattgctaaaattatttaattaaaaaattgggcagtaggtaactggcattcctctctttaaaatttctaccgaacttaatggaatggaaaaagcaaactcatccacatgtggtactcatttcaggcacatctgaaatgatcttaattactagaagatctgcactattaactttgtgaagagtttctcctaaaaactttaagtaaaatgttaatggtagctttgataacatcaaattctaagggagaaaaaaacaatattaaaccgcccaagcagtgtgccctagcagaggaaaatgcaacatctcgcaagcgctgctgtaacgacttcaggagtcactgattcagcactaatttcctgctgtgaaaactcatctttcatttttgccgtggataggcgcttttattaattgttgtcctaatgaaatttctgacattgtcatatacaacgatgaatatcattaaaatttttaaaataataaaaaaaaaaaaaaaaaaaaaaaaaaaaaaaaaaaaaaaaaaaaaaaaaaaaaaaaaaaaaaaaaaaaaaaaaaaaaaaaaaaaaaaaaaaaaaaaananaaaaaaataataanaaannaacaataaaaaataaanaaaaaaaaccaaactcaaaaaaaaaaaattataacacaaaaattttctcacaattctcctttcctccaaatttacaccaaaaatttttataaaaattccaactcccccctcttctttttcccacaaaaaccacctctctattcccttttttaaaaatanatccctctccccatctcttaatcttccccacttataatctcttttcttaaacccttattttcttcaacaaatttccccccctataaaacaaaaaatcccctctcttaactaaaaccgggttctttccctccaacatactctcttctatgccatccaaccactcgggcggtgattttttcagaaatatcccttcctggggctgctccctatttctacccactttctgctctgcc

SEQ ID NO: 434447 - DNA, 2104 bp, Homo sapiens
  misc_feature (1669)..(1670): n is a, c, g, or t
  misc_feature (1672)..(1675): n is a, c, g, or t
  misc_feature (1678)..(1678): n is a, c, g, or t
  misc_feature (1681)..(1681): n is a, c, g, or t
  misc_feature (1687)..(1687): n is a, c, g, or t
  misc_feature (1700)..(1700): n is a, c, g, or t
ggcccgctccaacatcagaatggtaacagctttcaggagcctaccagccggcagctccggagctgcccgcgccatgtccgcgcacaatcggggcaccgagctcgaccttagctggatctccaaaatacaagtgaatcacccggcagttctgaggcgtgcggaacaaatccaggctcgcagaaccgtgaaaaaggagtggcaggctgcttggctcctgaaagctgttacctttatagatcttactacactttcaggtgatgatacatcttccaacattcaaaggctctgttataaagccaaatacccaatccgggaagatctcttaaaagctttaaatatgcatgataaaggcattactacagccgccgtttgtgtttatcccgcccgggtgtgtgatgctgtaaaagcactcaaggctgcaggctgtaatatccctgtggcatcagtggccgctggatttccagctggacagactcatttgaagacacgattagaagagatcagattggctgtggaagatggagctacagaaatcgacgtggtaattaacagaagcttggtgctgacaggccagtgggaagccctgtatgatgagattcgtcagtttcgcaaggcctgtggggaggctcatcttaaaactatattagcgacaggagaacttggaactcttactaatgtctataaagccagtatgatagcaatgatggcaggatcagattttattaagacctctactggaaaagaaacagtaaatgccaccttcccggtagctatagtaatgctgcgggccattagagatttcttctggaaaactggaaacaagatagggtttaaaccagcaggaggcatccgcagtgcaaaggattcccttgcttggctctctcttgtaaaggaggagcttggagatgagtggctgaagccagaactctttcgaataggtgccagtactctgctctcggacattgagaggcagatttaccatcatgtgactggaagatatgcagcttatcatgatcttccaatgtcttaaatcagtcaccagttccagaaaagttctttacgacaatgtttaaaaattatttttctacgtaattgctaaaattatttaattaaaaaattgggcagtaggtaactggcattcctctctttaaaatttctaccgaacttaatggaatggaaaaagcaaactcatccacatgtggtactcatttcaggcacatctgaaatgatcttaattactagaagatctgcactattaactttgtgaagagtttctcctaaaaactttaagtaaaatgttaatggtagctttgataacatcaaattctaagggagaaaaaaacaatattaaaccgcccaagcagtgtgccctagcagaggaaaatgcaacatctcgcaagcgctgctgtaacgacttcaggagtcactgattcagcactaatttcctgctgtgaaaactcatctttcatttttgccgtggataggcgcttttattaattgttgtcctaatgaaatttctgacattgtcatatacaacgatgaatatcattaaaatttttaaaataataaaaaaaaaaaaaaaaaaaaaaaaaaaaaaaaaaaaaaaaaaaaaaaaaaaaaaaaattaaaaaaaaaaaaaaaaaaaaaaaaaaaaaaaaatataaaaaannannnnatnaanaaaaanaatactaaaaaantaaaaaaaaaaaaatataaacctcgaaattttttttcctccttcccaatttccccccaaaaaaaagtgtttatttctccaatccccattttaaggggggggtaaaaaacttttgttttttgggggtgtcgaaaaaataatgcgtccccctgggggggtcccctaaccaaaatatttttttgggaatttttttaaatcccaaaattctttcctcctctaaaaaaataattccctggcccattttaaaaagggggtttattttcttataaacaagctctcttattgggatttttcctcaaaagggggttttttttcctaaaaaattcttttttcgggttcccccctctatatataaacccttgttggtgggaacataccccttttttctcatatcccttgcttctc

SEQ ID NO: 434448 - DNA, 2138 bp, Homo sapiens
  misc_feature (2098)..(2098): n is a, c, g, or t
ggtacctcgtggagaagacgggggaggggagcagcgagatttccttgcggagcaatattcctagggtacagacctcgtagcccgggcccgcgactccgccccgggagcgggcaggggcggggcgagcgctccagctggcgggaaggaggaagggccgggcgcggcgcagaggcgggcgcctaccagccggcagctccggagctgcccgcgccatgtccgcgcacaatcggggcaccgagctcgaccttagctggatctccaaaatacaagtgaatcacccggcagttctgaggcgtgcggaacaaatccaggctcgcagaaccgtgaaaaaggagtggcaggctgcttggctcctgaaagctgttacctttatagatcttactacactttcaggtgatgatacatcttccaacattcaaaggctctgttataaagccaaatacccaatccgggaagatctcttaaaagctttaaatatgcatgataaaggcattactacagccgccgtttgtgtttatcccgcccgggtgtgtgatgctgtaaaagcactcaaggctgcaggctgtaatatccctgtggcatcagtggccgctggatttccagctggacagactcatttgaagacacgattagaagagatcagattggctgtggaagatggagctacagaaatcgacgtggtaattaacagaagcttggtgctgacaggccagtgggaagccctgtatgatgagattcgtcagtttcgcaaggcctgtggggaggctcatcttaaaactatattagcgacaggagaacttggaactcttactaatgtctataaagccagtatgatagcaatgatggcaggatcagattttattaagacctctactggaaaagaaacagtaaatgccaccttcccggtagctatagtaatgctgcgggccattagagatttcttctggaaaactggaaacaagatagggtttaaaccagcaggaggcatccgcagtgcaaaggattcccttgcttggctctctcttgtaaaggaggagcttggagatgagtggctgaagccagaactctttcgaataggtgccagtactctgctctcggacattgagaggcagatttaccatcatgtgactggaagatatgcagcttatcatgatcttccaatgtcttaaatcagtcaccagttccagaaaagttctttacgacaatgtttaaaaattatttttctacgtaattgctaaaattatttaattaaaaaattgggcagtaggtaactggcattcctctctttaaaatttctaccgaacttaatggaatggaaaaagcaaactcatccacatgtggtactcatttcaggcacatctgaaatgatcttaattactagaagatctgcactattaactttgtgaagagtttctcctaaaaactttaagtaaaatgttaatggtagctttgataacatcaaattctaagggagaaaaaaacaatattaaaccgcccaagcagtgtgccctagcagaggaaaatgcaacatctcgcaagcgctgctgtaacgacttcaggagtcactgattcagcactaatttcctgctgtgaaaactcatctttcatttttgccgtggataggcgcttttattaattgttgtcctaatgaaatttctgacattgtcatatacaacgatgaatatcattaaaatttttaaaataataaagttcctatagtttatttttttaaaaaacttaaaaattgttacaatacataatgaaaaaataatccattaaacataaaaagagggggggcgccccccaagagagtttcccccgcggggggccgcccaaggctctttaagcgcgtcgttactcccggcgttttctctggctgttcacagagggggtggcctcccccatattagggtgagcgcgctcgcattaatatatatagggcgctagcgagcaccgcgtggccgcgcctcgctttccacccacacgcgttccgttggtacgctgggcgacaaacaacctgcgtgccgtaccgcggcgggggcacctcttttggggcgacagcgggaacccccctttaatcttctcggggggggggggngcacccatctacttggagacacgaacaccttacccttcgg

SEQ ID NO: 434449 - DNA, 1997 bp, Homo sapiens
  misc_feature (1957)..(1957): n is a, c, g, or t
atttctgcctgacattgtgtagctgtatcaggctggctttctggaatagctcagtggccaaagattgatcacgaagggtttagagctgtgaaaatgccccagaccttagctggatctccaaaatacaagtgaatcacccggcagttctgaggcgtgcggaacaaatccaggctcgcagaaccgtgaaaaaggagtggcaggctgcttggctcctgaaagctgttacctttatagatcttactacactttcaggtgatgatacatcttccaacattcaaaggctctgttataaagccaaatacccaatccgggaagatctcttaaaagctttaaatatgcatgataaaggcattactacagccgccgtttgtgtttatcccgcccgggtgtgtgatgctgtaaaagcactcaaggctgcaggctgtaatatccctgtggcatcagtggccgctggatttccagctggacagactcatttgaagacacgattagaagagatcagattggctgtggaagatggagctacagaaatcgacgtggtaattaacagaagcttggtgctgacaggccagtgggaagccctgtatgatgagattcgtcagtttcgcaaggcctgtggggaggctcatcttaaaactatattagcgacaggagaacttggaactcttactaatgtctataaagccagtatgatagcaatgatggcaggatcagattttattaagacctctactggaaaagaaacagtaaatgccaccttcccggtagctatagtaatgctgcgggccattagagatttcttctggaaaactggaaacaagatagggtttaaaccagcaggaggcatccgcagtgcaaaggattcccttgcttggctctctcttgtaaaggaggagcttggagatgagtggctgaagccagaactctttcgaataggtgccagtactctgctctcggacattgagaggcagatttaccatcatgtgactggaagatatgcagcttatcatgatcttccaatgtcttaaatcagtcaccagttccagaaaagttctttacgacaatgtttaaaaattatttttctacgtaattgctaaaattatttaattaaaaaattgggcagtaggtaactggcattcctctctttaaaatttctaccgaacttaatggaatggaaaaagcaaactcatccacatgtggtactcatttcaggcacatctgaaatgatcttaattactagaagatctgcactattaactttgtgaagagtttctcctaaaaactttaagtaaaatgttaatggtagctttgataacatcaaattctaagggagaaaaaaacaatattaaaccgcccaagcagtgtgccctagcagaggaaaatgcaacatctcgcaagcgctgctgtaacgacttcaggagtcactgattcagcactaatttcctgctgtgaaaactcatctttcatttttgccgtggataggcgcttttattaattgttgtcctaatgaaatttctgacattgtcatatacaacgatgaatatcattaaaatttttaaaataataaagttcctatagtttatttttttaaaaaacttaaaaattgttacaatacataatgaaaaaataatccattaaacataaaaagagggggggcgccccccaagagagtttcccccgcggggggccgcccaaggctctttaagcgcgtcgttactcccggcgttttctctggctgttcacagagggggtggcctcccccatattagggtgagcgcgctcgcattaatatatatagggcgctagcgagcaccgcgtggccgcgcctcgctttccacccacacgcgttccgttggtacgctgggcgacaaacaacctgcgtgccgtaccgcggcgggggcacctcttttggggcgacagcgggaacccccctttaatcttctcggggggggggggngcacccatctacttggagacacgaacaccttacccttcgg

SEQ ID NO: 434450 - DNA, 2062 bp, Homo sapiens
  misc_feature (2022)..(2022): n is a, c, g, or t
ggcccgctccaacatcagaatggtaacagctttcaggagcctaccagccggcagctccggagctgcccgcgccatgtccgcgcacaatcggggcaccgagctcgctcgctggttggaaaacccaacaacccaaaaaacaaaacccaaaacaaacaacccccaagcagaccttagctggatctccaaaatacaagtgaatcacccggcagttctgaggcgtgcggaacaaatccaggctcgcagaaccgtgaaaaaggagtggcaggctgcttggctcctgaaagctgttacctttatagatcttactacactttcaggtgatgatacatcttccaacattcaaaggctctgttataaagccaaatacccaatccgggaagatctcttaaaagctttaaatatgcatgataaaggcattactacagccgccgtttgtgtttatcccgcccgggtgtgtgatgctgtaaaagcactcaaggctgcaggctgtaatatccctgtggcatcagtggccgctggatttccagctggacagactcatttgaagacacgattagaagagatcagattggctgtggaagatggagctacagaaatcgacgtggtaattaacagaagcttggtgctgacaggccagtgggaagccctgtatgatgagattcgtcagtttcgcaaggcctgtggggaggctcatcttaaaactatattagcgacaggagaacttggaactcttactaatgtctataaagccagtatgatagcaatgatggcaggatcagattttattaagacctctactggaaaagaaacagtaaatgccaccttcccggtagctatagtaatgctgcgggccattagagatttcttctggaaaactggaaacaagatagggtttaaaccagcaggaggcatccgcagtgcaaaggattcccttgcttggctctctcttgtaaaggaggagcttggagatgagtggctgaagccagaactctttcgaataggtgccagtactctgctctcggacattgagaggcagatttaccatcatgtgactggaagatatgcagcttatcatgatcttccaatgtcttaaatcagtcaccagttccagaaaagttctttacgacaatgtttaaaaattatttttctacgtaattgctaaaattatttaattaaaaaattgggcagtaggtaactggcattcctctctttaaaatttctaccgaacttaatggaatggaaaaagcaaactcatccacatgtggtactcatttcaggcacatctgaaatgatcttaattactagaagatctgcactattaactttgtgaagagtttctcctaaaaactttaagtaaaatgttaatggtagctttgataacatcaaattctaagggagaaaaaaacaatattaaaccgcccaagcagtgtgccctagcagaggaaaatgcaacatctcgcaagcgctgctgtaacgacttcaggagtcactgattcagcactaatttcctgctgtgaaaactcatctttcatttttgccgtggataggcgcttttattaattgttgtcctaatgaaatttctgacattgtcatatacaacgatgaatatcattaaaatttttaaaataataaagttcctatagtttatttttttaaaaaacttaaaaattgttacaatacataatgaaaaaataatccattaaacataaaaagagggggggcgccccccaagagagtttcccccgcggggggccgcccaaggctctttaagcgcgtcgttactcccggcgttttctctggctgttcacagagggggtggcctcccccatattagggtgagcgcgctcgcattaatatatatagggcgctagcgagcaccgcgtggccgcgcctcgctttccacccacacgcgttccgttggtacgctgggcgacaaacaacctgcgtgccgtaccgcggcgggggcacctcttttggggcgacagcgggaacccccctttaatcttctcggggggggggggngcacccatctacttggagacacgaacaccttacccttcgg

SEQ ID NO: 434451 - DNA, 1851 bp, Homo sapiens
  misc_feature (1811)..(1811): n is a, c, g, or t
ggcccgctccaacatcagaatggtaacagctttcaggagcctaccagccggcagctccggagctgcccgcgccatgtccgcgcacaatcggggcaccgagctcgaccttagctggatctccaaaatacaagtgaatcacccggcagttctgaggcgtgcggaacaaatccaggctcgcagaaccgtgaaaaaggagtggcaggcattactacagccgccgtttgtgtttatcccgcccgggtgtgtgatgctgtaaaagcactcaaggctgcaggctgtaatatccctgtggcatcagtggccgctggatttccagctggacagactcatttgaagacacgattagaagagatcagattggctgtggaagatggagctacagaaatcgacgtggtaattaacagaagcttggtgctgacaggccagtgggaagccctgtatgatgagattcgtcagtttcgcaaggcctgtggggaggctcatcttaaaactatattagcgacaggagaacttggaactcttactaatgtctataaagccagtatgatagcaatgatggcaggatcagattttattaagacctctactggaaaagaaacagtaaatgccaccttcccggtagctatagtaatgctgcgggccattagagatttcttctggaaaactggaaacaagatagggtttaaaccagcaggaggcatccgcagtgcaaaggattcccttgcttggctctctcttgtaaaggaggagcttggagatgagtggctgaagccagaactctttcgaataggtgccagtactctgctctcggacattgagaggcagatttaccatcatgtgactggaagatatgcagcttatcatgatcttccaatgtcttaaatcagtcaccagttccagaaaagttctttacgacaatgtttaaaaattatttttctacgtaattgctaaaattatttaattaaaaaattgggcagtaggtaactggcattcctctctttaaaatttctaccgaacttaatggaatggaaaaagcaaactcatccacatgtggtactcatttcaggcacatctgaaatgatcttaattactagaagatctgcactattaactttgtgaagagtttctcctaaaaactttaagtaaaatgttaatggtagctttgataacatcaaattctaagggagaaaaaaacaatattaaaccgcccaagcagtgtgccctagcagaggaaaatgcaacatctcgcaagcgctgctgtaacgacttcaggagtcactgattcagcactaatttcctgctgtgaaaactcatctttcatttttgccgtggataggcgcttttattaattgttgtcctaatgaaatttctgacattgtcatatacaacgatgaatatcattaaaatttttaaaataataaagttcctatagtttatttttttaaaaaacttaaaaattgttacaatacataatgaaaaaataatccattaaacataaaaagagggggggcgccccccaagagagtttcccccgcggggggccgcccaaggctctttaagcgcgtcgttactcccggcgttttctctggctgttcacagagggggtggcctcccccatattagggtgagcgcgctcgcattaatatatatagggcgctagcgagcaccgcgtggccgcgcctcgctttccacccacacgcgttccgttggtacgctgggcgacaaacaacctgcgtgccgtaccgcggcgggggcacctcttttggggcgacagcgggaacccccctttaatcttctcggggggggggggngcacccatctacttggagacacgaacaccttacccttcgg

SEQ ID NO: 434452 - DNA, 2084 bp, Homo sapiens
  misc_feature (2044)..(2044): n is a, c, g, or t
ggtacctcgtggagaagacgggggaggggagcagcgagatttccttgcggagcaatattcctagggtacagacctcgtagcccgggcccgcgactccgccccgggagcgggcaggggcggggcgagcgctccagctggcgggaaggaggaagggccgggcgcggcgcagaggcgggcgcctaccagccggcagctccggagctgcccgcgccatgtccgcgcacaatcggggcaccgagctcgaccttagctggatctccaaaatacaagtgaatcacccggcagttctgaggcgtgcggaacaaatccaggctcgcagaaccgtgaaaaaggagtggcaggctgcttggctcctgaaagctgttacctttatagatcttactacactttcaggtgatgatacatcttccaacattcaaaggctctgttataaagccaaatacccaatccgggaagatctcttaaaagctttaaatatgcatgataaaggcattactacagccgccgtttgtgtttatcccgcccgggtgttggccgctggatttccagctggacagactcatttgaagacacgattagaagagatcagattggctgtggaagatggagctacagaaatcgacgtggtaattaacagaagcttggtgctgacaggccagtgggaagccctgtatgatgagattcgtcagtttcgcaaggcctgtggggaggctcatcttaaaactatattagcgacaggagaacttggaactcttactaatgtctataaagccagtatgatagcaatgatggcaggatcagattttattaagacctctactggaaaagaaacagtaaatgccaccttcccggtagctatagtaatgctgcgggccattagagatttcttctggaaaactggaaacaagatagggtttaaaccagcaggaggcatccgcagtgcaaaggattcccttgcttggctctctcttgtaaaggaggagcttggagatgagtggctgaagccagaactctttcgaataggtgccagtactctgctctcggacattgagaggcagatttaccatcatgtgactggaagatatgcagcttatcatgatcttccaatgtcttaaatcagtcaccagttccagaaaagttctttacgacaatgtttaaaaattatttttctacgtaattgctaaaattatttaattaaaaaattgggcagtaggtaactggcattcctctctttaaaatttctaccgaacttaatggaatggaaaaagcaaactcatccacatgtggtactcatttcaggcacatctgaaatgatcttaattactagaagatctgcactattaactttgtgaagagtttctcctaaaaactttaagtaaaatgttaatggtagctttgataacatcaaattctaagggagaaaaaaacaatattaaaccgcccaagcagtgtgccctagcagaggaaaatgcaacatctcgcaagcgctgctgtaacgacttcaggagtcactgattcagcactaatttcctgctgtgaaaactcatctttcatttttgccgtggataggcgcttttattaattgttgtcctaatgaaatttctgacattgtcatatacaacgatgaatatcattaaaatttttaaaataataaagttcctatagtttatttttttaaaaaacttaaaaattgttacaatacataatgaaaaaataatccattaaacataaaaagagggggggcgccccccaagagagtttcccccgcggggggccgcccaaggctctttaagcgcgtcgttactcccggcgttttctctggctgttcacagagggggtggcctcccccatattagggtgagcgcgctcgcattaatatatatagggcgctagcgagcaccgcgtggccgcgcctcgctttccacccacacgcgttccgttggtacgctgggcgacaaacaacctgcgtgccgtaccgcggcgggggcacctcttttggggcgacagcgggaacccccctttaatcttctcggggggggggggngcacccatctacttggagacacgaacaccttacccttcgg

SEQ ID NO: 434453 - DNA, 2009 bp, Homo sapiens
  misc_feature (1969)..(1969): n is a, c, g, or t
ggtacctcgtggagaagacgggggaggggagcagcgagatttccttgcggagcaatattcctagggtacagacctcgtagcccgggcccgcgactccgccccgggagcgggcaggggcggggcgagcgctccagctggcgggaaggaggaagggccgggcgcggcgcagaggcgggcgcctaccagccggcagctccggagctgcccgcgccatgtccgcgcacaatcggggcaccgagctcgaccttagctggatctccaaaatacaagtgaatcacccggcagttctgaggcgtgcggaacaaatccaggctcgcagaaccgtgaaaaaggagtggcaggctgcttggctcctgaaagctgttacctttatagatcttactacactttcaggtgatgatacatcttccaacattcaaaggctctgttataaagccaaatacccaatccgggaagatctcttaaaagctttaaatatgcatgataaaggcattactacagccgccgtttgtgtttatcccgcccgggtgtgtgatgctgtaaaagcactcaaggctgcaggctgtaatatccctgtggcatcagtggccgctggatttccagctggacagactcatttgaagacacgattagaagagatcagattggctgtggaagatggagctacagaaatcgacgtggtaattaacagaagcttggtgctgacaggccagtgggaaggatcagattttattaagacctctactggaaaagaaacagtaaatgccaccttcccggtagctatagtaatgctgcgggccattagagatttcttctggaaaactggaaacaagatagggtttaaaccagcaggaggcatccgcagtgcaaaggattcccttgcttggctctctcttgtaaaggaggagcttggagatgagtggctgaagccagaactctttcgaataggtgccagtactctgctctcggacattgagaggcagatttaccatcatgtgactggaagatatgcagcttatcatgatcttccaatgtcttaaatcagtcaccagttccagaaaagttctttacgacaatgtttaaaaattatttttctacgtaattgctaaaattatttaattaaaaaattgggcagtaggtaactggcattcctctctttaaaatttctaccgaacttaatggaatggaaaaagcaaactcatccacatgtggtactcatttcaggcacatctgaaatgatcttaattactagaagatctgcactattaactttgtgaagagtttctcctaaaaactttaagtaaaatgttaatggtagctttgataacatcaaattctaagggagaaaaaaacaatattaaaccgcccaagcagtgtgccctagcagaggaaaatgcaacatctcgcaagcgctgctgtaacgacttcaggagtcactgattcagcactaatttcctgctgtgaaaactcatctttcatttttgccgtggataggcgcttttattaattgttgtcctaatgaaatttctgacattgtcatatacaacgatgaatatcattaaaatttttaaaataataaagttcctatagtttatttttttaaaaaacttaaaaattgttacaatacataatgaaaaaataatccattaaacataaaaagagggggggcgccccccaagagagtttcccccgcggggggccgcccaaggctctttaagcgcgtcgttactcccggcgttttctctggctgttcacagagggggtggcctcccccatattagggtgagcgcgctcgcattaatatatatagggcgctagcgagcaccgcgtggccgcgcctcgctttccacccacacgcgttccgttggtacgctgggcgacaaacaacctgcgtgccgtaccgcggcgggggcacctcttttggggcgacagcgggaacccccctttaatcttctcggggggggggggngcacccatctacttggagacacgaacaccttacccttcgg

SEQ ID NO: 434454 - DNA, 1405 bp, Homo sapiens
ggtacctcgtggagaagacgggggaggggagcagcgagatttccttgcggagcaatattcctagggtacagacctcgtagcccgggcccgcgactccgccccgggagcgggcaggggcggggcgagcgctccagctggcgggaaggaggaagggccgggcgcggcgcagaggcgggcgcctaccagccggcagctccggagctgcccgcgccatgtccgcgcacaatcggggcaccgagctcgaccttagctggatctccaaaatacaagtgaatcacccggcagttctgaggcgtgcggaacaaatccaggctcgcagaaccgtgaaaaaggagtggcaggctgcttggctcctgaaagctgttacctttatagatcttactacactttcaggtgatgatacatcttccaacattcaaaggctctgttataaagccaaatacccaatccgggaagatctcttaaaagctttaaatatgcatgataaaggcattactacagccgccgtttgtgtttatcccgcccgggtgtgtgatgctgtaaaagcactcaaggctgcaggctgtaatatccctgtggcatcagtggccgctggatttccagctggacagactcatttgaagacacgattagaagagatcagattggctgtggaagatggagctacagaaatcgacgtggtaattaacagaagcttggtgctgacaggccagtgggaagccctgtatgatgagattcgtcagtttcgcaaggcctgtggggaggctcatcttaaaactatattagcgacaggagaacttggaactcttactaatgtctataaagccagtatgatagcaatgatggcaggatcagattttattaagacctctactggaaaagaaacagtaaatgccaccttcccggtagctatagtaatgctgcgggccattagagatttcttctggaaaactggaaacaagatagggtttaaaccagcaggaggcatccgcagtgcaaaggattcccttgcttggctctctcttgtaaaggaggagcttggagatgagtggctgaagccagaactctttcgaataggtgccagtactctgctctcggacattgagaggcaggtgagtaatcatctctgtctttggaataaattaacaagtgttttttgagaaaggaattgaaaagtcaaattgagaactggagataaaaactcatctgattgacctcatcctacccaatcctctaccttttcttccaagcaaaccgccatcagaagtgagtagggtggagattctgctgaagcacatactagtgaggctttctaatgaaatgttcattaaaactatttattattatttgatagtataattattaactgatgtgtataattatagaatgattgttaattaaactc

SEQ ID NO: 434455 - DNA, 1993 bp, Homo sapiens
  misc_feature (1953)..(1953): n is a, c, g, or t
ctgaattaatacttgtaaagcatctagattcataatgcatggcactcaatgaatcttaactactgtgatcatttctttgtctccttgtgttattttgttaaactacattaataggtttaagatacatttgaaggaaggaagttgtttaagatatttgcaaggtatgaaatagcgtggtctctttcatggaaatgctaatctggttggaagacagttctttcattaatgaacaatgcaatagaaatcagctaatggtgattcttcttgagctgtcacaactgtatactgtgtacttttcattaagcatgagcaaattaggagaaaatgagtaggcactcctgttttgtagtaaaatgttacgatgtataatattaagcatagggcataaaattgtttttattcatctcagttatgtattaaatgaaccaacttgattttaattggcattgtggaaatatggaggcaagagtatcagaggtcagtgagaatatatttggtgcctaatacagtgatggtaagggggaaaaagtatggacataatcattttaacagggagatttcggttttagtttttccaataattaatgaaaaataacattgggtttcttcgggaaacaaatttacacaactcatttctcccactgactcaaaagtgtaaaaaaagaatctttaattaacatggagtttttcctctttgtgtttaggatcagattttattaagacctctactggaaaagaaacagtaaatgccaccttcccggtagctatagtaatgctgcgggccattagagatttcttctggaaaactggaaacaagatagggtttaaaccagcaggaggcatccgcagtgcaaaggattcccttgcttggctctctcttgtaaaggaggagcttggagatgagtggctgaagccagaactctttcgaataggtgccagtactctgctctcggacattgagaggcagatttaccatcatgtgactggaagatatgcagcttatcatgatcttccaatgtcttaaatcagtcaccagttccagaaaagttctttacgacaatgtttaaaaattatttttctacgtaattgctaaaattatttaattaaaaaattgggcagtaggtaactggcattcctctctttaaaatttctaccgaacttaatggaatggaaaaagcaaactcatccacatgtggtactcatttcaggcacatctgaaatgatcttaattactagaagatctgcactattaactttgtgaagagtttctcctaaaaactttaagtaaaatgttaatggtagctttgataacatcaaattctaagggagaaaaaaacaatattaaaccgcccaagcagtgtgccctagcagaggaaaatgcaacatctcgcaagcgctgctgtaacgacttcaggagtcactgattcagcactaatttcctgctgtgaaaactcatctttcatttttgccgtggataggcgcttttattaattgttgtcctaatgaaatttctgacattgtcatatacaacgatgaatatcattaaaatttttaaaataataaagttcctatagtttatttttttaaaaaacttaaaaattgttacaatacataatgaaaaaataatccattaaacataaaaagagggggggcgccccccaagagagtttcccccgcggggggccgcccaaggctctttaagcgcgtcgttactcccggcgttttctctggctgttcacagagggggtggcctcccccatattagggtgagcgcgctcgcattaatatatatagggcgctagcgagcaccgcgtggccgcgcctcgctttccacccacacgcgttccgttggtacgctgggcgacaaacaacctgcgtgccgtaccgcggcgggggcacctcttttggggcgacagcgggaacccccctttaatcttctcggggggggggggngcacccatctacttggagacacgaacaccttacccttcgg

SEQ ID NO: 434456 - DNA, 1454 bp, Homo sapiens
  misc_feature (1414)..(1414): n is a, c, g, or t
caaccacttttctacttttatcaccatgcttagctttgccagtattagaacattatctaatcacatagtgtgaactcttgggtgctttgtttttggtttgttttgccctcactaaaaataagagataagagatcttaaggagtttgcctagaagtatttcactgtgatcagattttattaagacctctactggaaaagaaacagtaaatgccaccttcccggtagctatagtaatgctgcgggccattagagatttcttctggaaaactggaaacaagatagggtttaaaccagcaggaggcatccgcagtgcaaaggattcccttgcttggctctctcttgtaaaggaggagcttggagatgagtggctgaagccagaactctttcgaataggtgccagtactctgctctcggacattgagaggcagatttaccatcatgtgactggaagatatgcagcttatcatgatcttccaatgtcttaaatcagtcaccagttccagaaaagttctttacgacaatgtttaaaaattatttttctacgtaattgctaaaattatttaattaaaaaattgggcagtaggtaactggcattcctctctttaaaatttctaccgaacttaatggaatggaaaaagcaaactcatccacatgtggtactcatttcaggcacatctgaaatgatcttaattactagaagatctgcactattaactttgtgaagagtttctcctaaaaactttaagtaaaatgttaatggtagctttgataacatcaaattctaagggagaaaaaaacaatattaaaccgcccaagcagtgtgccctagcagaggaaaatgcaacatctcgcaagcgctgctgtaacgacttcaggagtcactgattcagcactaatttcctgctgtgaaaactcatctttcatttttgccgtggataggcgcttttattaattgttgtcctaatgaaatttctgacattgtcatatacaacgatgaatatcattaaaatttttaaaataataaagttcctatagtttatttttttaaaaaacttaaaaattgttacaatacataatgaaaaaataatccattaaacataaaaagagggggggcgccccccaagagagtttcccccgcggggggccgcccaaggctctttaagcgcgtcgttactcccggcgttttctctggctgttcacagagggggtggcctcccccatattagggtgagcgcgctcgcattaatatatatagggcgctagcgagcaccgcgtggccgcgcctcgctttccacccacacgcgttccgttggtacgctgggcgacaaacaacctgcgtgccgtaccgcggcgggggcacctcttttggggcgacagcgggaacccccctttaatcttctcggggggggggggngcacccatctacttggagacacgaacaccttacccttcgg

SEQ ID NO: 434457 - DNA, 875 bp, Homo sapiens
ggtacctcgtggagaagacgggggaggggagcagcgagatttccttgcggagcaatattcctagggtacagacctcgtagcccgggcccgcgactccgccccgggagcgggcaggggcggggcgagcgctccagctggcgggaaggaggaagggccgggcgcggcgcagaggcgggcgcctaccagccggcagctccggagctgcccgcgccatgtccgcgcacaatcggggcaccgagctcgaccttagctggatctccaaaatacaagtgaatcacccggcagttctgaggcgtgcggaacaaatccaggctcgcagaaccgtgaaaaaggagtggcaggctgcttggctcctgaaagctgttacctttatagatcttactacactttcaggtgatgatacatcttccaacattcaaaggctctgttataaagccaaatacccaatccgggaagatctcttaaaagctttaaatatgcatgataaaggcattactacagccgccgtttgtgtttatcccgcccgggtgtgtgatgctgtaaaagcactcaaggctgcaggctgtaatatccctgtggcatcagtggccgctggatttccagctggacagactcatttgaagacacgattagaagagatcagattggctgtggaagatggagctacagaaatcgacgtggtaattaacagaagcttggtgctgacaggccagtgggaagccctgtatgatgagattcgtcagtttcgcaaggcctgtggggaggctcatcttaaaactatattagcgacaggagaacttggaactcttactaatgtctataaagccagtatgatagcaatgatggcaggtaagtgttttatgttcaaataatgt

SEQ ID NO: 434458 - DNA, 1119 bp, Homo sapiens
tgggagcaagagcgaggtggcagtacagcaggctggcttgctgtacgctttataattccagcgaggaaatctttcgaatacacacttgcattctgtcacagtaatgtggagaacacatctagggttttcagcttgttttattcagctgcctggagtagttaaaatttttctgagcatattgcttcccccaaccccatgaggcgggaaagagatgtttagagacatatttctcttttaggaagaaatgcagaaccactgagacctggacaactgttggtcttattttctgcttggatgagataccttcctgctatttcttaaggaaatatagttatccatcctcacagtcacagctgaataccaggcagttggttgagtagtgagttcttctggaagatggacgggaaaactgtcaacaggattgatcattaaaaaaaaatccagtgaaatgtttatttaaaaaattaattgaactcccttgcttttagagacttgactattgtccagatcagatcttgtttcgagtgtgcacattcatatataacagggctgtgaatcagactgggaaagcctgtgctgcagacattcttccctccccatgacagcaaacacaggacagggggttcttagcacgttgtcagataaattcttttctatctgcgtgttttaattatggaattttaatgttgattttcattctgttttccaatcccatatattttttccttctcattggcttattgtgtgggttatcatttcagtgacctggtttgacaagaggcaacacaaatttctttgagaattcaaatgtccatttaaaaattagcatcaggggctgggcacagtggctcacacctgtaatcctggcactttgggaggctgaggcagcgggtggattgcttgagttcaggagttcgagaccagcctgggcaacatggcaaaaccccgtcactataaataatataaaaattagctgggcatggtggcacacacctctagtcccagctgcttaggaggctgaggccagagggatcagttgaacctgggatgctgaggctgcagtgagccacgatcacgccactgcgctctggcctgggtgacaaaggaagtccctgtctc

SEQ ID NO: 434459 - DNA, 1226 bp, Homo sapiens
gggcatctgcgcaggcgcccggctcctaagtctacccaggaactgaccctgctctctcctttccctgttagacatgggcactccacagaaggatgttattatcaagtcagatgcaccggacactttgttattggagaaacatgcagattatatcgcatcctatggctcaaagaaagatgattatgaatactgtatgtctgagtatttgagaatgagtggcatctattggggtctgacagtaatggatctcatgggacaacttcatcgcatgaatagagaagagattctggcatttattaagtcttgccaacatgaatgtggtggaataagtgctagtatcggacatgatcctcatcttttatacactcttagtgctgtccagattcttacgctgtatgacagtattaatgttattgacgtaaataaagttgtggaatatgttaaaggtctacagaaagaagatggttcttttgctggagatatttggggagaaattgacacaagattctctttttgtgcggtggcaactttggctttgttggggaagcttgatgctattaatgtggaaaaggcaatcgaatttgttttatcctgtatgaactttgacggtggatttggttgcagaccaggttctgaatcccatgctgggcagatctattgttgcacaggatttctggctattacaagtcagttgcatcaagtaaattctgatttacttggctggtggctttgtgaacgacaattaccctcaggcgggctcaatggaaggccggagaagttaccagatgtatgctactcatggtgggtcctggcttccctaaagataattggaagacttcattggattgatagagagaaactgcgtaatttcattttagcatgtcaagatgaagaaacggggggatttgcagacaggccaggagatatggtggatccttttcataccttatttggaattgctggattgtcacttttgggagaagaacagattaaacctgttaatcctgtcttttgcatgcctgaagaagtgcttcagagagtgaatgttcagcctgagctagtgagctagattcattgaattgaaagttgcatagtatagttttgccattttaacatttctgtatttgaagtgcttatcgaatctaaaagtgactactgttaatattttgtatattgtgttaaattaattttaataaattatataattatacatattgtaaaataaa

SEQ ID NO: 434460 - DNA, 1116 bp, Homo sapiens
ccactgtgctcggcctgtatttttatttttaaaccttagtatttctgaataacaacgggtagagaaacacccgcagtagctgtctacaatagagtgaaataaaaagcctgaggaactgtcaacagaaaaatgggtggccgtggggagcaccgggacctgcacttgcacacaatctagggcagcttctaatgagtctatgagttactcagggatctcattaaaatgagatcagccttgagtggggttttctttatagacttctgtcaccatattttgaagagcaagggtttagttgattttaaggcaggtgtgtacccccctgggacagtgcttgtagaaaaacagaactattacccatgggattttcatggattatactgcttagctttcttgggttaaggggctgagttaggcattcattgcagatagaaacaaagcagatgcatgcttatcagtgagtactgagatatttagcatggttacctatgaattgaagtttggtctcttcttacccattaattgattatctttcattctaagcaagtatttcataccctgcatatcagtatatccctggatttcgtccttccacatggtttgacactttgaacatcagattacgggaaataaaagagaatgaaattgtggcaacttttttccctcctagtttaccagatgtatgctactcatggtgggtcctggcttccctaaagataattggaagacttcattggattgatagagagaaactgcgtaatttcattttagcatgtcaagatgaagaaacggggggatttgcagacaggccaggagatatggtggatccttttcataccttatttggaattgctggattgtcacttttgggagaagaacagattaaacctgttaatcctgtcttttgcatgcctgaagaagtgcttcagagagtgaatgttcagcctgagctagtgagctagattcattgaattgaaagttgcatagtatagttttgccattttaacatttctgtatttgaagtgcttatcgaatctaaaagtgactactgttaatattttgtatattgtgttaaattaattttaataaattatataattatacatattgtaaaataaa

SEQ ID NO: 434461 - DNA, 471 bp, Homo sapiens
cagtttttttttctatttattgtagagtgtatgaaggatatagaacaatcttacagaaatttcttgtcgcttgttgctaacaaaattagtatatggtaaaggtcaggtattcataatttgaagttaaagaagttttcattttgtgatctgtatataaattcttttttaaataggtggatccttttcataccttatttggaattgctggattgtcacttttgggagaagaacagattaaacctgttaatcctgtcttttgcatgcctgaagaagtgcttcagagagtgaatgttcagcctgagctagtgagctagattcattgaattgaaagttgcatagtatagttttgccattttaacatttctgtatttgaagtgcttatcgaatctaaaagtgactactgttaatattttgtatattgtgttaaattaattttaataaattatataattatacatattgtaaaataaa

SEQ ID NO: 434462 - DNA, 896 bp, Homo sapiens
ccactgtgctcggcctgtatttttatttttaaaccttagtatttctgaataacaacgggtagagaaacacccgcagtagctgtctacaatagagtgaaataaaaagcctgaggaactgtcaacagaaaaatgggtggccgtggggagcaccgggacctgcacttgcacacaatctagggcagcttctaatgagtctatgagttactcagggatctcattaaaatgagatcagccttgagtggggttttctttatagacttctgtcaccatattttgaagagcaagggtttagttgattttaaggcaggtgtgtacccccctgggacagtgcttgtagaaaaacagaactattacccatgggattttcatggattatactgcttagctttcttgggttaaggggctgagttaggcattcattgcagatagaaacaaagcagatgcatgcttatcagtgagtactgagatatttagcatggttacctatgaattgaagtttggtctcttcttacccattaattgattatctttcattctaagcaagtatttcataccctgcatatcagtatatccctggatttcgtccttccacatggtttgacactttgaacatcagattacctaagagtgagacttaacccacttttaaattgttctcaaaattagggaaataaaagagaatgaaattgtggcaacttttttccctcctagtttaccagatgtatgctactcatggtgggtcctggcttccctaaagataattggaagacttcattggattgatagagagaaactgcgtaatttcattttagcatgtcaagatgaagaaacggggggatttgcagacaggccaggagatatggcaagtaatatttctgacatatttctataaatta

SEQ ID NO: 434463 - DNA, 424 bp, Homo sapiens
gacatttacctaatacttgtctttattgcagattcttacgctgtatgacagtattaatgttattgacgtaaataaagttgtggaatatgttaaaggtctacagaaagaagatggttcttttgctggagatatttggggtaatgtcagatttagtccattctacccaaaataccaatattaaaatgtactggttttgctagtaaccagtttataagtttttcatcttttcaggtcccactaagcagctggtctaactggagttaatggtctgctggaacttccagcatgcactgtggtagttatatcagcatatacaggagcactggaacagagggggccagtctaaaagataaggtaggtggaatttttttccccaatatttggtggctttgtaaagttttttaaaaactacttgctggaaagg

SEQ ID NO: 434464 - DNA, 450 bp, Homo sapiens
  misc_feature (120)..(120): n is a, c, g, or t
  misc_feature (206)..(206): n is a, c, g, or t
  misc_feature (218)..(218): n is a, c, g, or t
caaagtgtgtgtattgaaccatcagaaagcaaaagtgttactatcttagccacccatctggataatctgtggtttggcatcagtgttactcctgacgcccccccccctttttttttttgnttttttttttttttagaaaaattttcttttcccccctttggggaaaaaaagggggtttcccccccccttgggttttttaaaatttntcccttggaacntacagttctttgtgtatacttctgtgtctgttatgttcaataactgagctaacataaaataactctaggtttctacttgatttttcccccatgtatacctttcatctgttctatagcaagttgatgtaaattggtttgtcaacaagaatgttaactgatgaaagtggatagaacccatacatgaattaaatgatgcacaaaataaatggctgttgaaatttggaaaaaaaaa

SEQ ID NO: 434465 - DNA, 482 bp, Homo sapiens
gggcatctgcgcaggcgcccggctcctaagtctacccaggaactgaccctgctctctcctttccctgttagacatgggcactccacagaaggatgttattatcaagtcagatgcaccggacactttgttattggagaaacatgcagattatatcgcatcctatggctcaaagaaagatgattatgtatgtataatttttttatgttggaaagtttattttaaagaagtgtgacagtcataagcagtgagacagtatttatgtcttaaaatggcatccaactccatgcagagaactgaggatgtgctgtgcctttgaacttcagttaagtgtgctttggacgtctgaggctgtgggcttattagaatctcagtttttacctatactgagagggcttgccagacaaagtagatgagggtttgaggtacaaaacgggtttctctttttgtagttaggggtaatactttcaaggtcaatgatgtgt

SEQ ID NO: 434466 - DNA, 577 bp, Homo sapiens
gggagaaactaaagcactgtttgtattgtcagccatagattaactaatcctgtgcttctcagataattgtttttttctgataatagttgtgtctgaagatggcttctaacattgagcagcacagattttaaactcactactgatcagtgctgttaaggtcaggagaggtaaaaatagcagcatggctaatgagttacctttgtgtttaatctctttataacttgttaccagttcaaatgacagatttaagaaattgtgtattattttaggaatactgtatgtctgagtatttgagaatgagtggcatctattggggtctgacagtaatggatctcatgggacaacttcatcgcatgaatagagaagagattctggcatttattaagtcttgccaacatgaatgtggtggaataagtgctagtatcggacatgatcctcatcttttatacactcttagtgctgtccaggtaaatactaatcaaaattgcaacgatcttgatagtatgttctcttacttcagagttggaaattgaaactgtatcaggatttggtcaaaaagttttgttacaagtgaagc

SEQ ID NO: 434467 - DNA, 1508 bp, Homo sapiens
gggcatctgcgcaggcgcccggctcctaagtctacccaggaactgaccctgctctctcctttccctgttagacatgggcactccacagaaggatgttattatcaagtcagatgcaccggacactttgttattggagaaacatgcagattatatcgcatcctatggctcaaagaaagatgattatgaatactgtatgtctgagtatttgagaatgagtggcatctattggggtctgacagtaatggatctcatgggacaacttcatcgcatgaatagagaagagattctggcatttattaagtcttgccaacatgaatgtggtggaataagtgctagtatcggacatgatcctcatcttttatacactcttagtgctgtccagattcttacgctgtatgacagtattaatgttattgacgtaaataaagttgtggaatatgttaaaggtctacagaaagaagatggttcttttgctggagatatttggggagaaattgacacaagattctctttttgtgcggtggcaactttggctttgttggggaagcttgatgctattaatgtggaaaaggcaatcgaatttgttttatcctgtatgaactttgacggtggatttggttgcagaccaggttctgaatcccatgctgggcagatctattgttgcacaggatttctggctattacaagtcagttgcatcaagtaaattctgatttacttggctggtggctttgtgaacgacaattaccctcaggcgggctcaatggaaggccggagaagttaccagatgtatgctactcatggtgggtcctggcttccctaaagataattggaagacttcattggattgatagagagaaactgcgtaatttcattttagcatgtcaagatgaagaaacggggggatttgcagacaggccaggagatatggtggatccttttcataccttatttggaattgctggattgtcacttttgggagaagaacagattaaacctgttaatcctgtcttttgcatgcctgaagaagtgcttcagagagtgaatgttcagcctgagctagtgagctagattcattgaattgaaagttgcatagtatagttttgccattttaacatttctgtatttgaagtgcttatcgaatctaaaagtgactactgttaatattttgtatattgtgttaaattaattttaataaattatataattatacatattgtaaaataaagaccggtattttattttctgctttttattctgaagtcctgttattctgactacagttctttgtgtatacttctgtgtctgttatgttcaataactgagctaacataaaataactctaggtttctacttgatttttcccccatgtatacctttcatctgttctatagcaagttgatgtaaattggtttgtcaacaagaatgttaactgatgaaagtggatagaacccatacatgaattaaatgatgcacaaaataaatggctgttgaaatttggaaaaaaaaa

SEQ ID NO: 434468 - DNA, 1674 bp, Homo sapiens
gggcatctgcgcaggcgcccggctcctaagtctacccaggaactgaccctgctctctcctttccctgttagacatgtgactgcagtgtactctcaatgaggaagatatagatacgaaaagaactagagccgcatcacatggggacttctgcaaatacagagactcggattaaaggtggagaagatggagctaaaggaactgcttatttaatacatttgaacaacttttggggtacttagaagggcactccacagaaggatgttattatcaagtcagatgcaccggacactttgttattggagaaacatgcagattatatcgcatcctatggctcaaagaaagatgattatgaatactgtatgtctgagtatttgagaatgagtggcatctattggggtctgacagtaatggatctcatgggacaacttcatcgcatgaatagagaagagattctggcatttattaagtcttgccaacatgaatgtggtggaataagtgctagtatcggacatgatcctcatcttttatacactcttagtgctgtccagattcttacgctgtatgacagtattaatgttattgacgtaaataaagttgtggaatatgttaaaggtctacagaaagaagatggttcttttgctggagatatttggggagaaattgacacaagattctctttttgtgcggtggcaactttggctttgttggggaagcttgatgctattaatgtggaaaaggcaatcgaatttgttttatcctgtatgaactttgacggtggatttggttgcagaccaggttctgaatcccatgctgggcagatctattgttgcacaggatttctggctattacaagtcagttgcatcaagtaaattctgatttacttggctggtggctttgtgaacgacaattaccctcaggcgggctcaatggaaggccggagaagttaccagatgtatgctactcatggtgggtcctggcttccctaaagataattggaagacttcattggattgatagagagaaactgcgtaatttcattttagcatgtcaagatgaagaaacggggggatttgcagacaggccaggagatatggtggatccttttcataccttatttggaattgctggattgtcacttttgggagaagaacagattaaacctgttaatcctgtcttttgcatgcctgaagaagtgcttcagagagtgaatgttcagcctgagctagtgagctagattcattgaattgaaagttgcatagtatagttttgccattttaacatttctgtatttgaagtgcttatcgaatctaaaagtgactactgttaatattttgtatattgtgttaaattaattttaataaattatataattatacatattgtaaaataaagaccggtattttattttctgctttttattctgaagtcctgttattctgactacagttctttgtgtatacttctgtgtctgttatgttcaataactgagctaacataaaataactctaggtttctacttgatttttcccccatgtatacctttcatctgttctatagcaagttgatgtaaattggtttgtcaacaagaatgttaactgatgaaagtggatagaacccatacatgaattaaatgatgcacaaaataaatggctgttgaaatttggaaaaaaaaa

SEQ ID NO: 434469 - DNA, 1392 bp, Homo sapiens
gggcatctgcgcaggcgcccggctcctaagtctacccaggaactgaccctgctctctcctttccctgttagacatgtgactgcagtgtactctcaatgaggaagatatagatacgaaaagaactagagccgcatcacatggggacttctgcaaatacagagactcggattaaaggtggagaagatggagctaaaggaactgcttatttaatacatttgaacaacttttggggtacttagaagggcactccacagaaggatgttattatcaagtcagatgcaccggacactttgttattggagaaacatgcagattatatcgcatcctatggctcaaagaaagatgattatgaatactgtatgtctgagtatttgagaatgagtggcatctattggggtctgacagtaatggatctcatgggacaacttcatcgcatgaatagagaagagattctggcatttattaagtcttgccaacatgaatgtggtggaataagtgctagtatcggacatgatcctcatcttttatacactcttagtgctgtccagattcttacgctgtatgacagtattaatgttattgacgtaaataaagttgtggaatatgttaaaggtctacagaaagaagatggttcttttgctggagatatttggggagaaattgacacaagattctctttttgtgcggtggcaactttggctttgttggggaagcttgatgctattaatgtggaaaaggcaatcgaatttgttttatcctgtatgaactttgacggtggatttggttgcagaccaggttctgaatcccatgctgggcagatctattgttgcacaggatttctggctattacaagtcagttgcatcaagtaaattctgatttacttggctggtggctttgtgaacgacaattaccctcaggcgggctcaatggaaggccggagaagttaccagatgtatgctactcatggtgggtcctggcttccctaaagataattggaagacttcattggattgatagagagaaactgcgtaatttcattttagcatgtcaagatgaagaaacggggggatttgcagacaggccaggagatatggtggatccttttcataccttatttggaattgctggattgtcacttttgggagaagaacagattaaacctgttaatcctgtcttttgcatgcctgaagaagtgcttcagagagtgaatgttcagcctgagctagtgagctagattcattgaattgaaagttgcatagtatagttttgccattttaacatttctgtatttgaagtgcttatcgaatctaaaagtgactactgttaatattttgtatattgtgttaaattaattttaataaattatataattatacatattgtaaaataaa

SEQ ID NO: 434470 - DNA, 1606 bp, Homo sapiens
gggcatctgcgcaggcgcccggctcctaagtctacccaggaactgaccctgctctctcctttccctgttagacatgtgactgcagtgtactctcaatgaggaagatatagatacgaaaagaactagagccgcatcacatggggacttctgcaaatacagagactcggattaaagggcactccacagaaggatgttattatcaagtcagatgcaccggacactttgttattggagaaacatgcagattatatcgcatcctatggctcaaagaaagatgattatgaatactgtatgtctgagtatttgagaatgagtggcatctattggggtctgacagtaatggatctcatgggacaacttcatcgcatgaatagagaagagattctggcatttattaagtcttgccaacatgaatgtggtggaataagtgctagtatcggacatgatcctcatcttttatacactcttagtgctgtccagattcttacgctgtatgacagtattaatgttattgacgtaaataaagttgtggaatatgttaaaggtctacagaaagaagatggttcttttgctggagatatttggggagaaattgacacaagattctctttttgtgcggtggcaactttggctttgttggggaagcttgatgctattaatgtggaaaaggcaatcgaatttgttttatcctgtatgaactttgacggtggatttggttgcagaccaggttctgaatcccatgctgggcagatctattgttgcacaggatttctggctattacaagtcagttgcatcaagtaaattctgatttacttggctggtggctttgtgaacgacaattaccctcaggcgggctcaatggaaggccggagaagttaccagatgtatgctactcatggtgggtcctggcttccctaaagataattggaagacttcattggattgatagagagaaactgcgtaatttcattttagcatgtcaagatgaagaaacggggggatttgcagacaggccaggagatatggtggatccttttcataccttatttggaattgctggattgtcacttttgggagaagaacagattaaacctgttaatcctgtcttttgcatgcctgaagaagtgcttcagagagtgaatgttcagcctgagctagtgagctagattcattgaattgaaagttgcatagtatagttttgccattttaacatttctgtatttgaagtgcttatcgaatctaaaagtgactactgttaatattttgtatattgtgttaaattaattttaataaattatataattatacatattgtaaaataaagaccggtattttattttctgctttttattctgaagtcctgttattctgactacagttctttgtgtatacttctgtgtctgttatgttcaataactgagctaacataaaataactctaggtttctacttgatttttcccccatgtatacctttcatctgttctatagcaagttgatgtaaattggtttgtcaacaagaatgttaactgatgaaagtggatagaacccatacatgaattaaatgatgcacaaaataaatggctgttgaaatttggaaaaaaaaa

SEQ ID NO: 434471 - DNA, 2305 bp, Homo sapiens
gggcatctgcgcaggcgcccggctcctaagtctacccaggaactgaccctgctctctcctttccctgttagacatgtgactgcagtgtactctcaatgaggaagatatagatacgaaaagaactagagccgcatcacatggggacttctgcaaatacagagactcggattaaaggtggagaagatggagctaaaggaactgcttatttaatacatttgaacaacttttggggtacttagaaggtgctttgaaacctgcatttgattaagcaagaattcgcttgcaagttaagggttagatttttttattttttaaaaatatgctttctgccacatgtaaaccgtaagttgtcctgaaatgataagctttgatattctatggtgtttattttttacttatctttttgaatgaaaagtgaacaacaagaaatgctggtggtaattttttgggtcaatgatgagttggcatgtattctgaatctaaagttgattattactactttagctctagaattactctgagacctgaaaattacctgaatcgtgactaagacgaagcctgaatgatttaagttcttttttgttggatacaatttgttgttgttgttgttgttttggttttgtttttgagtcggtctccggtcgcccaggatggagtgcagtgacacaacctcagttcactgcagccttaatttccctggctcaagcgatcttctacctcagcctccctagttagttacaatttttaaatggaacgttttcctattacaagatgaaatcaagtgaaaattgagatgtatgttgaatctatgctgtggggcagaagaacgttgtagaggtaaacattgatgagattaccactttattttgaaagggcactccacagaaggatgttattatcaagtcagatgcaccggacactttgttattggagaaacatgcagattatatcgcatcctatggctcaaagaaagatgattatgaatactgtatgtctgagtatttgagaatgagtggcatctattggggtctgacagtaatggatctcatgggacaacttcatcgcatgaatagagaagagattctggcatttattaagtcttgccaacatgaatgtggtggaataagtgctagtatcggacatgatcctcatcttttatacactcttagtgctgtccagattcttacgctgtatgacagtattaatgttattgacgtaaataaagttgtggaatatgttaaaggtctacagaaagaagatggttcttttgctggagatatttggggagaaattgacacaagattctctttttgtgcggtggcaactttggctttgttggggaagcttgatgctattaatgtggaaaaggcaatcgaatttgttttatcctgtatgaactttgacggtggatttggttgcagaccaggttctgaatcccatgctgggcagatctattgttgcacaggatttctggctattacaagtcagttgcatcaagtaaattctgatttacttggctggtggctttgtgaacgacaattaccctcaggcgggctcaatggaaggccggagaagttaccagatgtatgctactcatggtgggtcctggcttccctaaagataattggaagacttcattggattgatagagagaaactgcgtaatttcattttagcatgtcaagatgaagaaacggggggatttgcagacaggccaggagatatggtggatccttttcataccttatttggaattgctggattgtcacttttgggagaagaacagattaaacctgttaatcctgtcttttgcatgcctgaagaagtgcttcagagagtgaatgttcagcctgagctagtgagctagattcattgaattgaaagttgcatagtatagttttgccattttaacatttctgtatttgaagtgcttatcgaatctaaaagtgactactgttaatattttgtatattgtgttaaattaattttaataaattatataattatacatattgtaaaataaagaccggtattttattttctgctttttattctgaagtcctgttattctgactacagttctttgtgtatacttctgtgtctgttatgttcaataactgagctaacataaaataactctaggtttctacttgatttttcccccatgtatacctttcatctgttctatagcaagttgatgtaaattggtttgtcaacaagaatgttaactgatgaaagtggatagaacccatacatgaattaaatgatgcacaaaataaatggctgttgaaatttggaaaaaaaaa

SEQ ID NO: 434472 - DNA, 1375 bp, Homo sapiens
gggcatctgcgcaggcgcccggctcctaagtctacccaggaactgaccctgctctctcctttccctgttagacatgggcactccacagaaggatgttattatcaagtcagatgcaccggacactttgttattggagaaacatgcagattatatcgcatcctatggctcaaagaaagatgattatgaatactgtatgtctgagtatttgagaatgagtggcatctattggggtctgacagtaatggatctcatgggacaacttcatcgcatgaatagagaagagattctggcatttattaagtcttgccaacatgaatgtggtggaataagtgctagtatcggacatgatcctcatcttttatacactcttagtgctgtccagattcttacgctgtatgacagtattaatgttattgacgtaaataaagttgtggaatatgttaaaggtctacagaaagaagatggttcttttgctggagatatttggggagaaattgacacaagattctctttttgtgcggtggcaactttggctttgttggggaagcttgatgctattaatgtggaaaaggcaatcgaatttgttttatcctgtatgaactttgacggtggatttggttgcagaccaggttctgaatcccatgctgggcagatctattgttgcacaggatttctggctattacaagtcagttgcatcaagtaaattctgatttacttggctggtggctttgtgaacgacaattaccctcaggcgggctcaatggaaggccggagaagttaccagatgtatgctactcatggtgggtcctggcttccctaaagataattggaagacttcattggattgatagagagaaactgcgtaatttcattttagcatgtcaagatgaagaaacggggggatttgcagacaggccaggagatatggtggatccttttcataccttatttggaattgctggattgtcacttttgggagaagaacagattaaacctgttaatcctgtcttttgcatgcctgaagaagtgcttcagagagtgaatgttcagcctgagctagtgagctagattcattgaattgaaagttgcatagtatagttttgccattttaacatttctgtatttgaagtgcttatcgaatctaaaagtgactactgttaatattttgtatattgtgttaaattaattttaataaattatataattatacatattgtaaaataaatgaaacagaaaacaaacattaaataaactacgcgcaccaggggggggcccgggtacccaaattgcccttaaaggggtcgctttacaattcacttggccaaatgtttacaacttttcggactggggggggccctgggtgcccacatgcgt

SEQ ID NO: 434473 - DNA, 1404 bp, Homo sapiens
  misc_feature (1375)..(1375): n is a, c, g, or t
gggcatctgcgcaggcgcccggctcctaagtctacccaggaactgaccctgctctctcctttccctgttagacatgtgactgcagtgtactctcaatgaggaagatatagatacgaaaagaactagagccgcatcacatggggacttctgcaaatacagagactcggattaaagggcactccacagaaggatgttattatcaagtcagatgcaccggacactttgttattggagaaacatgcagattatatcgcatcctatggctcaaagaaagatgattatgaatactgtatgtctgagtatttgagaatgagtggcatctattggggtctgacagtaatggatctcatgggacaacttcatcgcatgaatagagaagagattctggcatttattaagtcttgccaacatgaatgtggtggaataagtgctagtatcggacatgatcctcatcttttatacactcttagtgctgtccagattcttacgctgtatgacagtattaatgttattgacgtaaataaagttgtggaatatgttaaaggtctacagaaagaagatggttcttttgctggagatatttggggagaaattgacacaagattctctttttgtgcggtggcaactttggctttgttggggaagcttgatgctattaatgtggaaaaggcaatcgaatttgttttatcctgtatgaactttgacggtggatttggttgcagaccaggttctgaatcccatgctgggcagatctattgttgcacaggatttctggctattacaagtcagttgcatcaagtaaattctgatttacttggctggtggctttgtgaacgacaattaccctcaggcgggctcaatggaaggccggagaagttaccagatgtatgctactcatggtgggtcctggcttccctaaagataattggaagacttcattggattgatagagagaaactgcgtaatttcattttagcatgtcaagatgaagaaacggggggatttgcagacaggccaggagatatggtggatccttttcataccttatttggaattgctggattgtcacttttgggagaagaacagattaaacctgttaatcctgtcttttgcatgcctgaagaagtgcttcagagagtgaatgttcagcctgagctagtgagctagattcattgaattgaaagttgcatagtatagttttgccattttaacatttctgtatttgaagtgcttatcgaatctaaaagtgactactgttaatattttgtatattgtgttaaattaattttaataaattatataattatacatattgtaaaataaactttacaacaacagccacccaagccgattcctaagcagcaaggacctggtngggatccgctccagcaggatggcactccc

SEQ ID NO: 434474 - DNA, 2500 bp, Homo sapiens
gggcatctgcgcaggcgcccggctcctaagtctacccaggaactgaccctgctctctcctttccctgttagacatgtgactgcagtgtactctcaatgaggaagatatagatacgaaaagaactagagccgcatcacatggggacttctgcaaatacagagactcggattaaaggtggagaagatggagctaaaggaactgcttatttaatacatttgaacaacttttggggtacttagaaggtgctttgaaacctgcatttgattaagcaagaattcgcttgcaagttaagggttagatttttttattttttaaaaatatgctttctgccacatgtaaaccgtaagttgtcctgaaatgataagctttgatattctatggtgtttattttttacttatctttttgaatgaaaagtgaacaacaagaaatgctggtggtaattttttgggtcaatgatgagttggcatgtattctgaatctaaagttgattattactactttagctctagaattactctgagacctgaaaattacctgaatcgtgactaagacgaagcctgaatgatttaagttcttttttgttggatacaatttgttgttgttgttgttgttttggttttgtttttgagtcggtctccggtcgcccaggatggagtgcagtgacacaacctcagttcactgcagccttaatttccctggctcaagcgatcttctacctcagcctccctagttagttacaatttttaaatggaacgttttcctattacaagatgaaatcaagtgaaaattgagatgtatgttgaatctatgctgtggggcagaagaacgttgtagaggtaaacattgatgagattaccactttattttgaaagggcactccacagaaggatgttattatcaagtcagatgcaccggacactttgttattggagaaacatgcagattatatcgcatcctatggctcaaagaaagatgattatgaatactgtatgtctgagtatttgagaatgagtggcatctattggggtctgacagtaatggatctcatgggacaacttcatcgcatgaatagagaagagattctggcatttattaagtcttgccaacatgaatgtggtggaataagtgctagtatcggacatgatcctcatcttttatacactcttagtgctgtccagattcttacgctgtatgacagtattaatgttattgacgtaaataaagttgtggaatatgttaaaggtctacagaaagaagatggttcttttgctggagatatttggggtcccactaagcagctggtctaactggagttaatggtctgctggaacttccagcatgcactgtggtagttatatcagcatatacaggagcactggaacagagggggccagtctaaaagataagggatgaacacagtgcaggccagagagaccagctgcttcatgggatgtgaaaaatctacttttataaagtagggagaaattgacacaagattctctttttgtgcggtggcaactttggctttgttggggaagcttgatgctattaatgtggaaaaggcaatcgaatttgttttatcctgtatgaactttgacggtggatttggttgcagaccaggttctgaatcccatgctgggcagatctattgttgcacaggatttctggctattacaagtcagttgcatcaagtaaattctgatttacttggctggtggctttgtgaacgacaattaccctcaggcgggctcaatggaaggccggagaagttaccagatgtatgctactcatggtgggtcctggcttccctaaagataattggaagacttcattggattgatagagagaaactgcgtaatttcattttagcatgtcaagatgaagaaacggggggatttgcagacaggccaggagatatggtggatccttttcataccttatttggaattgctggattgtcacttttgggagaagaacagattaaacctgttaatcctgtcttttgcatgcctgaagaagtgcttcagagagtgaatgttcagcctgagctagtgagctagattcattgaattgaaagttgcatagtatagttttgccattttaacatttctgtatttgaagtgcttatcgaatctaaaagtgactactgttaatattttgtatattgtgttaaattaattttaataaattatataattatacatattgtaaaataaagaccggtattttattttctgctttttattctgaagtcctgttattctgactacagttctttgtgtatacttctgtgtctgttatgttcaataactgagctaacataaaataactctaggtttctacttgatttttcccccatgtatacctttcatctgttctatagcaagttgatgtaaattggtttgtcaacaagaatgttaactgatgaaagtggatagaacccatacatgaattaaatgatgcacaaaataaatggctgttgaaatttggaaaaaaaaa

SEQ ID NO: 434475 - DNA, 1310 bp, Homo sapiens
gggcatctgcgcaggcgcccggctcctaagtctacccaggaactgaccctgctctctcctttccctgttagacatgggcactccacagaaggatgttattatcaagtcagatgcaccggacactttgttattggagaaacatgcagattatatcgcatcctatggctcaaagaaagatgattatattcttacgctgtatgacagtattaatgttattgacgtaaataaagttgtggaatatgttaaaggtctacagaaagaagatggttcttttgctggagatatttggggagaaattgacacaagattctctttttgtgcggtggcaactttggctttgttggggaagcttgatgctattaatgtggaaaaggcaatcgaatttgttttatcctgtatgaactttgacggtggatttggttgcagaccaggttctgaatcccatgctgggcagatctattgttgcacaggatttctggctattacaagtcagttgcatcaagtaaattctgatttacttggctggtggctttgtgaacgacaattaccctcaggcgggctcaatggaaggccggagaagttaccagatgtatgctactcatggtgggtcctggcttccctaaagataattggaagacttcattggattgatagagagaaactgcgtaatttcattttagcatgtcaagatgaagaaacggggggatttgcagacaggccaggagatatggtggatccttttcataccttatttggaattgctggattgtcacttttgggagaagaacagattaaacctgttaatcctgtcttttgcatgcctgaagaagtgcttcagagagtgaatgttcagcctgagctagtgagctagattcattgaattgaaagttgcatagtatagttttgccattttaacatttctgtatttgaagtgcttatcgaatctaaaagtgactactgttaatattttgtatattgtgttaaattaattttaataaattatataattatacatattgtaaaataaagaccggtattttattttctgctttttattctgaagtcctgttattctgactacagttctttgtgtatacttctgtgtctgttatgttcaataactgagctaacataaaataactctaggtttctacttgatttttcccccatgtatacctttcatctgttctatagcaagttgatgtaaattggtttgtcaacaagaatgttaactgatgaaagtggatagaacccatacatgaattaaatgatgcacaaaataaatggctgttgaaatttggaaaaaaaaa

SEQ ID NO: 434476 - DNA, 1181 bp, Homo sapiens
gggcatctgcgcaggcgcccggctcctaagtctacccaggaactgaccctgctctctcctttccctgttagacatgggcactccacagaaggatgttattatcaagtcagatgcaccggacactttgttattggagaaacatgcagattatatcgcatcctatggctcaaagaaagatgattatgaatactgtatgtctgagtatttgagaatgagtggcatctattggggtctgacagtaatggatctcatgggacaacttcatcgcatgaatagagaagagattctggcatttattaagtcttgccaacatgaatgtggtggaataagtgctagtatcggacatgatcctcatcttttatacactcttagtgctgtccagattcttacgctgtatgacagtattaatgttattgacgtaaataaagttgtggaatatgttaaaggtctacagaaagaagatggttcttttgctggagatatttggggagaaattgacacaagattctctttttgtgcggtggcaactttggctttgttggggaagcttgatgctattaatgtggaaaaggcaatcgaatttgttttatcctgtatgaactttgacggtggatttggttgcagaccaggttctgaatcccatgctgggcagatctattgttgcacaggatttctggctattacaagtcagttgcatcaagtaaattctgatttacttggctggtggctttgtgaacgacaattaccctcaggcgggctcaatggaaggccggagaagttaccagatgtatgctactcatggtgggtcctggcttccctaaagataattggaagacttcattggattgatagagagaaactgcgtaatttcattttagcatgtcaagatgaagaaacggggggatttgcagacaggccaggagatatggtggatccttttcataccttatttggaattgctggattgtcacttttgggagaagtgcttcagagagtgaatgttcagcctgagctagtgagctagattcattgaattgaaagttgcatagtatagttttgccattttaacatttctgtatttgaagtgcttatcgaatctaaaagtgactactgttaatattttgtatattgtgttaaattaattttaataaattatataattatacatattgtaaaataaa

SEQ ID NO: 434477 - DNA, 2394 bp, Homo sapiens
gggcatctgcgcaggcgcccggctcctaagtctacccaggaactgaccctgctctctcctttccctgttagacatgtgactgcagtgtactctcaatgaggaagatatagatacgaaaagaactagagccgcatcacatggggacttctgcaaatacagagactcggattaaaggtggagaagatggagctaaaggaactgcttatttaatacatttgaacaacttttggggtacttagaaggtgctttgaaacctgcatttgattaagcaagaattcgcttgcaagttaagggttagatttttttattttttaaaaatatgctttctgccacatgtaaaccgtaagttgtcctgaaatgataagctttgatattctatggtgtttattttttacttatctttttgaatgaaaagtgaacaacaagaaatgctggtggtaattttttgggtcaatgatgagttggcatgtattctgaatctaaagttgattattactactttagctctagaattactctgagacctgaaaattacctgaatcgtgactaagacgaagcctgaatgatttaagttcttttttgttggatacaatttgttgttgttgttgttgttttggttttgtttttgagtcggtctccggtcgcccaggatggagtgcagtgacacaacctcagttcactgcagccttaatttccctggctcaagcgatcttctacctcagcctccctagttagttacaatttttaaatggaacgttttcctattacaagatgaaatcaagtgaaaattgagatgtatgttgaatctatgctgtggggcagaagaacgttgtagaggtaaacattgatgagattaccactttattttgaaagggcactccacagaaggatgttattatcaagtcagatgcaccggacactttgttattggagaaacatgcagattatatcgcatcctatggctcaaagaaagatgattatgaatactgtatgtctgagtatttgagaatgagtggcatctattggggtctgacagtaatggatctcatgggacaacttcatcgcatgaatagagaagagattctggcatttattaagtcttgccaacatgaatgtggtggaataagtgctagtatcggacatgatcctcatcttttatacactcttagtgctgtccaggtcccactaagcagctggtctaactggagttaatggtctgctggaacttccagcatgcactgtggtagttatatcagcatatacaggagcactggaacagagggggccagtctaaaagataagggatgaacacagtgcaggccagagagaccagctgcttcatgggatgtgaaaaatctacttttataaagtagggagaaattgacacaagattctctttttgtgcggtggcaactttggctttgttggggaagcttgatgctattaatgtggaaaaggcaatcgaatttgttttatcctgtatgaactttgacggtggatttggttgcagaccaggttctgaatcccatgctgggcagatctattgttgcacaggatttctggctattacaagtcagttgcatcaagtaaattctgatttacttggctggtggctttgtgaacgacaattaccctcaggcgggctcaatggaaggccggagaagttaccagatgtatgctactcatggtgggtcctggcttccctaaagataattggaagacttcattggattgatagagagaaactgcgtaatttcattttagcatgtcaagatgaagaaacggggggatttgcagacaggccaggagatatggtggatccttttcataccttatttggaattgctggattgtcacttttgggagaagaacagattaaacctgttaatcctgtcttttgcatgcctgaagaagtgcttcagagagtgaatgttcagcctgagctagtgagctagattcattgaattgaaagttgcatagtatagttttgccattttaacatttctgtatttgaagtgcttatcgaatctaaaagtgactactgttaatattttgtatattgtgttaaattaattttaataaattatataattatacatattgtaaaataaagaccggtattttattttctgctttttattctgaagtcctgttattctgactacagttctttgtgtatacttctgtgtctgttatgttcaataactgagctaacataaaataactctaggtttctacttgatttttcccccatgtatacctttcatctgttctatagcaagttgatgtaaattggtttgtcaacaagaatgttaactgatgaaagtggatagaacccatacatgaattaaatgatgcacaaaataaatggctgttgaaatttggaaaaaaaaa

SEQ ID NO: 434478 - DNA, 1599 bp, Homo sapiens
gggcatctgcgcaggcgcccggctcctaagtctacccaggaactgaccctgctctctcctttccctgttagacatgggcactccacagaaggatgttattatcaagtcagatgcaccggacactttgttattggagaaacatgcagattatatcgcatcctatggctcaaagaaagatgattatattcttacgctgtatgacagtattaatgttattgacgtaaataaagttgtggaatatgttaaaggtctacagaaagaagatggttcttttgctggagatatttggggtaatgtcagatttagtccattctacccaaaataccaatattaaaatgtactggttttgctagtaaccagtttataagtttttcatcttttcaggtcccactaagcagctggtctaactggagttaatggtctgctggaacttccagcatgcactgtggtagttatatcagcatatacaggagcactggaacagagggggccagtctaaaagataagggatgaacacagtgcaggccagagagaccagctgcttcatgggatgtgaaaaatctacttttataaagtagggagaaattgacacaagattctctttttgtgcggtggcaactttggctttgttggggaagcttgatgctattaatgtggaaaaggcaatcgaatttgttttatcctgtatgaactttgacggtggatttggttgcagaccaggttctgaatcccatgctgggcagatctattgttgcacaggatttctggctattacaagtcagttgcatcaagtaaattctgatttacttggctggtggctttgtgaacgacaattaccctcaggcgggctcaatggaaggccggagaagttaccagatgtatgctactcatggtgggtcctggcttccctaaagataattggaagacttcattggattgatagagagaaactgcgtaatttcattttagcatgtcaagatgaagaaacggggggatttgcagacaggccaggagatatggtggatccttttcataccttatttggaattgctggattgtcacttttgggagaagaacagattaaacctgttaatcctgtcttttgcatgcctgaagaagtgcttcagagagtgaatgttcagcctgagctagtgagctagattcattgaattgaaagttgcatagtatagttttgccattttaacatttctgtatttgaagtgcttatcgaatctaaaagtgactactgttaatattttgtatattgtgttaaattaattttaataaattatataattatacatattgtaaaataaagaccggtattttattttctgctttttattctgaagtcctgttattctgactacagttctttgtgtatacttctgtgtctgttatgttcaataactgagctaacataaaataactctaggtttctacttgatttttcccccatgtatacctttcatctgttctatagcaagttgatgtaaattggtttgtcaacaagaatgttaactgatgaaagtggatagaacccatacatgaattaaatgatgcacaaaataaatggctgttgaaatttggaaaaaaaaa

SEQ ID NO: 434479 - DNA, 1358 bp, Homo sapiens
gggcatctgcgcaggcgcccggctcctaagtctacccaggaactgaccctgctctctcctttccctgttagacatgggcactccacagaaggatgttattatcaagtcagatgcaccggacactttgttattggagaaacatgcagattatatcgcatcctatggctcaaagaaagatgattatgaatactgtatgtctgagtatttgagaatgagtggcatctattggggtctgacagtaatggatctcatgggacaacttcatcgcatgaatagagaagagattctggcatttattaagtcttgccaacatgaatgtggtggaataagtgctagtatcggacatgatcctcatcttttatacactcttagtgctgtccagattcttacgctgtatgacagtattaatgttattgacgtaaataaagttgtggaatatgttaaaggtctacagaaagaagatggttcttttgctggagatatttggggagaaattgacacaagattctctttttgtgcggtggcaactttggctttgttggggaagcttgatgctattaatgtggaaaaggcaatcgaatttgttttatcctgtatgaactttgacggtggatttggttgcagaccaggttctgaatcccatgctgggcagatctattgttgcacaggatttctggctattacaagtcagttgcatcaagtaaattctgatttacttggctggtggctttgtgaacgacaattaccctcaggcgggctcaatggaaggccggagaaggtggatccttttcataccttatttggaattgctggattgtcacttttgggagaagaacagattaaacctgttaatcctgtcttttgcatgcctgaagaagtgcttcagagagtgaatgttcagcctgagctagtgagctagattcattgaattgaaagttgcatagtatagttttgccattttaacatttctgtatttgaagtgcttatcgaatctaaaagtgactactgttaatattttgtatattgtgttaaattaattttaataaattatataattatacatattgtaaaataaagaccggtattttattttctgctttttattctgaagtcctgttattctgactacagttctttgtgtatacttctgtgtctgttatgttcaataactgagctaacataaaataactctaggtttctacttgatttttcccccatgtatacctttcatctgttctatagcaagttgatgtaaattggtttgtcaacaagaatgttaactgatgaaagtggatagaacccatacatgaattaaatgatgcacaaaataaatggctgttgaaatttggaaaaaaaaa

SEQ ID NO: 434480 - DNA, 1395 bp, Homo sapiens
ccactgtgctcggcctgtatttttatttttaaaccttagtatttctgaataacaacgggtagagaaacacccgcagtagctgtctacaatagagtgaaataaaaagcctgaggaactgtcaacagaaaaatgggtggccgtggggagcaccgggacctgcacttgcacacaatctagggcagcttctaatgagtctatgagttactcagggatctcattaaaatgagatcagccttgagtggggttttctttatagacttctgtcaccatattttgaagagcaagggtttagttgattttaaggcaggtgtgtacccccctgggacagtgcttgtagaaaaacagaactattacccatgggattttcatggattatactgcttagctttcttgggttaaggggctgagttaggcattcattgcagatagaaacaaagcagatgcatgcttatcagtgagtactgagatatttagcatggttacctatgaattgaagtttggtctcttcttacccattaattgattatctttcattctaagcaagtatttcataccctgcatatcagtatatccctggatttcgtccttccacatggtttgacactttgaacatcagattacctaagagtgagacttaacccacttttaaattgttctcaaaattattaccagatgtatgctactcatggtgggtcctggcttccctaaagataattggaagacttcattggattgatagagagaaactgcgtaatttcattttagcatgtcaagatgaagaaacggggggatttgcagacaggccaggagatatggtggatccttttcataccttatttggaattgctggattgtcacttttgggagaagaacagattaaacctgttaatcctgtcttttgcatgcctgaagaagtgcttcagagagtgaatgttcagcctgagctagtgagctagattcattgaattgaaagttgcatagtatagttttgccattttaacatttctgtatttgaagtgcttatcgaatctaaaagtgactactgttaatattttgtatattgtgttaaattaattttaataaattatataattatacatattgtaaaataaagaccggtattttattttctgctttttattctgaagtcctgttattctgactacagttctttgtgtatacttctgtgtctgttatgttcaataactgagctaacataaaataactctaggtttctacttgatttttcccccatgtatacctttcatctgttctatagcaagttgatgtaaattggtttgtcaacaagaatgttaactgatgaaagtggatagaacccatacatgaattaaatgatgcacaaaataaatggctgttgaaatttggaaaaaaaaa

SEQ ID NO: 434481 - DNA, 753 bp, Homo sapiens
cagtttttttttctatttattgtagagtgtatgaaggatatagaacaatcttacagaaatttcttgtcgcttgttgctaacaaaattagtatatggtaaaggtcaggtattcataatttgaagttaaagaagttttcattttgtgatctgtatataaattcttttttaaataggtggatccttttcataccttatttggaattgctggattgtcacttttgggagaagaacagattaaacctgttaatcctgtcttttgcatgcctgaagaagtgcttcagagagtgaatgttcagcctgagctagtgagctagattcattgaattgaaagttgcatagtatagttttgccattttaacatttctgtatttgaagtgcttatcgaatctaaaagtgactactgttaatattttgtatattgtgttaaattaattttaataaattatataattatacatattgtaaaataaagaccggtattttattttctgctttttattctgaagtcctgttattctgactacagttctttgtgtatacttctgtgtctgttatgttcaataactgagctaacataaaataactctaggtttctacttgatttttcccccatgtatacctttcatctgttctatagcaagttgatgtaaattggtttgtcaacaagaatgttaactgatgaaagtggatagaacccatacatgaattaaatgatgcacaaaataaatggctgttgaaatttggaaaaaaaaa

SEQ ID NO: 434482 - DNA, 940 bp, Homo sapiens
gggcatctgcgcaggcgcccggctcctaagtctacccaggaactgaccctgctctctcctttccctgttagacatgggcactccacagaaggatgttattatcaagtcagatgcaccggacactttgttattggagaaacatgcagattatatcgcatcctatggctcaaagaaagatgattatgaatactgtatgtctgagtatttgagaatgagtggcatctattggggtctgacagtaatggatctcatgggacaacttcatcgcatgaatagagaagagattctggcatttattaagtcttgccaacatgaatgtggtggaataagtgctagtatcggacatgatcctcatcttttatacactcttagtgctgtccagattcttacgctgtatgacagtattaatgttattgacgtaaataaagttgtggaatatgttaaaggtctacagaaagaagatggttcttttgctggagatatttggggagaaattgacacaagattctctttttgtgcggtggcaactttggctttgttggggaagcttgatgctattaatgtggaaaaggcaatcgaatttgttttatcctgtatgaactttgacggtggatttggttgcagaccaggttctgaatcccatgctgggcaggtaatttatgaatacagatgaaaatgtattgtcattttggaagccagtgtagtaaaataagaaaattggttatttcagtgtttgtcaaatacacataaagttaattcgactgtaatagggcatcttacataagaattgcttaattgctatcattactttgctttatatactatatacctttctctgtcggtggattcgtctgacctaagcaaacataagtgggtttataagcaccaaaacacttttgttttccattaatttttcactaaccatacagataaaaaaaaa

SEQ ID NO: 434483 - DNA, 1932 bp, Homo sapiens
gggcatctgcgcaggcgcccggctcctaagtctacccaggaactgaccctgctctctcctttccctgttagacatgtgactgcagtgtactctcaatgaggaagatatagatacgaaaagaactagagccgcatcacatggggacttctgcaaatacagagactcggattaaaggtggagaagatggagctaaaggaactgcttatttaatacatttgaacaacttttggggtacttagaaggtgctttgaaacctgcatttgattaagcaagaattcgcttgcaagttaagggttagatttttttattttttaaaaatatgctttctgccacatgtaaaccgtaagttgtcctgaaatgataagctttgatattctatggtgtttattttttacttatctttttgaatgaaaagtgaacaacaagaaatgctggtggtaattttttgggtcaatgatgagttggcatgtattctgaatctaaagttgattattactactttagctctagaattactctgagacctgaaaattacctgaatcgtgactaagacgaagcctgaatgatttaagttcttttttgttggatacaatttgttgttgttgttgttgttttggttttgtttttgagtcggtctccggtcgcccaggatggagtgcagtgacacaacctcagttcactgcagccttaatttccctggctcaagcgatcttctacctcagcctccctagttagttacaatttttaaatggaacgttttcctattacaagatgaaatcaagtgaaaattgagatgtatgttgaatctatgctgtggggcagaagaacgttgtagaggtaaacattgatgagattaccactttattttgaaagggcactccacagaaggatgttattatcaagtcagatgcaccggacactttgttattggagaaacatgcagattatatcgcatcctatggctcaaagaaagatgattatgaatactgtatgtctgagtatttgagaatgagtggcatctattggggtctgacagtaatggatctcatgggacaacttcatcgcatgaatagagaagagattctggcatttattaagtcttgccaacatgaatgtggtggaataagtgctagtatcggacatgatcctcatcttttatacactcttagtgctgtccagattcttacgctgtatgacagtattaatgttattgacgtaaataaagttgtggaatatgttaaaggtctacagaaagaagatggttcttttgctggagatatttggggtcccactaagcagctggtctaactggagttaatggtctgctggaacttccagcatgcactgtggtagttatatcagcatatacaggagcactggaacagagggggccagtctaaaagataagggatgaacacagtgcaggccagagagaccagctgcttcatgggatgtgaaaaatctacttttataaagtagggagaaattgacacaagattctctttttgtgcggtggcaactttggctttgttggggaagcttgatgctattaatgtggaaaaggcaatcgaatttgttttatcctgtatgaactttgacggtggatttggttgcagaccaggttctgaatcccatgctgggcaggtaatttatgaatacagatgaaaatgtattgtcattttggaagccagtgtagtaaaataagaaaattggttatttcagtgtttgtcaaatacacataaagttaattcgactgtaatagggcatcttacataagaattgcttaattgctatcattactttgctttatatactatatacctttctctgtcggtggattcgtctgacctaagcaaacataagtgggtttataagcaccaaaacacttttgttttccattaatttttcactaaccatacagataaaaaaaaa

SEQ ID NO: 434484 - DNA, 1686 bp, Homo sapiens
gggcatctgcgcaggcgcccggctcctaagtctacccaggaactgaccctgctctctcctttccctgttagacatgtgactgcagtgtactctcaatgaggaagatatagatacgaaaagaactagagccgcatcacatggggacttctgcaaatacagagactcggattaaaggtggagaagatggagctaaaggaactgcttatttaatacatttgaacaacttttggggtacttagaaggtgctttgaaacctgcatttgattaagcaagaattcgcttgcaagttaagggttagatttttttattttttaaaaatatgctttctgccacatgtaaaccgtaagttgtcctgaaatgataagctttgatattctatggtgtttattttttacttatctttttgaatgaaaagtgaacaacaagaaatgctggtggtaattttttgggtcaatgatgagttggcatgtattctgaatctaaagttgattattactactttagctctagaattactctgagacctgaaaattacctgaatcgtgactaagacgaagcctgaatgatttaagttcttttttgttggatacaatttgttgttgttgttgttgttttggttttgtttttgagtcggtctccggtcgcccaggatggagtgcagtgacacaacctcagttcactgcagccttaatttccctggctcaagcgatcttctacctcagcctccctagttagttacaatttttaaatggaacgttttcctattacaagatgaaatcaagtgaaaattgagatgtatgttgaatctatgctgtggggcagaagaacgttgtagaggtaaacattgatgagattaccactttattttgaaagggcactccacagaaggatgttattatcaagtcagatgcaccggacactttgttattggagaaacatgcagattatatcgcatcctatggctcaaagaaagatgattatgaatactgtatgtctgagtatttgagaatgagtggcatctattggggtctgacagtaatggatctcatgggacaacttcatcgcatgaatagagaagagattctggcatttattaagtcttgccaacatgaatgtggtggaataagtgctagtatcggacatgatcctcatcttttatacactcttagtgctgtccaggagaaattgacacaagattctctttttgtgcggtggcaactttggctttgttggggaagcttgatgctattaatgtggaaaaggcaatcgaatttgttttatcctgtatgaactttgacggtggatttggttgcagaccaggttctgaatcccatgctgggcagatctattgttgcacaggatttctggctattacaagtcagttgcatcaagtaaattctgatttacttggctggtggctttgtgaacgacaattaccctcaggcgggctcaatggaaggccggagaagttaccagatgtatgctactcatggtgggtcctggcttccctaaagataattggaagacttcattggattgatagagagaaactgcgtaatttcattttagcatgtcaagatgaagaaacgggggttgagacaggcagagaatgggggacttaaaactatttggaagggatgtgcttgggaaaaaagttactggctcggctgggcttaaaagtcaggg

SEQ ID NO: 434485 - DNA, 490 bp, Homo sapiens
taagtgtgagtttagcgctgctgtccggatgggttggtagcagacagggtggagtagggttaagcacactggtcaccttaggattggtttcctggtgctggagaatggttaggacacaggccttggaaggttttttgagtgtgaaatattactcagcgttttctgcagacctcgcgggcaatgccgcttctaattttatccaggccttcttctgtagggagggcctgttaagagttgagcagcccgatttctgaacccctctaaaaagctgtggctgattggtggcttttttttttcttggagagggggtgtcaaagatttctttaaaatcgttagtgatgtggtctcgctttaagatttttaatgggatcagaagaaaattcggtacttaatcacttccggtaatcttcatgacctgttatagtgactgcagtgtactctcaatgaggaagatatagatacgaaaagaactagagccgcatcacatggg

SEQ ID NO: 434486 - DNA, 1205 bp, Homo sapiens
aggagggaggctagttccctggtggggtagcctggcaacattcccattccaccgcacctggccagctgccatcttggcagagccagggggagatgcaccagggagtttggagtcaggaaggcagagttgtgtgggctgaagtctgcgggaaccccagggtgacacaggcaaggggtagaagtcagagtggggaccaaaccatagactggggccctgggttctgcagaggtgtggatggggcaggtggcaggtgctccagtgggggccccaggtgaggccctgatggccctcctggggcaataaagacatcatgggaagggggctttgtggtttgcctctgctctcgtcgggcgatctggctttagccttcaggaggaggtaagcagaggagatcagtgcctgtttctgaccccaggagggccttgttgggctccaacctagagccttccggcttcaggtcccaagagaagtccccccctaactgtgacccccctaactgtgatcaggggtctgccattgcccgcttttctctgcctgatctggggactcaggagaggccacggcagccacagcctaggggtggttcagtccctggcccacagtctggtcagttgagtccttctgggaaccggggctatgaaaactttcgtctttggggaccggtacccatgaaggaaaactttcctgagggggtgaggaccaaagaatcaagatccttttcaggcctgatagccaagatgatgagaacttttagataaggctgtggggagagtccctggccttttgagcatcctgcttgggcacacggggaataacctttctccagcttccagtgtgaactgagaaagagaaagggaaaccctgtctttggagaagctgggatcttcccagcaccagaaacttctgcaggcccctgcctggcccacggctaacctttgggtgggactggagtttcctgaacagggaacaagggagccttccgcagagctctgatgggcaggcctccgagggcctgtgctgtgtgctgttaggatagcttggtgttgtctataccccattagtaagttttgtctgagtgtgtcctcgctgttcattgtctaatttggtaacatttattttggtcctgaccccttctgctgctgctgggtttaagcttcagtgcaggtggaatgacattcaaataaagaaacactttctatcaccca

SEQ ID NO: 434487 - DNA, 2592 bp, Homo sapiens
tgtacggcccgagtcgttagatgggggctctcgcggttggggaacatagatggctgaagacagaatctagagccttcaaataatgtggagatgtttccaccttcaggttccactgggctgattcccccctcccactttcaagctcggcccctttcaactctgccaagaatggctcccacctggctctcagacattcccctggtccaacccccaggccatcaagatgtctcagagaggcggctagacacccagagacctcaagtgaccatgtgggaacgggatgtttccagtgacaggcaggagccagggcggagaggcaggtcctgggggctggaggggtcacaggccctgagccagcaggctgaggtgatcgttcggcagctgcaagagctgcggcggctggaggaggaggtccggctcctgcgggagacctcgctgcagcagaagatgaggctagaggcccaggccatggagctagaggctctggcacgggcggagaaggccggccgagctgaggctgagggcctgcgtgctgctttggctggggctgaggttgtccggaagaacttggaagaggggagccagcgggagctggaagaggttcagaggctgcaccaagagcagctgtcctctttgacacaggctcacgaggaggctctttccagtttgaccagcaaggctgagggcttggagaagtctctgagtagtctggaaaccagaagagcaggggaagccaaggagctggccgaggctcagagggaggccgagctgcttcggaagcagctgagcaagacccaggaagacttggaggctcaggtgaccctggttgagaatctaagaaaatatgttggggaacaagtcccttctgaggtccacagccagacatgggaactggagcgacagaagcttctggaaaccatgcagcacttgcaggaggaccgggacagcctgcatgccaccgcggagctgctgcaggtgcgggtgcagagcctcacacacatcctcgccctgcaggaggaggagctgaccaggaaggttcaaccttcagattccctggagcctgagtttaccaggaagtgccagtccctgctgaaccgctggcgggagaaggtgtttgccctcatggtgcagctaaaggcccaggagctggaacacagtgactctgttaagcagctgaagggacaggtggcctcactccaggaaaaagtgacatcccagagccaggagcaggccatcctgcagcgatccctgcaggacaaagccgcagaggtggaggtggagcgtatgggtgccaagggcctgcagttggagctgagccgtgctcaggaggccaggcgtcggtggcagcagcagacagcctcagccgaggagcagctgaggcttgtggtcaatgctgtcagcagctctcagatctggctcgagaccaccatggctaaggtggaaggggctgccgcccagcttcccagcctcaacaaccgactcagctatgctgtccgcaaggtccacaccattcggggcctgattgctcgaaagcttgcccttgctcagctgcgccaggagagctgtcccctaccaccaccggtcacagatgtgagccttgagttgcagcagctgcgggaagaacggaaccgcctggatgcagaactgcagctgagtgcccgcctcatccagcaggaggtgggccgggctcgggagcaaggggaggcagagcggcagcagctgagcaaggtggcccagcagctggagcaggagctgcagcagacccaggagtccctggctagcttggggctgcagctggaggtagcacgccagggccagcaggagagcacagaggaggctgccagtctgcggcaggagctgacccagcagcaggaactctacgggcaagccctgcaagaaaaggtggctgaagtggaaactcggctgcgggagcaactctcagacacagagaggaggctgaacgaggctcggagggagcatgccaaggccgtggtctccttgcgccagattcagcgcagagccgcccaggaaaaggagcggagccaggaactcaggcgtctgcaggaggaggcccggaaggaggaggggcagcgactggcccggcgcttgcaggagctagagagggataagaacctcatgctggccaccttgcagcaggaaggtctcctctcccgttacaagcagcagcgactgttgacagttcttccttccctactggataagaagaaatctgtggtgtccagccccaggcctccagagtgttcagcatctgcacctgtagcagcagcagtgcccaccagggagtccataaaagggtccctctctgtcctgctcgatgacctgcaggacctgagtgaagccatttccaaagaggaagctgtttgtcaaggagacaaccttgacagatgctccagctccaatccccagatgagcagctaagcagctgacagttggagggaaagccagcctgggggctgggaggatcctggagaagtgggtggggacagaccagcccttccccatcctggggttgccctgggggataccagctgagtctgaattctgctctaaataaagacgactacagaagga

SEQ ID NO: 434488 - DNA, 501 bp, Homo sapiens
aagggacaaatgcgcgcacttcaggaatctcctcttcagactctcgcatgatgagtgttgttctctgcggtccttcgaggcccttagcctcttttagcgatgcccagcttggaccaaagagcctcctctctcccattcctcatttccctgtgccagccctgtttcctctgtaaccacgagcaccttcccttgtctggtgctcatctgctgtcttccttcccagggtccctctctgtcctgctcgatgacctgcaggacctgagtgaagccatttccaaagaggaagctgtttgtcaaggagacaaccttgacagatgctccagctccaatccccagatgagcagctaagcagctgacagttggagggaaagccagcctgggggctgggaggatcctggagaagtgggtggggacagaccagcccttccccatcctggggttgccctgggggataccagctgagtctgaattctgctctaaataaagacgactacagaagga

SEQ ID NO: 434489 - DNA, 2592 bp, Homo sapiens
ggggtgtggccaaagcgcagtagggggctctcgcggttggggaacatagatggctgaagacagaatctagagccttcaaataatgtggagatgtttccaccttcaggttccactgggctgattcccccctcccactttcaagctcggcccctttcaactctgccaagaatggctcccacctggctctcagacattcccctggtccaacccccaggccatcaagatgtctcagagaggcggctagacacccagagacctcaagtgaccatgtgggaacgggatgtttccagtgacaggcaggagccagggcggagaggcaggtcctgggggctggaggggtcacaggccctgagccagcaggctgaggtgatcgttcggcagctgcaagagctgcggcggctggaggaggaggtccggctcctgcgggagacctcgctgcagcagaagatgaggctagaggcccaggccatggagctagaggctctggcacgggcggagaaggccggccgagctgaggctgagggcctgcgtgctgctttggctggggctgaggttgtccggaagaacttggaagaggggagccagcgggagctggaagaggttcagaggctgcaccaagagcagctgtcctctttgacacaggctcacgaggaggctctttccagtttgaccagcaaggctgagggcttggagaagtctctgagtagtctggaaaccagaagagcaggggaagccaaggagctggccgaggctcagagggaggccgagctgcttcggaagcagctgagcaagacccaggaagacttggaggctcaggtgaccctggttgagaatctaagaaaatatgttggggaacaagtcccttctgaggtccacagccagacatgggaactggagcgacagaagcttctggaaaccatgcagcacttgcaggaggaccgggacagcctgcatgccaccgcggagctgctgcaggtgcgggtgcagagcctcacacacatcctcgccctgcaggaggaggagctgaccaggaaggttcaaccttcagattccctggagcctgagtttaccaggaagtgccagtccctgctgaaccgctggcgggagaaggtgtttgccctcatggtgcagctaaaggcccaggagctggaacacagtgactctgttaagcagctgaagggacaggtggcctcactccaggaaaaagtgacatcccagagccaggagcaggccatcctgcagcgatccctgcaggacaaagccgcagaggtggaggtggagcgtatgggtgccaagggcctgcagttggagctgagccgtgctcaggaggccaggcgtcggtggcagcagcagacagcctcagccgaggagcagctgaggcttgtggtcaatgctgtcagcagctctcagatctggctcgagaccaccatggctaaggtggaaggggctgccgcccagcttcccagcctcaacaaccgactcagctatgctgtccgcaaggtccacaccattcggggcctgattgctcgaaagcttgcccttgctcagctgcgccaggagagctgtcccctaccaccaccggtcacagatgtgagccttgagttgcagcagctgcgggaagaacggaaccgcctggatgcagaactgcagctgagtgcccgcctcatccagcaggaggtgggccgggctcgggagcaaggggaggcagagcggcagcagctgagcaaggtggcccagcagctggagcaggagctgcagcagacccaggagtccctggctagcttggggctgcagctggaggtagcacgccagggccagcaggagagcacagaggaggctgccagtctgcggcaggagctgacccagcagcaggaactctacgggcaagccctgcaagaaaaggtggctgaagtggaaactcggctgcgggagcaactctcagacacagagaggaggctgaacgaggctcggagggagcatgccaaggccgtggtctccttgcgccagattcagcgcagagccgcccaggaaaaggagcggagccaggaactcaggcgtctgcaggaggaggcccggaaggaggaggggcagcgactggcccggcgcttgcaggagctagagagggataagaacctcatgctggccaccttgcagcaggaaggtctcctctcccgttacaagcagcagcgactgttgacagttcttccttccctactggataagaagaaatctgtggtgtccagccccaggcctccagagtgttcagcatctgcacctgtagcagcagcagtgcccaccagggagtccataaaagggtccctctctgtcctgctcgatgacctgcaggacctgagtgaagccatttccaaagaggaagctgtttgtcaaggagacaaccttgacagatgctccagctccaatccccagatgagcagctaagcagctgacagttggagggaaagccagcctgggggctgggaggatcctggagaagtgggtggggacagaccagcccttccccatcctggggttgccctgggggataccagctgagtctgaattctgctctaaataaagacgactacagaagga

SEQ ID NO: 434490 - DNA, 2632 bp, Homo sapiens
aagggggtacaggggccaggtgaagggacagatgaagagatcagaacagccttagagctcacgggctaactgggtgaaggggaacatagatggctgaagacagaatctagagccttcaaataatgtggagatgtttccaccttcaggttccactgggctgattcccccctcccactttcaagctcggcccctttcaactctgccaagaatggctcccacctggctctcagacattcccctggtccaacccccaggccatcaagatgtctcagagaggcggctagacacccagagacctcaagtgaccatgtgggaacgggatgtttccagtgacaggcaggagccagggcggagaggcaggtcctgggggctggaggggtcacaggccctgagccagcaggctgaggtgatcgttcggcagctgcaagagctgcggcggctggaggaggaggtccggctcctgcgggagacctcgctgcagcagaagatgaggctagaggcccaggccatggagctagaggctctggcacgggcggagaaggccggccgagctgaggctgagggcctgcgtgctgctttggctggggctgaggttgtccggaagaacttggaagaggggagccagcgggagctggaagaggttcagaggctgcaccaagagcagctgtcctctttgacacaggctcacgaggaggctctttccagtttgaccagcaaggctgagggcttggagaagtctctgagtagtctggaaaccagaagagcaggggaagccaaggagctggccgaggctcagagggaggccgagctgcttcggaagcagctgagcaagacccaggaagacttggaggctcaggtgaccctggttgagaatctaagaaaatatgttggggaacaagtcccttctgaggtccacagccagacatgggaactggagcgacagaagcttctggaaaccatgcagcacttgcaggaggaccgggacagcctgcatgccaccgcggagctgctgcaggtgcgggtgcagagcctcacacacatcctcgccctgcaggaggaggagctgaccaggaaggttcaaccttcagattccctggagcctgagtttaccaggaagtgccagtccctgctgaaccgctggcgggagaaggtgtttgccctcatggtgcagctaaaggcccaggagctggaacacagtgactctgttaagcagctgaagggacaggtggcctcactccaggaaaaagtgacatcccagagccaggagcaggccatcctgcagcgatccctgcaggacaaagccgcagaggtggaggtggagcgtatgggtgccaagggcctgcagttggagctgagccgtgctcaggaggccaggcgtcggtggcagcagcagacagcctcagccgaggagcagctgaggcttgtggtcaatgctgtcagcagctctcagatctggctcgagaccaccatggctaaggtggaaggggctgccgcccagcttcccagcctcaacaaccgactcagctatgctgtccgcaaggtccacaccattcggggcctgattgctcgaaagcttgcccttgctcagctgcgccaggagagctgtcccctaccaccaccggtcacagatgtgagccttgagttgcagcagctgcgggaagaacggaaccgcctggatgcagaactgcagctgagtgcccgcctcatccagcaggaggtgggccgggctcgggagcaaggggaggcagagcggcagcagctgagcaaggtggcccagcagctggagcaggagctgcagcagacccaggagtccctggctagcttggggctgcagctggaggtagcacgccagggccagcaggagagcacagaggaggctgccagtctgcggcaggagctgacccagcagcaggaactctacgggcaagccctgcaagaaaaggtggctgaagtggaaactcggctgcgggagcaactctcagacacagagaggaggctgaacgaggctcggagggagcatgccaaggccgtggtctccttgcgccagattcagcgcagagccgcccaggaaaaggagcggagccaggaactcaggcgtctgcaggaggaggcccggaaggaggaggggcagcgactggcccggcgcttgcaggagctagagagggataagaacctcatgctggccaccttgcagcaggaaggtctcctctcccgttacaagcagcagcgactgttgacagttcttccttccctactggataagaagaaatctgtggtgtccagccccaggcctccagagtgttcagcatctgcacctgtagcagcagcagtgcccaccagggagtccataaaagggtccctctctgtcctgctcgatgacctgcaggacctgagtgaagccatttccaaagaggaagctgtttgtcaaggagacaaccttgacagatgctccagctccaatccccagatgagcagctaagcagctgacagttggagggaaagccagcctgggggctgggaggatcctggagaagtgggtggggacagaccagcccttccccatcctggggttgccctgggggataccagctgagtctgaattctgctctaaataaagacgactacagaagga

SEQ ID NO: 434491 - DNA, 2747 bp, Homo sapiens
aagggggtacaggggccaggtgaagggacagatgaagagatcagaacagccttagagctcacgggctaactgggtgaaggcttgctgagccatggagagaactctggagatggcgctcaagacccctgcactgtgtacctcctttctcacctctggccaggagcagcagggaccatagaaacttaaggaggagggggaacatagatggctgaagacagaatctagagccttcaaataatgtggagatgtttccaccttcaggttccactgggctgattcccccctcccactttcaagctcggcccctttcaactctgccaagaatggctcccacctggctctcagacattcccctggtccaacccccaggccatcaagatgtctcagagaggcggctagacacccagagacctcaagtgaccatgtgggaacgggatgtttccagtgacaggcaggagccagggcggagaggcaggtcctgggggctggaggggtcacaggccctgagccagcaggctgaggtgatcgttcggcagctgcaagagctgcggcggctggaggaggaggtccggctcctgcgggagacctcgctgcagcagaagatgaggctagaggcccaggccatggagctagaggctctggcacgggcggagaaggccggccgagctgaggctgagggcctgcgtgctgctttggctggggctgaggttgtccggaagaacttggaagaggggagccagcgggagctggaagaggttcagaggctgcaccaagagcagctgtcctctttgacacaggctcacgaggaggctctttccagtttgaccagcaaggctgagggcttggagaagtctctgagtagtctggaaaccagaagagcaggggaagccaaggagctggccgaggctcagagggaggccgagctgcttcggaagcagctgagcaagacccaggaagacttggaggctcaggtgaccctggttgagaatctaagaaaatatgttggggaacaagtcccttctgaggtccacagccagacatgggaactggagcgacagaagcttctggaaaccatgcagcacttgcaggaggaccgggacagcctgcatgccaccgcggagctgctgcaggtgcgggtgcagagcctcacacacatcctcgccctgcaggaggaggagctgaccaggaaggttcaaccttcagattccctggagcctgagtttaccaggaagtgccagtccctgctgaaccgctggcgggagaaggtgtttgccctcatggtgcagctaaaggcccaggagctggaacacagtgactctgttaagcagctgaagggacaggtggcctcactccaggaaaaagtgacatcccagagccaggagcaggccatcctgcagcgatccctgcaggacaaagccgcagaggtggaggtggagcgtatgggtgccaagggcctgcagttggagctgagccgtgctcaggaggccaggcgtcggtggcagcagcagacagcctcagccgaggagcagctgaggcttgtggtcaatgctgtcagcagctctcagatctggctcgagaccaccatggctaaggtggaaggggctgccgcccagcttcccagcctcaacaaccgactcagctatgctgtccgcaaggtccacaccattcggggcctgattgctcgaaagcttgcccttgctcagctgcgccaggagagctgtcccctaccaccaccggtcacagatgtgagccttgagttgcagcagctgcgggaagaacggaaccgcctggatgcagaactgcagctgagtgcccgcctcatccagcaggaggtgggccgggctcgggagcaaggggaggcagagcggcagcagctgagcaaggtggcccagcagctggagcaggagctgcagcagacccaggagtccctggctagcttggggctgcagctggaggtagcacgccagggccagcaggagagcacagaggaggctgccagtctgcggcaggagctgacccagcagcaggaactctacgggcaagccctgcaagaaaaggtggctgaagtggaaactcggctgcgggagcaactctcagacacagagaggaggctgaacgaggctcggagggagcatgccaaggccgtggtctccttgcgccagattcagcgcagagccgcccaggaaaaggagcggagccaggaactcaggcgtctgcaggaggaggcccggaaggaggaggggcagcgactggcccggcgcttgcaggagctagagagggataagaacctcatgctggccaccttgcagcaggaaggtctcctctcccgttacaagcagcagcgactgttgacagttcttccttccctactggataagaagaaatctgtggtgtccagccccaggcctccagagtgttcagcatctgcacctgtagcagcagcagtgcccaccagggagtccataaaagggtccctctctgtcctgctcgatgacctgcaggacctgagtgaagccatttccaaagaggaagctgtttgtcaaggagacaaccttgacagatgctccagctccaatccccagatgagcagctaagcagctgacagttggagggaaagccagcctgggggctgggaggatcctggagaagtgggtggggacagaccagcccttccccatcctggggttgccctgggggataccagctgagtctgaattctgctctaaataaagacgactacagaagga

SEQ ID NO: 434492 - DNA, 2825 bp, Homo sapiens
aagggggtacaggggccaggtgaagggacagatgaagagatcagaacagccttagagctcacgggctaactgggtgaaggcttgctgagccatggagagaactctggagatggcgctcaagacccctgcactgtgtacctcctttctcacctctggccaggagcagcagggaccatagaaacttaaggaggagggggaacatagatggctgaagacagaatctagagccttcaaataatgtggagatgtttccaccttcaggtcagtgggaccagacaaggggagtggtggttgtctctgcctgggaaactgaccatctttgtttttgtaattcttcaggttccactgggctgattcccccctcccactttcaagctcggcccctttcaactctgccaagaatggctcccacctggctctcagacattcccctggtccaacccccaggccatcaagatgtctcagagaggcggctagacacccagagacctcaagtgaccatgtgggaacgggatgtttccagtgacaggcaggagccagggcggagaggcaggtcctgggggctggaggggtcacaggccctgagccagcaggctgaggtgatcgttcggcagctgcaagagctgcggcggctggaggaggaggtccggctcctgcgggagacctcgctgcagcagaagatgaggctagaggcccaggccatggagctagaggctctggcacgggcggagaaggccggccgagctgaggctgagggcctgcgtgctgctttggctggggctgaggttgtccggaagaacttggaagaggggagccagcgggagctggaagaggttcagaggctgcaccaagagcagctgtcctctttgacacaggctcacgaggaggctctttccagtttgaccagcaaggctgagggcttggagaagtctctgagtagtctggaaaccagaagagcaggggaagccaaggagctggccgaggctcagagggaggccgagctgcttcggaagcagctgagcaagacccaggaagacttggaggctcaggtgaccctggttgagaatctaagaaaatatgttggggaacaagtcccttctgaggtccacagccagacatgggaactggagcgacagaagcttctggaaaccatgcagcacttgcaggaggaccgggacagcctgcatgccaccgcggagctgctgcaggtgcgggtgcagagcctcacacacatcctcgccctgcaggaggaggagctgaccaggaaggttcaaccttcagattccctggagcctgagtttaccaggaagtgccagtccctgctgaaccgctggcgggagaaggtgtttgccctcatggtgcagctaaaggcccaggagctggaacacagtgactctgttaagcagctgaagggacaggtggcctcactccaggaaaaagtgacatcccagagccaggagcaggccatcctgcagcgatccctgcaggacaaagccgcagaggtggaggtggagcgtatgggtgccaagggcctgcagttggagctgagccgtgctcaggaggccaggcgtcggtggcagcagcagacagcctcagccgaggagcagctgaggcttgtggtcaatgctgtcagcagctctcagatctggctcgagaccaccatggctaaggtggaaggggctgccgcccagcttcccagcctcaacaaccgactcagctatgctgtccgcaaggtccacaccattcggggcctgattgctcgaaagcttgcccttgctcagctgcgccaggagagctgtcccctaccaccaccggtcacagatgtgagccttgagttgcagcagctgcgggaagaacggaaccgcctggatgcagaactgcagctgagtgcccgcctcatccagcaggaggtgggccgggctcgggagcaaggggaggcagagcggcagcagctgagcaaggtggcccagcagctggagcaggagctgcagcagacccaggagtccctggctagcttggggctgcagctggaggtagcacgccagggccagcaggagagcacagaggaggctgccagtctgcggcaggagctgacccagcagcaggaactctacgggcaagccctgcaagaaaaggtggctgaagtggaaactcggctgcgggagcaactctcagacacagagaggaggctgaacgaggctcggagggagcatgccaaggccgtggtctccttgcgccagattcagcgcagagccgcccaggaaaaggagcggagccaggaactcaggcgtctgcaggaggaggcccggaaggaggaggggcagcgactggcccggcgcttgcaggagctagagagggataagaacctcatgctggccaccttgcagcaggaaggtctcctctcccgttacaagcagcagcgactgttgacagttcttccttccctactggataagaagaaatctgtggtgtccagccccaggcctccagagtgttcagcatctgcacctgtagcagcagcagtgcccaccagggagtccataaaagggtccctctctgtcctgctcgatgacctgcaggacctgagtgaagccatttccaaagaggaagctgtttgtcaaggagacaaccttgacagatgctccagctccaatccccagatgagcagctaagcagctgacagttggagggaaagccagcctgggggctgggaggatcctggagaagtgggtggggacagaccagcccttccccatcctggggttgccctgggggataccagctgagtctgaattctgctctaaataaagacgactacagaagga

SEQ ID NO: 434493 - DNA, 2670 bp, Homo sapiens
ggggtgtggccaaagcgcagtagggggctctcgcggttggggaacatagatggctgaagacagaatctagagccttcaaataatgtggagatgtttccaccttcaggtcagtgggaccagacaaggggagtggtggttgtctctgcctgggaaactgaccatctttgtttttgtaattcttcaggttccactgggctgattcccccctcccactttcaagctcggcccctttcaactctgccaagaatggctcccacctggctctcagacattcccctggtccaacccccaggccatcaagatgtctcagagaggcggctagacacccagagacctcaagtgaccatgtgggaacgggatgtttccagtgacaggcaggagccagggcggagaggcaggtcctgggggctggaggggtcacaggccctgagccagcaggctgaggtgatcgttcggcagctgcaagagctgcggcggctggaggaggaggtccggctcctgcgggagacctcgctgcagcagaagatgaggctagaggcccaggccatggagctagaggctctggcacgggcggagaaggccggccgagctgaggctgagggcctgcgtgctgctttggctggggctgaggttgtccggaagaacttggaagaggggagccagcgggagctggaagaggttcagaggctgcaccaagagcagctgtcctctttgacacaggctcacgaggaggctctttccagtttgaccagcaaggctgagggcttggagaagtctctgagtagtctggaaaccagaagagcaggggaagccaaggagctggccgaggctcagagggaggccgagctgcttcggaagcagctgagcaagacccaggaagacttggaggctcaggtgaccctggttgagaatctaagaaaatatgttggggaacaagtcccttctgaggtccacagccagacatgggaactggagcgacagaagcttctggaaaccatgcagcacttgcaggaggaccgggacagcctgcatgccaccgcggagctgctgcaggtgcgggtgcagagcctcacacacatcctcgccctgcaggaggaggagctgaccaggaaggttcaaccttcagattccctggagcctgagtttaccaggaagtgccagtccctgctgaaccgctggcgggagaaggtgtttgccctcatggtgcagctaaaggcccaggagctggaacacagtgactctgttaagcagctgaagggacaggtggcctcactccaggaaaaagtgacatcccagagccaggagcaggccatcctgcagcgatccctgcaggacaaagccgcagaggtggaggtggagcgtatgggtgccaagggcctgcagttggagctgagccgtgctcaggaggccaggcgtcggtggcagcagcagacagcctcagccgaggagcagctgaggcttgtggtcaatgctgtcagcagctctcagatctggctcgagaccaccatggctaaggtggaaggggctgccgcccagcttcccagcctcaacaaccgactcagctatgctgtccgcaaggtccacaccattcggggcctgattgctcgaaagcttgcccttgctcagctgcgccaggagagctgtcccctaccaccaccggtcacagatgtgagccttgagttgcagcagctgcgggaagaacggaaccgcctggatgcagaactgcagctgagtgcccgcctcatccagcaggaggtgggccgggctcgggagcaaggggaggcagagcggcagcagctgagcaaggtggcccagcagctggagcaggagctgcagcagacccaggagtccctggctagcttggggctgcagctggaggtagcacgccagggccagcaggagagcacagaggaggctgccagtctgcggcaggagctgacccagcagcaggaactctacgggcaagccctgcaagaaaaggtggctgaagtggaaactcggctgcgggagcaactctcagacacagagaggaggctgaacgaggctcggagggagcatgccaaggccgtggtctccttgcgccagattcagcgcagagccgcccaggaaaaggagcggagccaggaactcaggcgtctgcaggaggaggcccggaaggaggaggggcagcgactggcccggcgcttgcaggagctagagagggataagaacctcatgctggccaccttgcagcaggaaggtctcctctcccgttacaagcagcagcgactgttgacagttcttccttccctactggataagaagaaatctgtggtgtccagccccaggcctccagagtgttcagcatctgcacctgtagcagcagcagtgcccaccagggagtccataaaagggtccctctctgtcctgctcgatgacctgcaggacctgagtgaagccatttccaaagaggaagctgtttgtcaaggagacaaccttgacagatgctccagctccaatccccagatgagcagctaagcagctgacagttggagggaaagccagcctgggggctgggaggatcctggagaagtgggtggggacagaccagcccttccccatcctggggttgccctgggggataccagctgagtctgaattctgctctaaataaagacgactacagaagga

SEQ ID NO: 434494 - DNA, 2399 bp, Homo sapiens
ggggtgtggccaaagcgcagtagggggctctcgcggttggggaacatagatggctgaagacagaatctagagccttcaaataatgtggagatgtttccaccttcaggttccactgggctgattcccccctcccactttcaagctcggcccctttcaactctgccaagaatggctcccacctggctctcagacattcccctggtccaacccccaggccatcaagatgtctcagagaggcggctagacacccagagacctcaagtgaccatgtgggaacgggatgtttccagtgacaggcaggagccagggcggagaggcaggtcctgggggctggaggggtcacaggccctgagccagcaggctgaggtgatcgttcggcagctgcaagagctgcggcgctggaagaggttcagaggctgcaccaagagcagctgtcctctttgacacaggctcacgaggaggctctttccagtttgaccagcaaggctgagggcttggagaagtctctgagtagtctggaaaccagaagagcaggggaagccaaggagctggccgaggctcagagggaggccgagctgcttcggaagcagctgagcaagacccaggaagacttggaggctcaggtgaccctggttgagaatctaagaaaatatgttggggaacaagtcccttctgaggtccacagccagacatgggaactggagcgacagaagcttctggaaaccatgcagcacttgcaggaggaccgggacagcctgcatgccaccgcggagctgctgcaggtgcgggtgcagagcctcacacacatcctcgccctgcaggaggaggagctgaccaggaaggttcaaccttcagattccctggagcctgagtttaccaggaagtgccagtccctgctgaaccgctggcgggagaaggtgtttgccctcatggtgcagctaaaggcccaggagctggaacacagtgactctgttaagcagctgaagggacaggtggcctcactccaggaaaaagtgacatcccagagccaggagcaggccatcctgcagcgatccctgcaggacaaagccgcagaggtggaggtggagcgtatgggtgccaagggcctgcagttggagctgagccgtgctcaggaggccaggcgtcggtggcagcagcagacagcctcagccgaggagcagctgaggcttgtggtcaatgctgtcagcagctctcagatctggctcgagaccaccatggctaaggtggaaggggctgccgcccagcttcccagcctcaacaaccgactcagctatgctgtccgcaaggtccacaccattcggggcctgattgctcgaaagcttgcccttgctcagctgcgccaggagagctgtcccctaccaccaccggtcacagatgtgagccttgagttgcagcagctgcgggaagaacggaaccgcctggatgcagaactgcagctgagtgcccgcctcatccagcaggaggtgggccgggctcgggagcaaggggaggcagagcggcagcagctgagcaaggtggcccagcagctggagcaggagctgcagcagacccaggagtccctggctagcttggggctgcagctggaggtagcacgccagggccagcaggagagcacagaggaggctgccagtctgcggcaggagctgacccagcagcaggaactctacgggcaagccctgcaagaaaaggtggctgaagtggaaactcggctgcgggagcaactctcagacacagagaggaggctgaacgaggctcggagggagcatgccaaggccgtggtctccttgcgccagattcagcgcagagccgcccaggaaaaggagcggagccaggaactcaggcgtctgcaggaggaggcccggaaggaggaggggcagcgactggcccggcgcttgcaggagctagagagggataagaacctcatgctggccaccttgcagcaggaaggtctcctctcccgttacaagcagcagcgactgttgacagttcttccttccctactggataagaagaaatctgtggtgtccagccccaggcctccagagtgttcagcatctgcacctgtagcagcagcagtgcccaccagggagtccataaaagggtccctctctgtcctgctcgatgacctgcaggacctgagtgaagccatttccaaagaggaagctgtttgtcaaggagacaaccttgacagatgctccagctccaatccccagatgagcagctaagcagctgacagttggagggaaagccagcctgggggctgggaggatcctggagaagtgggtggggacagaccagcccttccccatcctggggttgccctgggggataccagctgagtctgaattctgctctaaataaagacgactacagaagga

SEQ ID NO: 434495 - DNA, 2550 bp, Homo sapiens
ggggtgtggccaaagcgcagtagggggctctcgcggttggggaacatagatggctgaagacagaatctagagccttcaaataatgtggagatgtttccaccttcaggttccactgggctgattcccccctcccactttcaagctcggcccctttcaactctgccaagaatggctcccacctggctctcagacattcccctggtccaacccccaggccatcaagatgtctcagagaggcggctagacacccagagacctcaagtgaccatgtgggaacgggatgtttccagtgacaggcaggagccagggcggagaggcaggtcctgggggctggaggggtcacaggccctgagccagcaggctgaggtgatcgttcggcagctgcaagagctgcggcggctggaggaggaggtccggctcctgcgggagacctcgctgcagcagaagatgaggctagaggcccaggccatggagctagaggctctggcacgggcggagaaggccggccgagctgaggctgagggcctgcgtgctgctttggctggggctgaggttgtccggaagaacttggaagaggggagccagcgggagctggaagaggttcagaggctgcaccaagagcagctgtcctctttgacacaggctcacgaggaggctctttccagtttgaccagcaaggctgagggcttggagaagtctctgagtagtctggaaaccagaagagcaggggaagccaaggagctggccgaggctcagagggaggccgagctgcttcggaagcagctgagcaagacccaggaagacttggaggctcaggtgaccctggttgagaatctaagaaaatatgttggggaacaagtcccttctgaggtccacagccagacatgggaactggagcgacagaagcttctggaaaccatgcagcacttgcaggaggaccgggacagcctgcatgccaccgcggagctgctgcaggtgcgggtgcagagcctcacacacatcctcgccctgcaggaggaggagctgaccaggaaggttcaaccttcagattccctggagcctgagtttaccaggaagtgccagtccctgctgaaccgctggcgggagaaggtgtttgccctcatggtgcagctaaaggcccaggagctggaacacagtgactctgttaagcagctgaagggacaggtggcctcactccaggaaaaagtgacatcccagagccaggagcaggccatcctgcagcgatccctgcaggacaaagccgcagaggtggaggtggagcgtatgggtgccaagggcctgcagttggagctgagccgtgctcaggaggccaggcgtcggtggcagcagcagacagcctcagccgaggagcagctgaggcttgtggtcaatgctgtcagcagctctcagatctggctcgagaccaccatggctaaggtggaaggggctgccgcccagcttcccagcctcaacaaccgactcagctatgctgtccgcaaggtccacaccattcggggcctgattgctcgaaagcttgcccttgctcagctgcgccaggagagctgtcccctaccaccaccggtcacagatgtgagccttgagttgcagcagctgcgggaagaacggaaccgcctggatgcagaactgcagctgagtgcccgcctcatccagcaggaggtgggccgggctcgggagcaaggggaggcagagcggcagcagctgagcaaggtggcccagcagctggagcaggagctgcagcagacccaggagtccctggctagcttggggctgcagctggaggtagcacgccagggccagcaggagagcacagaggaggctgccagtctgcggcaggagctgacccagcagcaggaactctacgggcaagccctgcaagaaaaggtggctgaagtggaaactcggctgcgggagcaactctcagacacagagaggaggctgaacgaggctcggagggagcatgccaaggccgtggtctccttgcgccagattcagcgcagagccgcccaggaaaaggagcggagccaggaactcaggcgtctgcaggaggaggcccggaaggaggaggggcagcgactggcccggcgcttgcaggagctagagagggataagaacctcatgctgcagcgactgttgacagttcttccttccctactggataagaagaaatctgtggtgtccagccccaggcctccagagtgttcagcatctgcacctgtagcagcagcagtgcccaccagggagtccataaaagggtccctctctgtcctgctcgatgacctgcaggacctgagtgaagccatttccaaagaggaagctgtttgtcaaggagacaaccttgacagatgctccagctccaatccccagatgagcagctaagcagctgacagttggagggaaagccagcctgggggctgggaggatcctggagaagtgggtggggacagaccagcccttccccatcctggggttgccctgggggataccagctgagtctgaattctgctctaaataaagacgactacagaagga

SEQ ID NO: 434496 - DNA, 2440 bp, Homo sapiens
ggggtgtggccaaagcgcagtagggggctctcgcggttggggaacatagatggctgaagacagaatctagagccttcaaataatgtggagatgtttccaccttcaggttccactgggctgattcccccctcccactttcaagctcggcccctttcaactctgccaagaatggctcccacctggctctcagacattcccctggtccaacccccaggccatcaagatgtctcagagaggcggctagacacccagagacctcaagtgaccatgtgggaacgggatgtttccagtgacaggcaggagccagggcggagaggcaggtcctgggggctggaggggtcacaggccctgagccagcaggctgaggtgatcgttcggcagctgcaagagctgcggcggctggaggaggaggtccggctcctgcgggagacctcgctgcagcagaagatgaggctagaggcccaggccatggagctagaggctctggcacgggcggagaaggccggccgagctgaggctgagggcctgcgtgctgctttggctggggctgaggttgtccggaagaacttggaagaggggagccagcgggagctggaagaggttcagaggctgcaccaagagcagctgtcctctttgacacaggctcacgaggaggctctttccagtttgaccagcaaggctgagggcttggagaagtctctgagtagtctggaaaccagaagagcaggggaagccaaggagctggccgaggctcagagggaggccgagctgcttcggaagcagctgagcaagacccaggaagacttggaggctcaggtgaccctggttgagaatctaagaaaatatgttggggaacaagtcccttctgaggtccacagccagacatgggaactggagcgacagaagcttctggaaaccatgcagcacttgcaggaggaccgggacagcctgcatgccaccgcggagctgctgcaggtgcgggtgcagagcctcacacacatcctcgccctgcaggaggaggagctgaccaggaaggttcaaccttcagattccctggagcctgagtttaccaggaagtgccagtccctgctgaaccgctggcgggagaaggtgtttgccctcatggtgcagctaaaggcccaggagctggaacacagtgactctgttaagcagctgaagggacaggtggcctcactccaggaaaaagtgacatcccagagccaggagcaggccatcctgcagcgatccctgcaggacaaagccgcagaggtggaggtggagcgtatgggtgccaagggcctgcagttggagctgagccgtgctcaggaggccaggcgtcggtggcagcagcagacagcctcagccgaggagcagctgaggcttgtggtcaatgctgtcagcagctctcagatctggctcgagaccaccatggctaaggtggaaggggctgccgcccagcttcccagcctcaacaaccgactcagctatgctgtccgcaaggtccacaccattcggggcctgattgctcgaaagcttgcccttgctcagctgcgccaggagagctgtcccctaccaccaccggtcacagatgtgagccttgagttgcagcagctgcgggaagaacggaaccgcctggatgcagaactgcagctgagtgcccgcctcatccagcaggaggtgggccgggctcgggagcaaggggaggcagagcggcagcagctgagcaaggtggcccagcagctggagcaggagctgcagcagacccaggagtccctggctagcttggggctgcagctggaggtagcacgccagggccagcaggagagcacagaggaggctgccagtctgcggcaggagctgacccagcagcaggaactctacgggcaagccctgcaagaaaaggtggctgaagtggaaactcggctgcgggagcaactctcagacacagagaggaggctgaacgaggctcggagggagcatgccaaggccggccaccttgcagcaggaaggtctcctctcccgttacaagcagcagcgactgttgacagttcttccttccctactggataagaagaaatctgtggtgtccagccccaggcctccagagtgttcagcatctgcacctgtagcagcagcagtgcccaccagggagtccataaaagggtccctctctgtcctgctcgatgacctgcaggacctgagtgaagccatttccaaagaggaagctgtttgtcaaggagacaaccttgacagatgctccagctccaatccccagatgagcagctaagcagctgacagttggagggaaagccagcctgggggctgggaggatcctggagaagtgggtggggacagaccagcccttccccatcctggggttgccctgggggataccagctgagtctgaattctgctctaaataaagacgactacagaagga

SEQ ID NO: 434497 - DNA, 2454 bp, Homo sapiens
ggggtgtggccaaagcgcagtagggggctctcgcggttggggaacatagatggctgaagacagaatctagagccttcaaataatgtggagatgtttccaccttcaggttccactgggctgattcccccctcccactttcaagctcggcccctttcaactctgccaagaatggctcccacctggctctcagacattcccctggtccaacccccaggccatcaagatgtctcagagaggcggctagacacccagagacctcaagtgaccatgtgggaacgggatgtttccagtgacaggcaggagccagggcggagaggcaggtcctgggggctggaggggtcacaggccctgagccagcaggctgaggtgatcgttcggcagctgcaagagctgcggcggctggaggaggaggtccggctcctgcgggagacctcgctgcagcagaagatgaggctagaggcccaggccatggagctagaggctctggcacgggcggagaaggccggccgagctgaggctgagggcctgcgtgctgctttggctggggctgaggttgtccggaagaacttggaagaggggagccagcgggagctggaagaggttcagaggctgcaccaagagcagctgtcctctttgacacaggctcacgaggaggctctttccagtttgaccagcaaggctgagggcttggagaagtctctgagtagtctggaaaccagaagagcaggggaagccaaggagctggccgaggctcagagggaggccgagctgcttcggaagcagctgagcaagacccaggaagacttggaggctcaggtgaccctggttgagaatctaagaaaatatgttggggaacaagtcccttctgaggtccacagccagacatgggaactggagcgacagaagcttctggaaaccatgcagcacttgcaggaggaccgggacagcctgcatgccaccgcggagctgctgcaggtgcgggtgcagagcctcacacacatcctcgccctgcaggaggaggagctgaccaggaaggttcaaccttcagattccctggagcctgagtttaccaggaagtgccagtccctgctgaaccgctggcgggagaaggtgtttgccctcatggtgcagctaaaggcccaggagctggaacacagtgactctgttaagcagctgaagggacaggtggcctcactccaggaaaaagtgacatcccagagccaggagcaggccatcctgcagcgatccctgcaggacaaagccgcagaggtggaggtggagcgtatgggtgccaagggcctgcagttggagctgagccgtgctcaggaggccaggcgtcggtggcagcagcagacagcctcagccgaggagcagctgaggcttgtggtcaatgctgtcagcagctctcagatctggctcgagaccaccatggctaaggtggaaggggctgccgcccagcttcccagcctcaacaaccgactcagctatgctgtccgcaaggtccacaccattcggggcctgattgctcgaaagcttgcccttgctcagctgcgccaggagagctgtcccctaccaccaccggtcacagatgtgagccttgagttgcagcagctgcgggaagaacggaaccgcctggatgcagaactgcagctgagtgcccgcctcatccagcaggaggtgggccgggctcgggagcaaggggaggcagagcggcagcagctgagcaaggtggcccagcagctggagcaggagctgcagcagacccaggagtccctggctagcttggggctgcagctggaggtagcacgccagggccagcaggagagcacagaggaggctgccagtctgcggcaggagctgacccagcagcaggaactctacgggcaagccctgcaagaaaaggtggctgaagtggaaactcggctgcgggagcaactctcagacacagagaggaggctgaacgaggctcggagggagcatgccaaggccgtggtctccttgcgccagattcagcgcagagccgcccaggaaaaggagcggagccaggaactcaggcgtctgcaggaggaggcccggaaggaggaggggcagcgactggcccggcgcttgcaggagctagagagggataagaacctcatgctggccaccttgcagcaggaaggtctcctctcccgttacaagcagcagcgactgttgacagttcttccttccctactggataagaagaaatctgtggtgtccagccccaggcctccagagtgttcagcatctgcacctgtagcagcagcaatgagcagctaagcagctgacagttggagggaaagccagcctgggggctgggaggatcctggagaagtgggtggggacagaccagcccttccccatcctggggttgccctgggggataccagctgagtctgaattctgctctaaataaagacgactacagaagga

SEQ ID NO: 434498 - DNA, 2514 bp, Homo sapiens
ggggtgtggccaaagcgcagtagggggctctcgcggttggggaacatagatggctgaagacagaatctagagccttcaaataatgtggagatgtttccaccttcaggttccactgggctgattcccccctcccactttcaagctcggcccctttcaactctgccaagaatggctcccacctggctctcagacattcccctggtccaacccccaggccatcaagatgtctcagagaggcggctagacacccagagacctcaagtgaccatgtgggaacgggatgtttccagtgacaggcaggagccagggcggagaggcaggtcctgggggctggaggggtcacaggccctgagccagcaggctgaggtgatcgttcggcagctgcaagagctgcggcggctggaggaggaggtccggctcctgcgggagacctcgctgcagcagaagatgaggctagaggcccaggccatggagctagaggctctggcacgggcggagaaggccggccgagctgaggctgagggcctgcgtgctgctttggctggggctgaggttgtccggaagaacttggaagaggggagccagcgggagctggaagaggttcagaggctgcaccaagagcagctgtcctctttgacacaggctcacgaggaggctctttccagtttgaccagcaaggctgagggcttggagaagtctctgagtagtctggaaaccagaagagcaggggaagccaaggagctggccgaggctcagagggaggccgagctgcttcggaagcagctgagcaagacccaggaagacttggaggctcaggtgaccctggttgagaatctaagaaaatatgttggggaacaagtcccttctgaggtccacagccagacatgggaactggagcgacagaagcttctggaaaccatgcagcacttgcaggaggaccgggacagcctgcatgccaccgcggagctgctgcaggtgcgggtgcagagcctcacacacatcctcgccctgcaggaggaggagctgaccaggaaggttcaaccttcagattccctggagcctgagtttaccaggaagtgccagtccctgctgaaccgctggcgggagaaggtgtttgccctcatggtgcagctaaaggcccaggagctggaacacagtgactctgttaagcagctgaagggacaggtggcctcactccaggaaaaagtgacatcccagagccaggagcaggccatcctgcagcgatccctgcaggacaaagccgcagaggtggaggtggagcgtatgggtgccaagggcctgcagttggagctgagccgtgctcaggaggccaggcgtcggtggcagcagcagacagcctcagccgaggagcagctgaggcttgtggtcaatgctgtcagcagctctcagatctggctcgagaccaccatggctaaggtggaaggggctgccgcccagcttcccagcctcaacaaccgactcagctatgctgtccgcaaggtccacaccattcggggcctgattgctcgaaagcttgcccttgctcagctgcgccaggagagctgtcccctaccaccaccggtcacagatgtgagccttgagttgcagcagctgcgggaagaacggaaccgcctggatgcagaactgcagctgagtgcccgcctcatccagcaggaggggaggcagagcggcagcagctgagcaaggtggcccagcagctggagcaggagctgcagcagacccaggagtccctggctagcttggggctgcagctggaggtagcacgccagggccagcaggagagcacagaggaggctgccagtctgcggcaggagctgacccagcagcaggaactctacgggcaaggtgtcgagagggaaatgggtgcttcccttggagggtggggtgggaactgcgaatcaaagctcctgctgatatgccccgtctgcactttcaccccagccctgcaagaaaaggtggctgaagtggaaactcggctgcgggagcaactctcagacacagagaggaggctgaacgaggctcggagggagcatgccaaggccggccaccttgcagcaggaaggtctcctctcccgttacaagcagcagcgactgttgacagttcttccttccctactggataagaagaaatctgtggtgtccagccccaggcctccagagtgttcagcatctgcacctgtagcagcagcagtgcccaccagggagtccataaaagggtccctctctgtcctgctcgatgacctgcaggacctgagtgaagccatttccaaagaggaagctgtttgtcaaggagacaaccttgacagatgctccagctccaatccccagatgagcagctaagcagctgacagttggagggaaagccagcctgggggctgggaggatcctggagaagtgggtggggacagaccagcccttccccatcctggggttgccctgggggataccagctgagtctgaattctgctctaaataaagacgactacagaagga

SEQ ID NO: 434499 - DNA, 801 bp, Homo sapiens
tgagaagtgggatctcactatattgcccaggctggacctgaactccttgaaatcctctcacctcagactcctgagtagctggaactctacgggcaagccctgcaagaaaaggtggctgaagtggaaactcggctgcgggagcaactctcagacacagagaggaggctgaacgaggctcggagggagcatgccaaggccgtggtctccttgcgccagattcagcgcagagccgcccaggaaaaggagcggagccaggaactcaggcgtctgcaggaggaggcccggaaggaggaggggcagcgactggcccggcgcttgcaggagctagagagggataagaacctcatgctggccaccttgcagcaggaaggtctcctctcccgttacaagcagcagcgactgttgacagttcttccttccctactggataagaagaaatctgtggtgtccagccccaggcctccagagtgttcagcatctgcacctgtagcagcagcagtgcccaccagggagtccataaaagggtccctctctgtcctgctcgatgacctgcaggacctgagtgaagccatttccaaagaggaagctgtttgtcaaggagacaaccttgacagatgctccagctccaatccccagatgagcagctaagcagctgacagttggagggaaagccagcctgggggctgggaggatcctggagaagtgggtggggacagaccagcccttccccatcctggggttgccctgggggataccagctgagtctgaattctgctctaaataaagacgactacagaagga

SEQ ID NO: 434500 - DNA, 1076 bp, Homo sapiens
aagggggtacaggggccaggtgaagggacagatgaagagatcagaacagccttagagctcacgggctaactgggtgaaggcttgctgagccatggagagaactctggagatggcgctcaagacccctgcactgtgtacctcctttctcacctctggccaggagcagcagggaccatagaaacttaaggaggagggggaacatagatggctgaagacagaatctagagccttcaaataatgtggagatgtttccaccttcaggttccactgggctgattcccccctcccactttcaagctcggcccctttcaactctgccaagaatggctcccacctggctctcagacattcccctggtccaacccccaggccatcaagatgtctcagagaggcggctagacacccagagacctcaagtgaccatgtgggaacgggatgtttccagtgacaggcaggagccagggcggagaggcaggtagggatccatccacgccgttttctcaggcttgcttgctagtgacccttcctcactggaataaactccttaccctatttcggccctagtttccagaacgtactcatttttatgtaagcaattagttcctacagtgcataaataataaagcagtgtgctaagtgctagggatgaggataacaatagtgaataagacaaatcctgacttaaatttgtaattaataaggaatctaaaatcctaagaggggagatagattgaccaccagctgatggtaaagcatggtatgaggcaagatgaagaagtgcaaactagaggtagagacccagcactgtggcagtgtgggttcattctgatggaagaaagcctttacagaggacatgctgtgggagctggccatgctgtcgtattatctgtaaacattcttattcttgtttcatgtgtcttttcccagatgtactgggatatcattctgccattttgctccagaataggattacattagaagaagcagcatgatgaagaaggaatactagactgggtgtcaggagacagagactctatttctagtttggctaccagctagaggacatttggcaagtc

SEQ ID NO: 434501 - DNA, 186 bp, Homo sapiens
aggggcagcgactggcccggcgcttgcaggagctagagagggataagaacctcatgctggtaggagacaggagggcagacaggcagacactagggcccatcctgggctggttcctgggctagaggtgtggaaagaggatggtgagggaggctctatccgggctaggtttaaccctctccttcccag

SEQ ID NO: 434502 - DNA, 345 bp, Homo sapiens
ccagaatcctgaaagtatgagtaaagcctcagagcccctctcagtctgtctctttcagtaaattctctccacttgatagttagttgcttgggttccatgaggaaccaggttgagacaagcaagtgaatttggggtatctcctactttggggaagtaggaaaagagctaagcatcgggtggacctggctataattcaaggattatgactttgttattgtaggggctttctctttggaaggtggcctgaaaattgaattggagtgtctttgtttctcctcttgtccaggggaacatagatggctgaagacagaatctagagccttcaaataatgtggagatgtttcc

SEQ ID NO: 434503 - DNA, 381 bp, Homo sapiens
cggctggaggaggaggtccggctcctgcgggagacctcgctgcagcagaagatgaggctagaggcccaggccatggagctagaggctctggcacgggcggagaaggccggccgagctgaggctgagggcctgcgtgctgctttggctggggctgaggttgtccggaagaacttggaagaggggagccagcgggagctggaagaggttcagaggctgcaccaagagcaggtgaatgcaggggtagaaaggattcaaattcataacggagagctgggcagtagcttccaagcaaagaacaggtattgcagaaaagaccctccatgagtagtgagtagtagagtgatgagacctttggtgaaaataaacacacatgggctagaa

SEQ ID NO: 434504 - DNA, 1113 bp, Homo sapiens
  misc_feature (12)..(12): n is a, c, g, or t
  misc_feature (30)..(30): n is a, c, g, or t
gaaatctcaatnctcttttaaaaattggtntggctaaacagccaaggtgcagtggtgcagtctgaatagtccccagtgactcaggaggctgaggtgggaggatcactcgaactcctgacctcacgtgatccacctgccttggccttccaaagtgctgggattacaggcgtgagccactttacctggcctatcacctagctttgataacagcattttgccaatcttgcatctatacttctccatttttctacctctacctccctggaatattttaaagcaagcccagtcctcatgggatttcactcctaaatacttaagaacgtattaatacactcagggaatcttttagaggtgaggatgggagagtataatataactacagtggtattgtcacatctataaaattaataattgtttaactttgcttctcaaggctcttttctcagaaatgtctttttatggtttctttttttctaatcaacacccaaacaggtttcacatattccatttggttatttctctcttaaatccttaattaaaatagtttccaaaccctgtagtattttttgagggccaaatgagatatatttgtaggcttccaaagtgtttatacaaacataagttgtttggtcataggagagaaataacctttctaaaaatatatcagcattgcagtttagtgttaataacattaaagagaaatgagagaatgtagagatgcctgagtgatggagaaaaaagcaggaataatttggcattaaactaaggctgagatgtattaaaattgagccagtgtggagaagctggcctaggaccttctctgtagcatttatagccaagcaattaacctatatacccacccttgggtaataggttctcctctcttatagtacgtgccacacttccaagtgtagactgatgataatgaagacattggaataatgccctttgagagttttgccttagattgggaaatgcaggtctcaagattctcagacaaaatattttcttctagggaagagtacattttaatgttgtttccctgcccaaaaagataatgatatatataaatcatgggtatggattacaaaacgataatgtattcctacagta

SEQ ID NO: 434505 - DNA, 3870 bp, Homo sapiens
gctgagctgccggggcgaggttgggatcacctggcaccggctgaagggagcctgtgatttttttgtagcgggggcggggagtaaggtgcaagactgcgccagattcaaggacgagggctgcccgattatctcgctgcataaggcaagagcaagaggatcctcaggattttaaagaggaggcgacggctgcaggttcccaggatctgtcagaggctggggagttacagcttccattctggggcgacggggaccccgggggggtagcccttttgtaatccccaggccccggacaaagagcccagaggccgggcaccatggcgtccatcctggatgagtacgagaactcgctgtcccgctcggccgtcttgcagcccggctgccctagcgtgggcatcccccactcggggtatgtgaatgcccagctggagaaggaagtgcccatcttcacaaagcagcgcattgacttcaccccttccgagcgcattaccagtcttgtcgtctccagcaatcagctgtgcatgagcctgggcaaggatacactgctccgcattgacttgggcaaggcaaatgagcccaaccacgtggagctgggacgtaaggatgacgcaaaagttcacaagatgttccttgaccatactggctctcacctgctgattgccctgagcagcacggaggtcctctacgtgaaccgaaatggacagaaggtacggccactagcacgctggaaggggcagctggtggagagtgtgggttggaacaaggcactgggcacggagagcagcacaggccccatcctggtcgggactgcccaaggccacatctttgaagcagagctctcagccagcgaaggtgggcttttcggccctgctccggatctctacttccgcccattgtacgtgctaaatgaagaagggggtccagcacctgtgtgctcccttgaggccgagcggggccctgatgggcgtagctttgttattgccaccactcggcagcgcctcttccagttcataggccgagcagcagagggggctgaggcccagggtttctcagggctctttgcagcttacacggaccacccacccccattccgtgagtttcccagcaacctgggctacagtgagttggccttctacacccccaagctgcgctccgcaccccgggccttcgcctggatgatgggggatggtgtgttgtatggggcattggactgtgggcgccctgactctctgctgagcgaggagcgagtctgggagtacccagagggggtagggcctggggccagcccacccctagccatcgtcttgacccagttccacttcctgctgctactggcagaccgggtggaggcagtgtgcacactgaccgggcaggtggtgctgcgggatcacttcctggagaaatttgggccgctgaagcacatggtgaaggactcctccacaggccagctgtgggcctacactgagcgggctgtcttccgctaccacgtgcaacgggaggcccgagatgtctggcgcacctatctggacatgaaccgcttcgatctggccaaagagtattgtcgagagcggcccgactgcctggacacggtcctggcccgggaggccgatttctgctttcgccagcgtcgctacctggagagcgcacgctgctatgccctgacccagagctactttgaggagattgccctcaagttcctggaggcccgacaggaggaggctctggctgagttcctgcagcgaaaactggccagtttgaagccagccgaacgtacccaggccacactgctgaccacctggctgacagagctctacctgagccggcttggggctctgcagggcgacccagaggccctgactctctaccgagaaaccaaggaatgctttcgaaccttcctcagcagcccccgccacaaagagtggctctttgccagccgggcctctatccatgagctgctcgccagtcatggggacacagaacacatggtgtactttgcagtgatcatgcaggactatgagcgggtggtggcttaccactgtcagcacgaggcctacgaggaggccctggccgtgctcgcccgccaccgtgacccccagctcttctacaagttctcacccatcctcatccgtcacatcccccgccagcttgtagatgcctggattgagatgggcagccggctggatgctcgtcagctcattcctgccctggtgaactacagccagggtggtgaggtccagcaggtgagccaggccatccgctacatggagttctgcgtgaacgtgctgggggagactgagcaggccatccacaactacctgctgtcactgtatgcccgtggccggccggactcactactggcctatctggagcaggctggggccagcccccaccgggtgcattacgacctcaagtatgcgctgcggctctgcgccgagcatggccaccaccgcgcttgtgtccatgtctacaaggtcctagagctgtatgaggaggccgtggacctggccctgcaggtggatgtggacctggccaagcagtgtgcagacctgcctgaggaggatgaggaattgcgcaagaagctgtggctgaagatcgcacggcacgtggtgcaggaagaggaagatgtacagacagccatggcttgcctggctagctgccccttgctcaagattgaggatgtgctgcccttctttcctgatttcgtcaccatcgaccacttcaaggaggcgatctgcagctcacttaaggcctacaaccaccacatccaggagctgcagcgggagatggaagaggctacagccagtgcccagcgcatccggcgagacctgcaggagctgcggggccgctacggcactgtggagccccaggacaaatgtgccacctgcgacttccccctgctcaaccgccctttttacctcttcctctgtggccatatgttccatgctgactgcctgctgcaggctgtgcgacctggcctgccagcctacaagcaggcccggctggaggagctgcagaggaagctgggggctgctccacccccagccaagggctctgcccgggccaaggaggccgagggtggggctgccacggcagggcccagccgggaacagctcaaggctgacctggatgagttggtggccgctgagtgtgtgtactgtggggagctgatgatccgctctatcgaccggccgttcatcgacccccagcgctacgaggaggagcagctcagttggctgtaggagggtgtcacctttgatggggggtgggcaatggggagcagtggcttgaacccacttgagaaggctgcctcctaggctctgctcagtcatcttgcaattgccacactgtgaccacgttgacgggagtagagtagcgctgttggccaggaggtgtcaggtgtgagtgtattctgccagcttttcatgctgttcttcagagctgcagttatgccagaccatcagcctgcctcccagtagaggcccttcacctggagaagtcagaaatctgacccaattccaccccctgcctctagcacctcttctgtccctgtcattccccacacacgtcctgttcacctcgagagagagagagagagagcacctttcttccgtctgttcactctgcggcctctggaatcccagctcttctctctcagaagaagccttctcttcctcctgcctgtaggtgtcccagaagtgagaaggcagccttcgaagtcctgggcattgggtgagaaagtgatgctagttggggcatgcttttgtgcacactctctggggctccagtgtgaagggtgccctggggctgagggccttgtggaggatggtcggtggtggtgatggaggtggagagcattaaactgtctgcactgca

SEQ ID NO: 434506 - DNA, 798 bp, Homo sapiens
gctgagctgccggggcgaggttgggatcacctggcaccggctgaagggagcctgtgatttttttgtagcgggggcggggagtaaggtgcaagactgcgccagattcaaggacgagggctgcccgattatctcgctgcataaggcaagagcaagaggatcctcaggattttaaagaggaggcgacggctgcaggttcccaggatctgtcagaggctggggagttacagcttccattctggggcgacggggaccccgggggggtagcccttttgtaatccccaggccccggacaaagagcccagaggccgggcaccatggcgtccatcctggatgagtacgagaactcgctgtcccgctcggccgtcttgcagcccggctgccctagcgtgggcatcccccactcgggtaaggaagaggagggtgccgctgcccctttcggctctcctagcatttgcgtgggagcagcgaggagggcagctccaagagctcggggtcatcccctgggccgtgccttccgggtctaggcccctgattctcctcaggctctcttggcccccagctggtggatagtcgaagtttgaaagagcaacgggagctgccgcgtgatctaggctctaccgctagggtccttttgagagggaattggggcccagataaggaattactcacctacagggcgcagttgggctgttgggagaacttagaatgggctcccggcttctgctgatgcttttcccaccaggccccttctggaggtgggagggaaggaatggacaaagaaagtggtgaaggcggaga

SEQ ID NO: 434507 - DNA, 3838 bp, Homo sapiens
gctgagctgccggggcgaggttgggatcacctggcaccggctgaagggagcctgtgatttttttgtagcgggggcggggagtaaggtgcaagactgcgccagattcaaggacgagggctgcccgattatctcgctgcataaggcaagagcaagaggatcctcaggattttaaagaggaggcgacggctgcaggttcccaggatctgtcagaggctggggagttacagcttccattctggggcgacggggaccccgggggggtagcccttttgtaatccccaggccccggacaaagagcccagaggccgggcaccatggcgtccatcctggatgagtacgagaactcgctgtcccgctcggccgtcttgcagcccggctgccctagcgtgggcatcccccactcggggtatgtgaatgcccagctggagaaggaagtgcccatcttcacaaagcagcgcattgacttcaccccttccgagcgcattaccagtcttgtcgtctccagcaatcagctgtgcatgagcctgggcaaggatacactgctccgcattgacttgggcaaggcaaatgagcccaaccacgtggagctgggacgtaaggatgacgcaaaagttcacaagatgttccttgaccatactggctctcacctgctgattgccctgagcagcacggaggtcctctacgtgaaccgaaatggacagaaggtacggccactagcacgctggaaggggcagctggtggagagtgtgggttggaacaaggcactgggcacggagagcagcacaggccccatcctggtcgggactgcccaaggccacatctttgaagcagagctctcagccagcgaaggtgggcttttcggccctgctccggatctctacttccgcccattgtacgtgctaaatgaagaagggggtccagcacctgtgtgctcccttgaggccgagcggggccctgatgggcgtagctttgttattgccaccactcggcagcgcctcttccagttcataggccgagcagcagagggggctgaggcccagggtttctcagggctctttgcagcttacacggaccacccacccccattccgtgagtttcccagcaacctgggctacagtgagttggccttctacacccccaagctgcgctccgcaccccgggccttcgcctggatgatgggggatggtgtgttgtatggggcattggactgtgggcgccctgactctctgctgagcgaggagcgagtctgggagtacccagagggggtagggcctggggccagcccacccctagccatcgtcttgacccagttccacttcctgctgctactggcagaccgggtggaggcagtgtgcacactgaccgggcaggtggtgctgcgggatcacttcctggagaaatttgggccgctgaagcacatggtgaaggactcctccacaggccagctgtgggcctacactgagcgggctgtcttccgctaccacgtgcaacgggaggcccgagatgtctggcgcacctatctggacatgaaccgcttcgatctggccaaagagtattgtcgagagcggcccgactgcctggacacggtcctggcccgggaggccgatttctgctttcgccagcgtcgctacctggagagcgcacgctgctatgccctgacccagagctactttgaggagattgccctcaagttcctggaggcccgacaggatggccagtttgaagccagccgaacgtacccaggccacactgctgaccacctggctgacagagctctacctgagccggcttggggctctgcagggcgacccagaggccctgactctctaccgagaaaccaaggaatgctttcgaaccttcctcagcagcccccgccacaaagagtggctctttgccagccgggcctctatccatgagctgctcgccagtcatggggacacagaacacatggtgtactttgcagtgatcatgcaggactatgagcgggtggtggcttaccactgtcagcacgaggcctacgaggaggccctggccgtgctcgcccgccaccgtgacccccagctcttctacaagttctcacccatcctcatccgtcacatcccccgccagcttgtagatgcctggattgagatgggcagccggctggatgctcgtcagctcattcctgccctggtgaactacagccagggtggtgaggtccagcaggtgagccaggccatccgctacatggagttctgcgtgaacgtgctgggggagactgagcaggccatccacaactacctgctgtcactgtatgcccgtggccggccggactcactactggcctatctggagcaggctggggccagcccccaccgggtgcattacgacctcaagtatgcgctgcggctctgcgccgagcatggccaccaccgcgcttgtgtccatgtctacaaggtcctagagctgtatgaggaggccgtggacctggccctgcaggtggatgtggacctggccaagcagtgtgcagacctgcctgaggaggatgaggaattgcgcaagaagctgtggctgaagatcgcacggcacgtggtgcaggaagaggaagatgtacagacagccatggcttgcctggctagctgccccttgctcaagattgaggatgtgctgcccttctttcctgatttcgtcaccatcgaccacttcaaggaggcgatctgcagctcacttaaggcctacaaccaccacatccaggagctgcagcgggagatggaagaggctacagccagtgcccagcgcatccggcgagacctgcaggagctgcggggccgctacggcactgtggagccccaggacaaatgtgccacctgcgacttccccctgctcaaccgccctttttacctcttcctctgtggccatatgttccatgctgactgcctgctgcaggctgtgcgacctggcctgccagcctacaagcaggcccggctggaggagctgcagaggaagctgggggctgctccacccccagccaagggctctgcccgggccaaggaggccgagggtggggctgccacggcagggcccagccgggaacagctcaaggctgacctggatgagttggtggccgctgagtgtgtgtactgtggggagctgatgatccgctctatcgaccggccgttcatcgacccccagcgctacgaggaggagcagctcagttggctgtaggagggtgtcacctttgatggggggtgggcaatggggagcagtggcttgaacccacttgagaaggctgcctcctaggctctgctcagtcatcttgcaattgccacactgtgaccacgttgacgggagtagagtagcgctgttggccaggaggtgtcaggtgtgagtgtattctgccagcttttcatgctgttcttcagagctgcagttatgccagaccatcagcctgcctcccagtagaggcccttcacctggagaagtcagaaatctgacccaattccaccccctgcctctagcacctcttctgtccctgtcattccccacacacgtcctgttcacctcgagagagagagagagagagcacctttcttccgtctgttcactctgcggcctctggaatcccagctcttctctctcagaagaagccttctcttcctcctgcctgtaggtgtcccagaagtgagaaggcagccttcgaagtcctgggcattgggtgagaaagtgatgctagttggggcatgcttttgtgcacactctctggggctccagtgtgaagggtgccctggggctgagggccttgtggaggatggtcggtggtggtgatggaggtggagagcattaaactgtctgcactgca

SEQ ID NO: 434508 - DNA, 1999 bp, Homo sapiens
gctgagctgccggggcgaggttgggatcacctggcaccggctgaagggagcctgtgatttttttgtagcgggggcggggagtaaggtgcaagactgcgccagattcaaggacgagggctgcccgattatctcgctgcataaggcaagagcaagaggatcctcaggattttaaagaggaggcgacggctgcaggttcccaggatctgtcagaggctggggagttacagcttccattctggggcgacggggaccccgggggggtagcccttttgtaatccccaggccccggacaaagagcccagaggccgggcaccatggcgtccatcctggatgagtacgagaactcgctgtcccgctcggccgtcttgcagcccggctgccctagcgtgggcatcccccactcggggtatgtgaatgcccagctggagaaggaagtgcccatcttcacaaagcagcgcattgacttcaccccttccgagcgcattaccagtcttgtcgtctccagcaatcagctgtgcatgagcctgggcaaggatacactgctccgcattgacttgggcaaggcaaatgagcccaaccacgtggagctgggacgtaaggatgacgcaaaagttcacaagatgttccttgaccatactggtggatgtggacctggccaagcagtgtgcagacctgcctgaggaggatgaggaattgcgcaagaagctgtggctgaagatcgcacggcacgtggtgcaggaagaggaagatgtacagacagccatggcttgcctggctagctgccccttgctcaagattgaggatgtgctgcccttctttcctgatttcgtcaccatcgaccacttcaaggaggcgatctgcagctcacttaaggcctacaaccaccacatccaggagctgcagcgggagatggaagaggctacagccagtgcccagcgcatccggcgagacctgcaggagctgcggggccgctacggcactgtggagccccaggacaaatgtgccacctgcgacttccccctgctcaaccgccctttttacctcttcctctgtggccatatgttccatgctgactgcctgctgcaggctgtgcgacctggcctgccagcctacaagcaggcccggctggaggagctgcagaggaagctgggggctgctccacccccagccaagggctctgcccgggccaaggaggccgagggtggggctgccacggcagggcccagccgggaacagctcaaggctgacctggatgagttggtggccgctgagtgtgtgtactgtggggagctgatgatccgctctatcgaccggccgttcatcgacccccagcgctacgaggaggagcagctcagttggctgtaggagggtgtcacctttgatggggggtgggcaatggggagcagtggcttgaacccacttgagaaggctgcctcctaggctctgctcagtcatcttgcaattgccacactgtgaccacgttgacgggagtagagtagcgctgttggccaggaggtgtcaggtgtgagtgtattctgccagcttttcatgctgttcttcagagctgcagttatgccagaccatcagcctgcctcccagtagaggcccttcacctggagaagtcagaaatctgacccaattccaccccctgcctctagcacctcttctgtccctgtcattccccacacacgtcctgttcacctcgagagagagagagagagagcacctttcttccgtctgttcactctgcggcctctggaatcccagctcttctctctcagaagaagccttctcttcctcctgcctgtaggtgtcccagaagtgagaaggcagccttcgaagtcctgggcattgggtgagaaagtgatgctagttggggcatgcttttgtgcacactctctggggctccagtgtgaagggtgccctggggctgagggccttgtggaggatggtcggtggtggtgatggaggtggagagcattaaactgtctgcactgca

SEQ ID NO: 434509 - DNA, 3761 bp, Homo sapiens
gctgagctgccggggcgaggttgggatcacctggcaccggctgaagggagcctgtgatttttttgtagcgggggcggggagtaaggtgcaagactgcgccagattcaaggacgagggctgcccgattatctcgctgcataaggcaagagcaagaggatcctcaggattttaaagaggaggcgacggctgcaggttcccaggatctgtcagaggctggggagttacagcttccattctggggcgacggggaccccgggggggtagcccttttgtaatccccaggccccggacaaagagcccagaggccgggcaccatggcgtccatcctggatgagtacgagaactcgctgtcccgctcggccgtcttgcagcccggctgccctagcgtgggcatcccccactcggggtatgtgaatgcccagctggagaaggaagtgcccatcttcacaaagcagcgcattgacttcaccccttccgagcgcattaccagtcttgtcgtctccagcaatcagctgtgcatgagcctgggcaaggatacactgctccgcattgacttgggcaaggcaaatgagcccaaccacgtggagctgggacgtaaggatgacgcaaaagttcacaagatgttccttgaccatactggctctcacctgctgattgccctgagcagcacggaggtcctctacgtgaaccgaaatggacagaaggtacggccactagcacgctggaaggggcagctggtggagagtgtgggttggaacaaggcactgggcacggagagcagcacaggccccatcctggtcgggactgcccaaggccacatctttgaagcagagctctcagccagcgaaggtgggcttttcggccctgctccggatctctacttccgcccattgtacgtgctaaatgaagaagggggtccagcacctgtgtgctcccttgaggccgagcggggccctgatgggcgtagctttgttattgccaccactcggcagcgcctcttccagttcataggccgagcagcagagggggctgaggcccagggtttctcagggctctttgcagcttacacggaccacccacccccattccgtgagtttcccagcaacctgggctacagtgagttggccttctacacccccaagctgcgctccgcaccccgggccttcgcctggatgatgggggatggtgtgttgtatggggcattggactgtgggcgccctgactctctgctgagcgaggagcgagtctgggagtacccagagggggtagggcctggggccagcccacccctagccatcgtcttgacccagttccacttcctgctgctactggcagaccgggtggaggcagtgtgcacactgaccgggcaggtggtgctgcgggatcacttcctggagaaatttgggccgctgaagcacatggtgaaggactcctccacaggccagctgtgggcctacactgagcgggctgtcttccgctaccacgtgcaacgggaggcccgagatgtctggcgcacctatctggacatgaaccgcttcgatctggccaaagagtattgtcgagagcggcccgactgcctggacacggtcctggcccgggaggccgatttctgctttcgccagcgtcgctacctggagagcgcacgctgctatgccctgacccagagctactttgaggagattgccctcaagttcctggaggcccgacaggaggaggctctggctgagttcctgcagcgaaaactggccagtttgaagccagccgaacgtacccaggccacactgctgaccacctggctgacagagctctacctgagccggcttggggctctgcagggcgacccagaggccctgactctctaccgagaaaccaaggaatgctttcgaaccttcctcagcagcccccgccacaaagagtggctctttgccagccgggcctctatccatgagctgctcgccagtcatggggacacagaacacatggtgtactttgcagtgatcatgcaggactatgagcgggtggtggcttaccactgtcagcacgaggcctacgaggaggccctggccgtgctcgcccgccaccgtgacccccagctcttctacaagttctcacccatcctcatccgtcacatcccccgccagcttgtagatgcctggattgagatgggcagccggctggatgctcgtcagctcattcctgccctggtgaactacagccagggtggtgaggtccagcaggtgagccaggccatccgctacatggagttctgcgtgaacgtgctgggggagactgagcaggccatccacaactacctgctgtcactgtatgcccgtggccggccggactcactactggcctatctggagcaggctggggccagcccccaccgggtgcattacgacctcaagtatgcgctgcggctctgcgccgagcatggccaccaccgcgcttgtgtccatgtctacaaggtcctagagctgtatgaggaggccgtggacctggccctgcaggtggatgtggacctggccaagcagtgtgcagacctgcctgaggaggatgaggaattgcgcaagaagctgtggctgaagatcgcacggcacgtggtgcaggaagaggaagatgtacagacagccatggcttgcctggctagctgccccttgctcaagattgaggatgtgctgcccttctttcctgatttcgtcaccatcgaccacttcaaggaggcgatctgcagctcacttaaggcctacaaccaccacatccaggagctgcagcgggagatggaagaggctacagccagtgcccagcgcatccggcgagacctgcaggagctgcggggccgctacggcactgtggagccccaggacaaatgtgccacctgcgacttccccctgctcaaccgccctttttacctcttcctctgtggccatatgttccatgctgactgcctgctgcaggctgtgcgacctggcctgccagcctacaagcaggcccggctggaggagctgcagaggaagctgggggctgctccacccccagccaagggctctgcccgggccaaggaggccgagggtggggctgccacggcagggcccagccgggaacagctcaaggctgacctggatgagttggtggccgctgagtgtgtgtactgtggggagctgatgatccgctctatcgaccggccgttcatcgacccccagcgctacgaggaggagcagctcagttggctgtaggagggtgtcacctttgatggggggtgggcaatggggagcagtggcttgaacccacttgagaaggctgcctcctaggctctgctcagtcatcttgcaattgccacactgtgaccacgttgacgggagtagagtagcgctgttggccaggaggtgtcaggtgtgagtgtattctgccagcttttcatgctgttcttcagagctgcagttatgccagaccatcagcctgcctcccagtagaggcccttcacctggagaagtcagaaatctgacccaattccaccccctgcctctagcacctcttctgtccctgtcattccccacacacgtcctgttcacctcgagagagagagagagagagcacctttcttccgtctgttcactctgcggcctctggaatcccagctcttctctctcagaagaagccttctcttctccagtgtgaagggtgccctggggctgagggccttgtggaggatggtcggtggtggtgatggaggtggagagcattaaactgtctgcactgca

SEQ ID NO: 434510 - DNA, 2081 bp, Homo sapiens
gctgagctgccggggcgaggttgggatcacctggcaccggctgaagggagcctgtgatttttttgtagcgggggcggggagtaaggtgcaagactgcgccagattcaaggacgagggctgcccgattatctcgctgcataaggcaagagcaagaggatcctcaggattttaaagaggaggcgacggctgcaggttcccaggatctgtcagaggctggggagttacagcttccattctggggcgacggggaccccgggggggtagcccttttgtaatccccaggccccggacaaagagcccagaggccgggcaccatggcgtccatcctggatgagtacgagaactcgctgtcccgctcggccgtcttgcagcccggctgccctagcgtgggcatcccccactcggggtatgtgaatgcccagctggagaaggaagtgcccatcttcacaaagcagcgcattgacttcaccccttccgagcgcattaccagtcttgtcgtctccagcaatcagctgtgcatgagcctgggcaaggatacactgctccgcattgacttgggcaaggcaaatgagcccaaccacgtggagctgggacgtaaggatgacgcaaaagttcacaagatgttccttgaccatactggctctcacctgctgattgccctgagcagcacggaggtcctctacgtgaaccgaaatggacagaaggtacggccactagcacgctggaaggggcagctggtggagagtgtgggttggaacaaggcactgggcacggagagcagcacaggccccatcctggtcgggactgcccaaggccacatctttgaagcagagctctcagccagcgaaggtgggcttttcggccctgctccggatctctacttccgcccattgtacgtgctaaatgaagaagggggtccagcacctgtgtgctcccttgaggccgagcggggccctgatgggcgtagctttgttattgccaccactcggcagcgcctcttccagttcataggccgagcagcagagggggctgaggcccagggtttctcagggctctttgcagcttacacggaccacccacccccattccgtgagtttcccagcaacctgggctacagtgagttggccttctacacccccaagctgcgctccgcaccccgggccttcgcctggatgatgggggatggtgtgttgtatggggcattggactgtgggcgccctgactctctgctgagcgaggagcgagtctgggagtacccagagggggtagggcctggggccagcccacccctagccatcgtcttgacccagttccacttcctgctgctactggcagaccgggtggaggcagtgtgcacactgaccgggcaggtggtgctgcgggatcacttcctggagaaatttgggccgctgaagcacatggtgaaggactcctccacaggccagctgtgggcctacactgagcgggctgtcttccgctaccacgtgcaacgggaggcccgagatgtctggcgcacctatctggacatgaaccgcttcgatctggccaaagagtattgtcgagagcggcccgactgcctggacacggtcctggcccgggaggccgatttctgctttcgccagcgtcgctacctggagagcgcacgctgctatgccctgacccagagctactttgaggagattgccctcaagttcctggaggcccgacaggaggaggctctggctgagttcctgcagcgaaaactggccagtttgaagccagccgaacgtacccaggccacactgctgaccacctggctgacagagctctacctgagccggcttggggctctgcagggcgacccagaggccctgactctctcagaagaagccttctcttcctcctgcctgtaggtgtcccagaagtgagaaggcagccttcgaagtcctgggcattgggtgagaaagtgatgctagttggggcatgcttttgtgcacactctctggggctccagtgtgaagggtgccctggggctgagggccttgtggaggatggtcggtggtggtgatggaggtggagagcattaaactgtctgcactgca

SEQ ID NO: 434511 - DNA, 1155 bp, Homo sapiens
caacaaacaatacagagaatttttaatgagacatgtcaggcatcgtggaaggctcttgcctgggtcacttatgtgatgacctcaacaaacccattttattatacaatgaaaaaagtgtacgaagcttacatatgatttttttttaagtttcttcctgccagagcatggattaaagaaactttagtaaagagtaaaaaattttaaaacacacagtttgatatgaattttggtaaaagttatcagagacaaatactagtgggccaacgaaaacactgtatttataggaaaatttgaattggggcaataaatatgtcctgaggctttggtggcatcaaagtattggtgctttattttttgtgatttattgttttatcaacagaagtgagcacttgtgttcagaaaaggataattcacacttaaatcttgtttttatttaatcaagcttaaataacaggttagagtggtagcaaaaaaaaaaaaaaaaagtctaatatttagtttgaatcttaaattggtcacccagagctgctctctctaggagcgaacctctctatttgtcaataaacaagagagagatacaggctcccagataacaggcatttggtaaactggcgacagtcatacaagcgagaatgttaaaatgacttcagctctttctagcttcattatgtcagcctggcagatcacatatggcattatggaaatcagcaaatgaaaaccatattgatcagcattgagaacaaatgtaaaaaaggtggtctcagggaggagcagagaagaagaatgctttcctgttcaacctgataggcccttgttaaggccttttaatcatttattaacataaccctccttcttccctctccactcagattacctcagccacagagcatcctgctccatttatcttttaatgcttcctttatttaatttatttttaagctctaagttatactcttatttcagaattgagttttacttttcatggtattgtttaaagtgacttaaatgacttttcccaacaagctcaccaggcattcaaaggaagaaaagcatttgctgagattcacctatcagcaaataatttactcggtatgcaccacaaacaaacgcagagagacagagaaagacagtcagccagacacattaaaaaaaaaa

SEQ ID NO: 434512 - DNA, 1303 bp, Homo sapiens
aacggttgttgtagtccggccccctcctggctggtccagccacattaaccggcaggatgtcggaggtgcggctgccaccgctacgcgccctggacgactttgttctggggtcggcgcgtctggcggctccggatccatgcgacccgcagcgatggtgccaccgcgtcatcaacaacctcctctactaccaaaccaactaccttctctgcttcggcatcggcctcgctctcgccgggtacgtgcggccacttcatacgctcctgagcgcgctggtagtggcggtggccctcggcgtgctggtgtgggcagctgagacccgcgcagctgtgcgccgctgccgccgcagccaccctgcagcctgcctggccgcagtgcttgccgtcggcctcctggtgctctgggtcgcgggcggcgcttgcaccttcctgttcagcatcgccgggccggtgcttctgatcctggtgcacgcctcgttgcgcctgcgcaaccttaagaacaagattgagaacaagatcgagagcattggtctcaagcggacgccaatgggcctgctactagaggcactgggacaagagcaggaggctggatcctaggcccctgggatctgtacccaggacctggagaataccaccccacccccagcccataattgggacccagagccctttcccagcacttaaaacaggagcctagagccccctgcccaaacaaaacaggacatctgtgaccgccctacccccacgccagccccaaactaagatatccctcacacccagcccccattacctagggacaagagtcttccccagccttgaacctaggaccaagagccacctacatccagccccaaaactggggcttcaggccagagcatccatggccaatttcaaattgtgaacccagagacactcccatccacccttctccatgctcatccccaaactggggcctggagcaaggcactctcaaatcttgaaccctggaccaaagcttttccagaccccaccctaccttccaacccaggtcaagacattgccaaatcttgaactcagaacccaagtgttccatgcccctgtgtggatggagtcgggtatcctgactgttggacccctggtccaggtgatcccgaccctcaccagtcccatttgcctccctccagctctgcttaggcattttgcccctcaccccaatgttccacaccatcgacaaccaaggggtgaggtggggacaggcctcagcagggaatggggcgtatatgttagtgttgctgcaacaataaagcctgttgcatctctcatgccaa

SEQ ID NO: 434513 - DNA, 476 bp, Homo sapiens
cgccaattgaattataatacggatacataataggggatattggggaccgggcccccccttcaattttgtagccaaaagacactcccatccacccttctccatgctcatccccaaactggggcctggagcaaggcactctcaaatcttgaaccctggaccaaagcttttccagaccccaccctaccttccaacccaggtcaagacattgccaaatcttgaactcagaacccaagtgttccatgcccctgtgtggatggagtcgggtatcctgactgttggacccctggtccaggtgatcccgaccctcaccagtcccatttgcctccctccagctctgcttaggcattttgcccctcaccccaatgttccacaccatcgacaaccaaggggtgaggtggggacaggcctcagcagggaatggggcgtatatgttagtgttgctgcaacaataaagcctgttgcatctctcatgccaa

SEQ ID NO: 434514 - DNA, 1447 bp, Homo sapiens
  misc_feature (1319)..(1319): n is a, c, g, or t
  misc_feature (1323)..(1323): n is a, c, g, or t
aacggttgttgtagtccggccccctcctggctggtccagccacattaaccggcaggatgtcggaggtgcggctgccaccgctacgcgccctggacgactttgttctggggtcggcgcgtctggcggctccggatccatgcgacccgcagcgatggtgccaccgcgtcatcaacaacctcctctactaccaaaccaactaccttctctgcttcggcatcggcctcgctctcgccgggtacgtgcggccacttcatacgctcctgagcgcgctggtagtggcggtggccctcggcgtgctggtgtgggcagctgagacccgcgcagctgtgcgccgctgccgccgcagccaccctgcagcctgcctggccgcagtgcttgccgtcggcctcctggtgctctgggtcgcgggcggcgcttgcaccttcctgttcagcatcgccgggccggtgcttctgatcctggtgcacgcctcgttgcgcctgcgcaaccttaagaacaagattgagaacaagatcgagagcattggtctcaagcggacgccaatgggcctgctactagaggcactgggacaagagcaggaggctggatcctaggcccctgggatctgtacccaggacctggagaataccaccccacccccagcccataattgggacccagagccctttcccagcacttaaaacaggagcctagagccccctgcccaaacaaaacaggacatctgtgaccgccctacccccacgccagccccaaactaagatatccctcacacccagcccccattacctagggacaagagtcttccccagccttgaacctaggaccaagagccacctacatccagccccaaaactggggcttcaggccagagcatccatggccaatttcaaattgtgaacccagagacactcccatccacccttctccatgctcatccccaaactggggcctggagcaaggcactctcaaatcttgaaccctggaccaaagcttttccagaccccaccctaccttccaacccaggtcaagacattgccaaatcttgaactcagaacccaagtgttccatgcccctgtgtggatggagtcgggtatcctgactgttggacccctggtccaggtgatcccgaccctcaccagtcccatttgcctccctccagctctgcttaggcattttgcccctcaccccaatgttccacaccatcgacaaccaaggggtgaggtggggacaggcctcagcagggaatggggcgtatatgttagtgttgctgcaacaataaagcctgttgcatctctcatgccaaaaaaaaaaacaaagancaanaaacacaagcaacaaaaaccaaaactccacaaaccataccacaaaccacggcccgcgcgcgcggaccgcacctcgccccgccaacgcgggcgcacccgtcaccgctgcacgacccccacacccg

SEQ ID NO: 434515 - DNA, 1809 bp, Homo sapiens
aacggttgttgtagtccggccccctcctggctggtccagccacattaaccggcaggatgtcggaggtgcggctgccaccgctacgcgccctggacgactttgttctggggtcggcgcgtctggcggctccggatccatgcgacccgcagcgatggtgccaccgcgtcatcaacaacctcctctactaccaaaccaactaccttctctgcttcggcatcggcctcgctctcgccgggtacgtgcggccacttcatacgctcctgagcgcgctggtagtggcggtggccctcggcgtgctggtgtgggcagctgagacccgcgcagctgtgcgccgctgccgccgcagccaccctgcagcctgcctggccgcagtgcttgccgtcggcctcctggtgctctgggtcgcgggcggcgcttgcaccttcctgttcagcatcgccgggccggtgcttctgatcctggtgcacgcctcgttgcgcctgcgcaaccttaagaacaagattgagaacaagatcgagagcattggtctcaagcggacgccaatgggcctgctactagaggcactgggacaagagcaggaggctggatcctaggcccctgggatctgtacccaggacctggagaataccaccccacccccagcccataattgggacccagagccctttcccagcacttaaaacaggagcctagagccccctgcccaaacaaaacaggacatctgtgaccgccctacccccacgccagccccaaactaagatatccctcacacccagcccccattacctagggacaagagtcttccccagccttgaacctaggaccaagagccacctacatccagccccaaaactggggcttcaggccagagcatccatggccaatttcaaattgtgaacccagagacactcccatccacccttctccatgctcatccccaaactggggcctggagcaaggcactctcaaatcttgaaccctggaccaaagcttttccagaccccaccctaccttccaacccaggtcaagacattgccaaatcttgaactcagaacccaagtgttccatgcccctgtgtggatggagtcgggtatcctgactgttggacccctggtccaggtgatcccgaccctcaccagtcccatttgcctccctccagctctgcttaggcattttgcccctcaccccaatgttccacaccatcgacaaccaaggggtgaggtggggacaggcctcagcagggaatggggcgtatatgttagtgttgctgcaacaataaagcctgttgcatctctcatgccaaaaaaaaaaacaactaacaaaacaaaaaacaacgaaccaaccacaccagaaacaaacacaacacccagaacaaacagaagagaaaaagcaccacacacaagccccgcccaccaagcaccgccgggcacacccgcacggacgcggcaagcacgaagcgaaaaggcacggacacacgaagcacagaggcggcagacagagaggcgagaaaccgacagggcgacgcgccgcagcgagacaaccgcagagaaggcggcaccagcagacgaaagagagcgacaagcacgagcaacaaaacagcaagaagcacgcccgcagcgaacaaaccagaggagagcccaggacgaagagcaacacaaaagcagaaacacgcgcgcaaaacacacgcgagaccgccgcaaagccacggaaaaccagagaagaacgcaaggaaggacgagacgaaggaagacaagaaagccaacgaagaagaagagagagagacaaagagaagaggccaaagagacccag

SEQ ID NO: 434516 - DNA, 1085 bp, Homo sapiens
aacggttgttgtagtccggccccctcctggctggtccagccacattaaccggcaggatgtcggaggtgcggctgccaccgctacgcgccctggacgactttgttctggggtcggcgcgtctggcggctccggatccatgcgacccgcagcgatggtgccaccgcgtcatcaacaacctcctctactaccaaaccaactaccttctctgcttcggcatcggcctcgctctcgccggtgatcctggtgcacgcctcgttgcgcctgcgcaaccttaagaacaagattgagaacaagatcgagagcattggtctcaagcggacgccaatgggcctgctactagaggcactgggacaagagcaggaggctggatcctaggcccctgggatctgtacccaggacctggagaataccaccccacccccagcccataattgggacccagagccctttcccagcacttaaaacaggagcctagagccccctgcccaaacaaaacaggacatctgtgaccgccctacccccacgccagccccaaactaagatatccctcacacccagcccccattacctagggacaagagtcttccccagccttgaacctaggaccaagagccacctacatccagccccaaaactggggcttcaggccagagcatccatggccaatttcaaattgtgaacccagagacactcccatccacccttctccatgctcatccccaaactggggcctggagcaaggcactctcaaatcttgaaccctggaccaaagcttttccagaccccaccctaccttccaacccaggtcaagacattgccaaatcttgaactcagaacccaagtgttccatgcccctgtgtggatggagtcgggtatcctgactgttggacccctggtccaggtgatcccgaccctcaccagtcccatttgcctccctccagctctgcttaggcattttgcccctcaccccaatgttccacaccatcgacaaccaaggggtgaggtggggacaggcctcagcagggaatggggcgtatatgttagtgttgctgcaacaataaagcctgttgcatctctcatgccaa

SEQ ID NO: 434517 - DNA, 779 bp, Homo sapiens
gggattgtgtctgtgaactgggaattaaagagtgaatcgtgatactacggtgcagttcattctggctgctgtaacaaaacacgtacccaggacctggagaataccaccccacccccagcccataattgggacccagagccctttcccagcacttaaaacaggagcctagagccccctgcccaaacaaaacaggacatctgtgaccgccctacccccacgccagccccaaactaagatatccctcacacccagcccccattacctagggacaagagtcttccccagccttgaacctaggaccaagagccacctacatccagccccaaaactggggcttcaggccagagcatccatggccaatttcaaattgtgaacccagagacactcccatccacccttctccatgctcatccccaaactggggcctggagcaaggcactctcaaatcttgaaccctggaccaaagcttttccagaccccaccctaccttccaacccaggtcaagacattgccaaatcttgaactcagaacccaagtgttccatgcccctgtgtggatggagtcgggtatcctgactgttggacccctggtccaggtgatcccgaccctcaccagtcccatttgcctccctccagctctgcttaggcattttgcccctcaccccaatgttccacaccatcgacaaccaaggggtgaggtggggacaggcctcagcagggaatggggcgtatatgttagtgttgctgcaacaataaagcctgttgcatctctcatgccaa

SEQ ID NO: 434518 - DNA, 760 bp, Homo sapiens
aacggttgttgtagtccggccccctcctggctggtccagccacattaaccggcaggatgtcggaggtgcggctgccaccgctacgcgccctggacgactttgttctggggtcggcgcgtctggcggctccggatccatgcgacccgcagcgatggtgccaccgcgtcatcaacaacctcctctactaccaaaccaactaccttctctgcttcggcatcggcctcgctctcgccgggtacgtgcggccacttcatacgctcctgagcgcgctggtagtggcggtggccctcggcgtgctggtgtgggcagctgagacccgcgcagctgtgcgccgctgccgccgcagccaccctgcagcctgcctggccgcagtgcttgccgtcggcctcctggtgctctgggtcgcgggcggcgcttgcaccttcctgttcagcatcgccgggccggtgcttctgatcctggtgcacgcctcgttgcgcctgcgcaaccttaagaacaagattgagaacaagatcgagagcattggtctcaagcggacgccaatgggcctgctactagaggcactgggacaagagcaggaggctggatcctaggcccctgggatctgtacccaggacctggagaataccaccccacccccagcccaatgttccacaccatcgacaaccaaggggtgaggtggggacaggcctcagcagggaatggggcgtatatgttagtgttgctgcaacaataaagcctgttgcatctctcatgccaa

SEQ ID NO: 434519 - DNA, 855 bp, Homo sapiens
aacggttgttgtagtccggccccctcctggctggtccagccacattaaccggcaggatgtcggaggtgcggctgccaccgctacgcgccctggacgactttgttctggggtcggcgcgtctggcggctccggatccatgcgacccgcagcgatggtgccaccgcgtcatcaacaacctcctctactaccaaaccaactaccttctctgcttcggcatcggcctcgctctcgccgggtacgtgcggccacttcatacgctcctgagcgcgctggtagtggcggtggccctcggcgtgctggtgtgggcagctgagacccgcgcagctgtgcgccgctgccgccgcagccaccctgcagcctgcctggccgcagtgcttgccgtcggcctcctggtgctctgggtcgcgggcggcgcttgcaccttcctgttcagcatcgccgggccggtgcttcgtgagtctccactaccccgagatagccaggaaagcagccagagcatgcttaaggcaccaggccagccctgccggtccccgggttgagagggggctgggaaacccgagggcctcgccacgcccccgctaaaagcgccttcccgggcttcgttcccccttctgggaacaccccttttattatcgcctttcctatctcactcttggtgttaagtgccttccactggccacgtccccgttaccgggcgtcttccctggccatgcccacgttgccaagccaattactcggccacgctttcagtatctgaggcgtcctggctgctcaccactccattggcctgcctgcgcgccaattcccttcggtgggccccggttggctgcaggctgaggtctattccactgacca

SEQ ID NO: 434520 - DNA, 343 bp, Homo sapiens
tgcaacaataaagcctgttgcatctctcatgccaatttgagcctcctgggtaaagtccttgtacatttcaaaggacagaagtggcctacttttcaattctgctagactcttcctgaatatgtgggctgaagaggtgatctctgaggcccttccttgaacttatgacctctggatcagcattaaagcacagggaaggacaggtgcagtggctcacgcctgtaattccaacactttgggaggctgagactagaggatcacttgaggctaggagtttgagaccaacctgggcaatatagcaagactcttattgctacaaaaaaattaaaatttagctgggcatggt

SEQ ID NO: 434521 - DNA, 18208 bp, Homo sapiens
  misc_feature (213)..(213): n is a, c, g, or t
  misc_feature (332)..(332): n is a, c, g, or t
  misc_feature (1677)..(1677): n is a, c, g, or t
  misc_feature (2522)..(2522): n is a, c, g, or t
  misc_feature (4612)..(4612): n is a, c, g, or t
  misc_feature (4860)..(4860): n is a, c, g, or t
  misc_feature (4864)..(4864): n is a, c, g, or t
  misc_feature (4937)..(4937): n is a, c, g, or t
  misc_feature (5221)..(5221): n is a, c, g, or t
  misc_feature (5291)..(5291): n is a, c, g, or t
  misc_feature (6104)..(6104): n is a, c, g, or t
  misc_feature (6107)..(6107): n is a, c, g, or t
  misc_feature (6446)..(6446): n is a, c, g, or t
  misc_feature (7482)..(7482): n is a, c, g, or t
  misc_feature (7600)..(7600): n is a, c, g, or t
  misc_feature (8843)..(8843): n is a, c, g, or t
gaagccgcatccagacaaaagctgccgcatccctgccctgcccaacccctggagggattcgagtttggtgcttgtccccgtctgattctcagcgccaaactttttgctagttcagagattccaagagtctgatgagttactctgagaggaaaccctctgcctgttgttgaggaggactgagcacagtgcttaggcgctgagggggaaaaaganggggaaaaaaaagaaaatgatttcctgggaagttgtccatacagtattcctgtttgctcttctttattcttccctagctcaagatgcgagcccccagtcagagatcagagctgaggaanttcccgagggggcctccacgttggcttttgtgtttgatgtgactggttctatgtatgatgatttagttcaggtgattgaaggggcttccaaaattttggagacgtctttgaaaagacctaaaagacctcttttcaactttgcgttggtgcctttccatgatccagaaattggcccagtgacaattaccacagatcccaagaaatttcaatatgaactcagagaactgtatgttcagggtggtggtgattgcccagaaatgagtattggagctataaaaattgccttggaaatttctcttcctggttctttcatctatgttttcactgatgctcggtccaaagattaccggctcacccatgaggtgctgcaacttatccaacagaaacagtcacaagtcgtatttgttctgactggagattgtgatgacaggacccatattggatataaagtctatgaagaaattgcctctacaagttctggtcaagtgttccatctggacaaaaaacaagttaatgaggtattaaaatgggtagaagaagcagtacaggcctccaaagttcaccttttatccacagatcatttggaacaggctgtaaatacttggagaattccttttgatcccagcctgaaagaggtcactgtgtctttgagtgggccttctccaatgattgaaattcgcaatcctttagggaagctgataaaaaagggatttggcctgcatgagctattaaatatccataactctgccaaagtagtgaatgtgaaagagccagaggctggaatgtggacagtgaagacctcaagcagtggaaggcactctgttcgcattactggcctcagtactattgatttccgagctggcttttctcgaaagcccaccctggacttcaaaaaaacagtcagcagaccagtgcaaggaatacctacctatgtactgctcaatacttctggaatttccactccagctagaatagatcttcttgaacttttgagtatctcaggaagttctcttaagactattcctgttaaatattacccacatcgaaaaccttatggcatatggaatatttctgactttgtaccaccaaatgaagctttctttctcaaagtaacaggctatgataaagatgattacctcttccagagagtatcaagtgtttccttttctagtattgtcccagatgctcccaaagttacgatgcctgagaaaaccccaggatactatctgcagccgggccaaattccctgctctgttgacagtcttttgccctttaccttgagctttgtcagaaatggagttacacttggagtagaccagtatttgaaagaatctgccagtgtgancttagatattgcaaaggtcactttgtctgacgaaggtttctatgaatgcattgctgtcagcagtgcaggtactggacgggcacagacattttttgacgtatcagagccccctccggtcatccaagtgcctaacaatgttacagtcactcctggagagagagcagttttaacatgtctcatcatcagtgcggtggattacaatctaacctggcagaggaatgacagagatgtcagactggcagagccagcgagaattaggaccttggctaatctgtcattggagctaaagagtgtgaaattcaacgatgctggagagtatcattgtatggtttctagtgaaggtggatcatcagccgcttcagttttcctcacagtgcaagaaccacccaaagtcactgtgatgcccaagaatcagtctttcacaggagggtctgaggtctccatcatgtgttctgcaacaggttatcccaaaccaaagattgcctggaccgttaacgatatgtttatcgtgggttcacacaggtataggatgacctcagatggtaccttatttatcaaaaatgcagctcccaaagatgcagggatctatggttgcctagcaagtaattcagctggaacagataaacagaattctactctcagatacattgaagcccctaagttgatggtagttcagagtgagctcttggttgcccttggggatataaccgttatggaatgcaaaacctctggtattcctccacctcaagttaaatggttcaaaggagatcttgagttgaggccctcaacattcctcattattgaccctctcttgggacttttgaagattcaagaaacacaagatntggatgctggcgattatacctgtgtagccatcaatgaggctggaagagcaactggcaagataactctggatgttggctcacctccagttttcatacaagaacctgctgatgtgtctatggaaattggctcaaatgtgacattaccttgttatgttcagggttatccagaaccaacaatcaaatggcgaagattagacaacatgccaattttctcaagacctttttcagttagttccatcagccaactaagaacaggagctctctttattttaaacttatgggcaagtgataaaggaacctatatttgtgaagctgaaaaccagtttggaaagatccagtcagagacaacagtaacagtgaccggacttgttgctccacttattggaatcagcccttcagtggccaatgttattgaaggacagcagcttactttgccctgtactctgttagctggaaatcccattccagaacgtcggtggattaagaattcagctatgttgctccaaaatccttacatcactgtgcgcagtgatgggagcctccatattgaaagagttcagcttcaggatggtggtgaatatacttgtgtggccagtaacgttgctgggaccaataacaaaactacctctgtggttgtgcatgttctgccaaccattcagcatgggcagcagatactcagtacaattgaaggcattccagtaactttaccatgcaaagcaagtggaaatcccaaaccgtctgtcatctggtccaagaaaggagagctgatttcaaccagcagtgctaagttttcagcaggagctgatggtagtctgtatgtggtatcacctggaggagaggagagtggggagtatgtctgcactgccaccaatacagccggctacgccaaaaggaaagtgcagctaacagtctatgtaaggcccagagtgtttggagatcaacgaggactgtcccaggataagcctgttgagatctccgtccttgcaggggaagaggtaacacttccatgtgaagtgaagagcttacctccacccataattacttgggccaaagaaacccagctcatctcaccgttctctccaagacacacattcctcccttctggttcaatgaagatcactgaaacccgcacttcagatagtgggatgtatctttgtgttgccacaaatattgctgggaatgtgactcaggctgtcaaattaaatgtccatgttcctccaaagatacagcgtggacctaaacatctcaaagtccaagttggtcaaagagtggatattccatgtaatgctcaagggactcctcttcctgtaatcacctggtccaaaggtggaagcactatgctggttgatggagagcaccatgttagcaatccagacggaactttaagcatcgaccaagccacgccctcagatgctggcatatatacatgtgttgctactaacatagcaggcactgatgaaacagagataacgctacatgtccaagaaccacccacagtggaagatctagaacctccatataacactactttccaagaaagagtggccaatcaacgcattgaatttccatgtcctgcaaaaggtacccctaaaccaaccatcaaatggttacacaatggtagagagttgacaggcagagagcctggcatttctatcttggaagatggcacattgctggttattgcttctgttacaccctatgacaatggggagtacatctgtgtggcagtcaatgaagctggaaccacagaaagaaaatataacctcaaagtccatgttcctccagtaattaaagataaagaacaagttacaaatgtgtcggtgttgttaaatcagctgaccaatctcttctgtgaagtggaaggcactccatctcccatcattatgtggtataaagataatgtccaggtgactgaaagcagcactattcagactgtgaacaatgggaagatactgaagctcttcagagccactccagaggatgcaggaagatattcctgcaaagcaattaatattgcaggcacttctcagaagtactttaacattgatgtgctagttccacccaccataataggtaccaacttcccaaangaagtctcagttgtcctcaaccgtgacgtcgcccttgaatgccaggtcaaaggcactccctttcctgatattcattggttcaaagatggcaagcctttatttttgggcgatcctaatgttgaacttctagacagaggacaagtcttacatttaaagaatgcacggagaaatgacaaggggcgctaccaatgtactgtgtctaatgcagctggcaaacaagccaaggatataaaactgactatctatantccncctagtattaaaggaggaaatgtcaccacagacatatcagtattgatcaacagccttattaaactggaatgtnaaacacggggacttccaatgcctgccattacttggtataaggacgggcagccaatcatgtccagctcacaagcactttatattgataaaggacaatatcttcatattcctcgagcacaggtctctgattcagcaacatatacgtgtcacgtagccaatgttgctggaactgctgaaaaatcattccatgtggatgtctatgttcctccaatgattgaaggcaacttggccacgcctttgaataagcaagtagttattgctcattctctgacactggagtgcaangctgctggaaacccttctcccattctcacctggttgaaagatggtgtacctgtgaaagctaatgacaatntccgcatagaagctggtgggaagaaactcgaaatcatgagtgcccaagaaattgatcgaggacagtacatatgcgtggctaccagtgtggcaggagaaaaggaaatcaaatatgaagttgatgtcttggtgccaccagctatagaaggaggagatgaaacatcttacttcattgtgatggttaataacttactggagctagattgtcatgtgacaggctctcccccaccaactatcatgtggctgaaggatggccagttaattgatgaaagggatggattcaagattttattaaatggacgcaaactggttattgctcaggctcaagtgtcaaacacaggcctttatcggtgcatggcagcaaatactgctggagaccacaagaaggaatttgaagtgactgttcatgttcctccaacaatcaagtcctcaggcctttctgagagagttgtggtaaaatacaagcctgtcgccttgcagtgcatagccaatgggattccaaatccttccattacatggttaaaagatgaccagcctgtgaacactgcccaaggaaaccttaaaatacagtcttctggtcgagttctacaaattgccaaaaccctgttggaagatgctggcagatacacatgtgtggctaccaacgcagctggagaaacacaacagcacattcaactgcatgttcatgaaccacctagtctggaagatgctggaaaaatgctgaatgagactgtgttggtgagcaaccctgtacagctggagtgtaaggcagctggaaatcctgtgcctgttattacatggtacaaagataatngtntactctcaggttccaccagcatgactttcttgaacagaggacagatcattgatattgaaagtgcccagatctcagatgctggcatatataaatgcgtggccatcaactcagctggagctacagagttattttacagtctgcaagttcatgtggccccatcaatttctggcagcaataacatggtggcagtggtggttaataacccggtgaggttagaatgtgaagccagaggtattcctgccccaagtctgacctggttgaaagatgggagtcctgtttctagtttttctaatggattacaggttctctctggtggtcgaatcctagcattgaccagtncacaaatcagcgacacaggaaggtacacctgcgtggcagtgaatgctgctggagaaaagcaaagggacattgacctccgagtatatgttccgccaaatattatgggagaagaacagaatgtctctgtcctcattagccaagctgtggaattactatgtcaaagtgatgctattcccccacctactcttacttggttaaaagacggccaccccttgctgaagaaaccaggcctcagtatatctgaaaatagaagtgtgttaaagattgaagatgctcaggttcaagacactggtcgttacacttgtgaagcaacaaatgttgctggaaaaactgaaaaaaactacaatgtcaacatttgggtccccccaaatattggtggttctgatgaacttactcaacttacagtcattgaagggaatctcattagtctgttgtgtgaatcaagtggtattccacccccaaatctcatctggaagaagaaaggctctccagtgctgactgattccatggggcgagttagaattttatctgggggcaggcaattacaaatttcaattgctgaaaagtctgatgcagcactctattcatgtgtggcgtcgaatgttgctgggactgcaaagaaagaatacaatctgcaagtttacattagaccaaccataaccaacagtggcagccaccctactgaaattattgtgacccgagggaagagtatctccttggagtgtgaggtgcagggtattccaccaccaacagtgacctggatgaaagatggccaccccttgatcaaggcaaagggagtagaaatactggatgaaggtcacatccttcagctgaagaacattcatgtatctgacacaggccgttatgtgtgtgttgctgtgaatgtagcaggaatgactgacaaaaaatatgacttaagtgtccatgctcctccaagcatcataggaaaccacaggtcacctgaaaatattagtgtggtagaaaagaactcagtatctttgacttgtgaagcttctggaattcccctgccttccanaacctggttcaaagatgggtggcctgtcagccttagcaattctgtgaggattctttcaggaggcaggatgctacggctgatgcagaccacaatggaagatgctggccaatatacttgngttgtaaggaatgcagctggtgaagaaagaaaaatctttgggctttcagtattagtaccacctcatattgtgggtgaaaatacattggaagatgtgaaggtaaaagagaaacagagtgttacgctgacttgtgaagtgacagggaatccagtgccagaaattacatggcacaaagatgggcagcccctccaagaagatgaagcccatcacattatatctggtggccgttttcttcaaattaccaatgtccaggtgccacacactggaagatatacatgtttggcttccagtccagctggccacaagagcaggagcttcagtcttaatgtatttgtatctcctacaattgctggtgtaggtagtgatggcaaccctgaagatgtcactgtcatccttaacagccctacatctttggtctgtgaagcttattcatatcctccagctaccatcacctggtttaaggatggcactcctttagaatctaaccgaaatattcgtattcttccaggaggcagaactctgcagatcctcaatgcacaggaggacaatgctggaagatactcttgtgtagccacgaatgaggctggagaaatgataaagcactatgaagtgaaggtgtacattccacccataatcaataaaggggacctttgggggccaggtctttcccctaaagaagtgaagatcaaagtaaacaacactctgaccttggaatgtgaagcgtatgcaattccttctgcctccctcagctggtacaaggatggacagccccttaaatccgatgatcatgttaatattgctgcgaatggacacacacttcaaataaaggaggctcaaatatcagacaccggacgatatacttgtgtagcatctaacattgcaggtgaagatgagttggattttgatgtgaatattcaagttcctccaagttttcagaaactctgggaaataggaaacatgctagatactggcaggaatggtgaagccaaagatgtgatcatcaacaatcccatttctctttactgtgagacaaatgctgctccccctcctacactgacatggtacaaagatggccaccctctgacctcaagtgataaagtattgattttgccaggagggcgagtgttgcagattcctcgggctaaagtagaagatgctgggagatacacatgtgtggctgtgaatgaggctggagaagattcccttcaatatgatgtccgtgtactcgtgccgccaattatcnagggagcaaatagtgatctccctgaagaggtcaccgtgctggtgaacaagagtgcactgatagagtgtttatccagtggcagcccagcaccaaggaattcctggcagaaagatggacagcccttgctagaagatgaccatcataaatttctatctaatggacgaattctgcagattctgaatactcaaataacagatatcggcaggtatgtgtgtgttgctgagaacacagctgggagtgccaaaaaatattttaacctcaatgttcatgttcctccaagtgtcattggtcctaaatctgaaaatcttaccgtcgtggtgaacaatttcatctctttgacctgtgaggtctctggttttccacctcctgacctcagctggctcaagaatgaacagcccatcaaactgaacacaaatactctcattgtgcctggtggtcgaactctacagattattcgggccaaggtatcagatggtggtgaatacacttgtatagctatcaatcaagctggcgaaagcaagaaaaagttttccctgactgtttatgtgcccccaagcattaaagaccatgacagtgaatctctttctgtagttaatgtaagagagggaacttctgtgtctttggagtgtgagtcgaacgctgtgccacctccagtcatcacttggtataagaatgggcggatgataacagagtctactcatgtggagattttagctgatggacaaatgctacacattaagaaagctgaggtatctgacacaggccagtatgtatgtagagctataaatgtagcaggacgggatgataaaaatttccacctcaatgtatatgtgccacccagtattgaaggacctgaaagagaagtgattgtggagacgatcagcaatcctgtgacattaacatgtgatgccactgggatcccacctcccacgatagcatggttaaagaaccacaagcgcatagaaaattctgactcactggaagttcgtattttgtctggaggtagcaaactccagattgcccggtctcagcattcagatagtggaaactatacatgtattgcttcaaatatggagggaaaagcccagaaatattactttctttcaattcaagttcctccaagtgttgctggtgctgaaattccaagtgatgtcagtgtccttctaggagaaaatgttgagctggtctgcaatgcaaatggcattcctactccacttattcaatggcttaaagatggaaagcccatagctagtggtgaaacagaaagaatccgagtgagtgcaaatggcagcacattaaacatttatggagctcttacatctgacacggggaaatacacatgtgttgctactaatcccgctggagaagaagaccgaatttttaacttgaatgtctatgttacacctacaattaggggtaataaagatgaagcagagaaactaatgactttagtggatacttcaataaatattgaatgcagagccacagggacgcctccaccacagataaactggctgaagaatggacttcctctgcctctctcctcccatatccggttactggcagcaggacaagttatcaggattgtgagagctcaggtgtctgatgtcgctgtgtatacttgtgtggcctccaacagagctggggtggataataagcattacaatcttcaagtgtttgcaccaccaaatatggacaattcaatggggacagaggaaatcacagttctcaaaggtagttccacctctatggcatgcattactgatggaaccccagctcccagtatggcctggcttagagatggccagcctctggggcttgatgcccatctgacagtcagcacccatggaatggtcctgcagctcctcaaagcagagactgaagattcgggaaagtacacctgcattgcctcaaatgaagctggagaagtcagcaagcactttatcctcaaggtcctagaaccacctcacattaatggatctgaagaacatgaagagatatcagtaattgttaataacccacttgaacttacctgcattgcttctggaatcccagcccctaaaatgacctggatgaaagatggccggccccttccacagacggatcaagtgcaaactctaggaggaggagaggttcttcgaatttctactgctcaggtggaggatacaggaagatatacatgtctggcatccagtcctgcaggagatgatgataaggaatatctagtgagagtgcatgtacctcctaatattgctggaactgatgagccccgggatatcactgtgttacggaacagacaagtgacattggaatgcaagtcagatgcagtgcccccacctgtaattacttggctcagaaatggagaacggttacaggcaacacctcgagtgcgaatcctatctggagggagatacttgcaaatcaacaatgctgacctaggtgatacagccaattatacctgtgttgccagcaacattgcaggaaagactacaagagaatttattctcactgtaaatgttcctccaaacataaaggggggcccccagagccttgtaattcttttaaataagtcaactgtattggaatgcatcgctgaaggtgtgccaactccaaggataacatggagaaaggatggagctgttctagctgggaatcatgcaagatattccatcttggaaaatggattccttcatattcaatcagcacatgtcactgacactggacggtatttgtgtatggccaccaatgctgctggaacagatcgcaggcgaatagatttacaggtccatgttcctccatctattgctccgggtcctaccaacatgactgtaatagtaaatgttcaaactactctggcttgtgaggctactgggataccaaaaccatcaatcaattggagaaaaaatgggcatcttcttaatgtggatcaaaatcagaactcatacaggctcctttcttcaggttcactagtaattatttccccttctgtggatgacactgcaacctatgaatgtactgtgacaaacggtgctggagatgataaaagaactgtggatctcactgtccaagttccaccttccatagctgatgagcctacagatttcctagtaaccaaacatgccccagcagtaattacctgcactgcttcgggagttccatttccctcaattcactggaccaaaaatggtataagactgcttcccaggggagatggctatagaattctgtcctcaggagcaattgaaatacttgccacccaattaaaccatgctggaagatacacttgtgtcgctaggaatgcggctggctctgcacatcgacacgtgacccttcatgttcatgagcctccagtcattcagccccaaccaagtgaactacacgtcattctgaacaatcctattttattaccatgtgaagcaacagggacacccagtcctttcattacttggcaaaaagaaggcatcaatgttaacacttcaggcagaaaccatgcagttcttcctagtggcggcttacagatctccagagctgtccgagaggatgctggcacttacatgtgtgtggcccagaacccggctggtacagccttgggcaaaatcaagttaaatgtccaagttcctccagtcattagccctcatctaaaggaatatgttattgctgtggacaagcccatcacgttatcctgtgaagcagatggcctccctccgcctgacattacatggcataaagatgggcgtgcaattgtggaatctatccgccagcgcgtcctcagctctggctctctgcaaatagcatttgtccagcctggtgatgctggccattacacgtgcatggcagccaatgtagcaggatcaagcagcacaagcaccaagctcaccgtccatgtaccacccaggatcagaagtacagaaggacactacacggtcaatgagaattcacaagccattcttccatgcgtagctgatggaatccccacaccagcaattaactggaaaaaagacaatgttcttttagctaacttgttaggaaaatacactgctgaaccatatggagaactcattttagaaaatgttgtgctggaggattctggcttctatacctgtgttgctaacaatgctgcaggtgaagatacacacactgtcagcctgactgtgcatgttctccccacttttactgaacttcctggagacgtgtcattaaataaaggagaacagctacgattaagctgtaaagctactggtattccattgcccaaattaacatggaccttcaataacaatattattccagcccactttgacagtgtgaatggacacagtgaacttgttattgaaagagtgtcaaaagaggattcaggtacttatgtgtgcaccgcagagaacagcgttggctttgtgaaggcaattggatttgtttatgtgaaagaacctccagtcttcaaaggtgattatccttctaactggattgaaccacttggtgggaatgcaatcctgaattgtgaggtgaaaggagaccccaccccaaccatccagtggaacagaaagggagtggatattgaaattagccacagaatccggcaactgggcaatggctccctggccatctatggcactgttaatgaagatgccggtgactatacatgtgtagctaccaatgaagctggggtggtggagcgcagcatgagtctgactctgcaaagtcctcctattatcactcttgagccagtggaaactgttattaatgctggtggcaaaatcatattgaattgtcaggcaactggagagcctcaaccaaccattacatggtcccgtcaagggcactctatttcctgggatgaccgggttaacgtgttgtccaacaactcattatatattgctgatgctcagaaagaagatacctctgaatttgaatgtgttgctcgaaacttaatgggttctgtccttgtcagagtgccagtcatagtccaggttcatggtggattttcccagtggtctgcatggagagcctgcagtgtcacctgtggaaaaggcatccaaaagaggagtcgtctgtgcaaccagccccttccagccaatggtgggaagccctgccaaggttcagatttggaaatgcgaaactgtcaaaataagccttgtccagtggatggtagctggtcggaatggagtctttgggaagaatgcacaaggagctgtggacgcggcaaccaaaccaggaccaggacttgcaataatccatcagttcagcatggtgggcggccatgtgaagggaatgctgtggaaataattatgtgcaacattaggccttgcccagttcatggagcatggagcgcttggcagccttggggaacatgcagcgaaagttgtgggaaaggtactcagacaagagcaagactttgtaataacccaccaccagcgtttggtgggtcctactgtgatggagcagaaacacagatgcaagtttgcaatgaaagaaattgtccaattcatggcaagtgggcgacttgggccagttggagtgcctgttctgtgtcatgtggaggaggtgccagacagagaacaaggggctgctccgaccctgtgccccagtatggaggaaggaaatgcgaagggagtgatgtccagagtgatttttgcaacagtgacccttgcccaacccatggtaactggagtccttggagtggctggggaacatgcagccggacgtgtaacggagggcagatgcggcggtaccgcacatgtgataaccctcctccctccaatgggggaagagcttgtgggggaccagactcccagatccagaggtgcaacactgacatgtgtcctgtggatggaagttggggaagctggcatagttggagccagtgctctgcctcctgtggaggaggtgaaaagactcggaagcggctgtgcgaccatcctgtgccagttaaaggtggccgtccctgtcccggagacactactcaggtgaccaggtgcaatgtacaagcatgtccaggtgggccccagcgagccagaggaagtgttattggaaatattaatgatgttgaatttggaattgctttccttaatgccacaataactgatagccctaactctgatactagaataatacgtgccaaaattaccaatgtacctcgtagtcttggttcagcaatgagaaagatagtttctattctaaatcccatttattggacaacagcaaaggaaataggagaagcagtcaatggctttaccctcaccaatgcagtcttcaaaagagaaactcaagtggaatttgcaactggagaaatcttgcagatgagtcatattgcccggggcttggattccgatggttctttgctgctagatatcgttgtgagtggctatgtcctacagcttcagtcacctgctgaagtcactgtaaaggattacacagaggactacattcaaacaggtcctgggcagctgtacgcctactcaacccggctgttcaccattgatggcatcagcatcccatacacatggaaccacaccgttttctatgatcaggcacagggaagaatgcctttcttggttgaaacacttcatgcatcctctgtggaatctgactataaccagatagaagagacactgggttttaaaattcatgcttcaatatccaaaggagatcgcagtaatcagtgcccctccgggtttaccttagactcagttggacctttttgtgctgatgaggatgaatgtgcagcagggaatccctgctcccatagctgccacaatgccatggggacttactactgctcctgccctaaaggcctcaccatagctgcagatggaagaacttgtcaagatattgatgagtgtgctttgggtaggcatacctgccacgctggtcaggactgtgacaatacgattggatcttatcgctgtgtggtccgttgtggaagtggctttcgaagaacctctgatgggctgagttgtcaagatattaatgaatgtcaagaatccagcccctgtcaccagcgctgtttcaatgccataggaagtttccattgtggatgtgaacctgggtatcagctcaaaggcagaaaatgcatggatgtgaacgagtgtagacaaaatgtatgcagaccagatcagcactgtaagaacacccgtggtggctataagtgcattgatctttgtccaaatggaatgaccaaggcagaaaatggaacctgtattgatattgatgaatgtaaagatgggacccatcagtgcagatataaccagatatgtgagaatacaagaggcagctatcgttgtgtatgcccaagaggttatcggtctcaaggagttggaagaccctgcatggacattaatgaatgtgaacaagtgcctaaaccttgtgcacatcagtgctccaacacccccggcagcttcaagtgtatctgtccaccaggacaacatttattaggggacgggaaatcttgcgctggattggagaggctgccaaattatggcactcaatacagtagctataaccttgcacggttctcccctgtgagaaacaactatcaacctcaacagcattacagacagtactcacatctctacagctcctactcagagtatagaaacagcagaacatctctctccaggactagaaggactattaggaaaacttgccctgaaggctctgaggcaagccatgacacatgtgtagatattgatgaatgtgaaaatacagatgcctgccagcatgagtgtaagaatacctttggaagttatcagtgcatctgcccacctggctatcaactcacacacaatggaaagacatgccaagatatcgatgaatgtctggagcagaatgtgcactgtggacccaatcgcatgtgcttcaacatgagaggaagctaccagtgcatcgatacaccctgtccacccaactaccaacgggatcctgtttcagggttctgcctcaagaactgtccacccaatgatttggaatgtgccttgagcccatatgccttggaatacaaactcgtctccctcccatttggaatagccaccaatcaagatttaatccggctggttgcatacacacaggatggagtgatgcatcccaggacaactttcctcatggtagatgaggaacagactgttccttttgccttgagggatgaaaacctgaaaggagtggtgtatacaacacgaccactacgagaagcagagacctaccgcatgagggtccgagcctcatcctacagtgccaatgggaccattgaatatcagaccacattcatagtttatatagctgtgtccgcctatccatactaaggaactctccaaagcctattccacatatttaaaccgcattaatcatggcaatcaagcccccttccagattactgtctcttgaacagttgcaatcttggcagcttgaaaatggtgctacactctgttttgtgtgccttccttggtacttctgaggtattttcatgatcccaccatggtcatatcttgaagtatggtctagaaaagtcccttattattttatttattacactggagcagttacttcccaaagattattctgaacatctaacaggacatatcagtgatggtttacagtagtgtagtacctaagatcattttcctgaaagccaaaccaaacaacgaaaaacaagaacaactaattcagaatcaaatagagtttttgagcatttgactatttttagaatcataaaattagttactaagtattttgatcaaagcttataaaataacttacggagatttttgtaagtattgatacattataataggacttgcctattttcatttttaagaagaaaaacaccactcattttataaaatatagtacagctactataaggcttgtttgatcccaaatggtgcttatcttgattgaacattcagaacaaggatattattttcagtgattttgtgagatcagctgaaccacttatgataataataataaaaaagactgctttgccctcacgtcagttgtacatggcatggaactttaaaaattttaatataaactttcatccagttagcttcataacttttacgttccagaattttgtttattttcctgtcaatgaaagcaatttttaaagataccagtgggacaggtttggttttttaaaaatctcatgtgttcaaattaacataaatattacacgtcaatacactgtacatggtggtaatagactctaagcaattgccaagatgtattctatttttatgaagtgtatatatattaccttagtgtgcattttctatataatatcttgatggactcttttataaaattattttataaaaaacaatgttacactaaaatcagcctaaataaattttcacaactttttttcataa

SEQ ID NO: 434522 - DNA, 17857 bp, Homo sapiens
  misc_feature (213)..(213): n is a, c, g, or t
  misc_feature (332)..(332): n is a, c, g, or t
  misc_feature (1677)..(1677): n is a, c, g, or t
  misc_feature (2522)..(2522): n is a, c, g, or t
  misc_feature (4612)..(4612): n is a, c, g, or t
  misc_feature (4860)..(4860): n is a, c, g, or t
  misc_feature (4864)..(4864): n is a, c, g, or t
  misc_feature (4937)..(4937): n is a, c, g, or t
  misc_feature (5221)..(5221): n is a, c, g, or t
  misc_feature (5291)..(5291): n is a, c, g, or t
  misc_feature (6104)..(6104): n is a, c, g, or t
  misc_feature (6107)..(6107): n is a, c, g, or t
  misc_feature (6446)..(6446): n is a, c, g, or t
  misc_feature (7482)..(7482): n is a, c, g, or t
  misc_feature (7600)..(7600): n is a, c, g, or t
  misc_feature (8843)..(8843): n is a, c, g, or t
gaagccgcatccagacaaaagctgccgcatccctgccctgcccaacccctggagggattcgagtttggtgcttgtccccgtctgattctcagcgccaaactttttgctagttcagagattccaagagtctgatgagttactctgagaggaaaccctctgcctgttgttgaggaggactgagcacagtgcttaggcgctgagggggaaaaaganggggaaaaaaaagaaaatgatttcctgggaagttgtccatacagtattcctgtttgctcttctttattcttccctagctcaagatgcgagcccccagtcagagatcagagctgaggaanttcccgagggggcctccacgttggcttttgtgtttgatgtgactggttctatgtatgatgatttagttcaggtgattgaaggggcttccaaaattttggagacgtctttgaaaagacctaaaagacctcttttcaactttgcgttggtgcctttccatgatccagaaattggcccagtgacaattaccacagatcccaagaaatttcaatatgaactcagagaactgtatgttcagggtggtggtgattgcccagaaatgagtattggagctataaaaattgccttggaaatttctcttcctggttctttcatctatgttttcactgatgctcggtccaaagattaccggctcacccatgaggtgctgcaacttatccaacagaaacagtcacaagtcgtatttgttctgactggagattgtgatgacaggacccatattggatataaagtctatgaagaaattgcctctacaagttctggtcaagtgttccatctggacaaaaaacaagttaatgaggtattaaaatgggtagaagaagcagtacaggcctccaaagttcaccttttatccacagatcatttggaacaggctgtaaatacttggagaattccttttgatcccagcctgaaagaggtcactgtgtctttgagtgggccttctccaatgattgaaattcgcaatcctttagggaagctgataaaaaagggatttggcctgcatgagctattaaatatccataactctgccaaagtagtgaatgtgaaagagccagaggctggaatgtggacagtgaagacctcaagcagtggaaggcactctgttcgcattactggcctcagtactattgatttccgagctggcttttctcgaaagcccaccctggacttcaaaaaaacagtcagcagaccagtgcaaggaatacctacctatgtactgctcaatacttctggaatttccactccagctagaatagatcttcttgaacttttgagtatctcaggaagttctcttaagactattcctgttaaatattacccacatcgaaaaccttatggcatatggaatatttctgactttgtaccaccaaatgaagctttctttctcaaagtaacaggctatgataaagatgattacctcttccagagagtatcaagtgtttccttttctagtattgtcccagatgctcccaaagttacgatgcctgagaaaaccccaggatactatctgcagccgggccaaattccctgctctgttgacagtcttttgccctttaccttgagctttgtcagaaatggagttacacttggagtagaccagtatttgaaagaatctgccagtgtgancttagatattgcaaaggtcactttgtctgacgaaggtttctatgaatgcattgctgtcagcagtgcaggtactggacgggcacagacattttttgacgtatcagagccccctccggtcatccaagtgcctaacaatgttacagtcactcctggagagagagcagttttaacatgtctcatcatcagtgcggtggattacaatctaacctggcagaggaatgacagagatgtcagactggcagagccagcgagaattaggaccttggctaatctgtcattggagctaaagagtgtgaaattcaacgatgctggagagtatcattgtatggtttctagtgaaggtggatcatcagccgcttcagttttcctcacagtgcaagaaccacccaaagtcactgtgatgcccaagaatcagtctttcacaggagggtctgaggtctccatcatgtgttctgcaacaggttatcccaaaccaaagattgcctggaccgttaacgatatgtttatcgtgggttcacacaggtataggatgacctcagatggtaccttatttatcaaaaatgcagctcccaaagatgcagggatctatggttgcctagcaagtaattcagctggaacagataaacagaattctactctcagatacattgaagcccctaagttgatggtagttcagagtgagctcttggttgcccttggggatataaccgttatggaatgcaaaacctctggtattcctccacctcaagttaaatggttcaaaggagatcttgagttgaggccctcaacattcctcattattgaccctctcttgggacttttgaagattcaagaaacacaagatntggatgctggcgattatacctgtgtagccatcaatgaggctggaagagcaactggcaagataactctggatgttggctcacctccagttttcatacaagaacctgctgatgtgtctatggaaattggctcaaatgtgacattaccttgttatgttcagggttatccagaaccaacaatcaaatggcgaagattagacaacatgccaattttctcaagacctttttcagttagttccatcagccaactaagaacaggagctctctttattttaaacttatgggcaagtgataaaggaacctatatttgtgaagctgaaaaccagtttggaaagatccagtcagagacaacagtaacagtgaccggacttgttgctccacttattggaatcagcccttcagtggccaatgttattgaaggacagcagcttactttgccctgtactctgttagctggaaatcccattccagaacgtcggtggattaagaattcagctatgttgctccaaaatccttacatcactgtgcgcagtgatgggagcctccatattgaaagagttcagcttcaggatggtggtgaatatacttgtgtggccagtaacgttgctgggaccaataacaaaactacctctgtggttgtgcatgttctgccaaccattcagcatgggcagcagatactcagtacaattgaaggcattccagtaactttaccatgcaaagcaagtggaaatcccaaaccgtctgtcatctggtccaagaaaggagagctgatttcaaccagcagtgctaagttttcagcaggagctgatggtagtctgtatgtggtatcacctggaggagaggagagtggggagtatgtctgcactgccaccaatacagccggctacgccaaaaggaaagtgcagctaacagtctatgtaaggcccagagtgtttggagatcaacgaggactgtcccaggataagcctgttgagatctccgtccttgcaggggaagaggtaacacttccatgtgaagtgaagagcttacctccacccataattacttgggccaaagaaacccagctcatctcaccgttctctccaagacacacattcctcccttctggttcaatgaagatcactgaaacccgcacttcagatagtgggatgtatctttgtgttgccacaaatattgctgggaatgtgactcaggctgtcaaattaaatgtccatgttcctccaaagatacagcgtggacctaaacatctcaaagtccaagttggtcaaagagtggatattccatgtaatgctcaagggactcctcttcctgtaatcacctggtccaaaggtggaagcactatgctggttgatggagagcaccatgttagcaatccagacggaactttaagcatcgaccaagccacgccctcagatgctggcatatatacatgtgttgctactaacatagcaggcactgatgaaacagagataacgctacatgtccaagaaccacccacagtggaagatctagaacctccatataacactactttccaagaaagagtggccaatcaacgcattgaatttccatgtcctgcaaaaggtacccctaaaccaaccatcaaatggttacacaatggtagagagttgacaggcagagagcctggcatttctatcttggaagatggcacattgctggttattgcttctgttacaccctatgacaatggggagtacatctgtgtggcagtcaatgaagctggaaccacagaaagaaaatataacctcaaagtccatgttcctccagtaattaaagataaagaacaagttacaaatgtgtcggtgttgttaaatcagctgaccaatctcttctgtgaagtggaaggcactccatctcccatcattatgtggtataaagataatgtccaggtgactgaaagcagcactattcagactgtgaacaatgggaagatactgaagctcttcagagccactccagaggatgcaggaagatattcctgcaaagcaattaatattgcaggcacttctcagaagtactttaacattgatgtgctagttccacccaccataataggtaccaacttcccaaangaagtctcagttgtcctcaaccgtgacgtcgcccttgaatgccaggtcaaaggcactccctttcctgatattcattggttcaaagatggcaagcctttatttttgggcgatcctaatgttgaacttctagacagaggacaagtcttacatttaaagaatgcacggagaaatgacaaggggcgctaccaatgtactgtgtctaatgcagctggcaaacaagccaaggatataaaactgactatctatantccncctagtattaaaggaggaaatgtcaccacagacatatcagtattgatcaacagccttattaaactggaatgtnaaacacggggacttccaatgcctgccattacttggtataaggacgggcagccaatcatgtccagctcacaagcactttatattgataaaggacaatatcttcatattcctcgagcacaggtctctgattcagcaacatatacgtgtcacgtagccaatgttgctggaactgctgaaaaatcattccatgtggatgtctatgttcctccaatgattgaaggcaacttggccacgcctttgaataagcaagtagttattgctcattctctgacactggagtgcaangctgctggaaacccttctcccattctcacctggttgaaagatggtgtacctgtgaaagctaatgacaatntccgcatagaagctggtgggaagaaactcgaaatcatgagtgcccaagaaattgatcgaggacagtacatatgcgtggctaccagtgtggcaggagaaaaggaaatcaaatatgaagttgatgtcttggtgccaccagctatagaaggaggagatgaaacatcttacttcattgtgatggttaataacttactggagctagattgtcatgtgacaggctctcccccaccaactatcatgtggctgaaggatggccagttaattgatgaaagggatggattcaagattttattaaatggacgcaaactggttattgctcaggctcaagtgtcaaacacaggcctttatcggtgcatggcagcaaatactgctggagaccacaagaaggaatttgaagtgactgttcatgttcctccaacaatcaagtcctcaggcctttctgagagagttgtggtaaaatacaagcctgtcgccttgcagtgcatagccaatgggattccaaatccttccattacatggttaaaagatgaccagcctgtgaacactgcccaaggaaaccttaaaatacagtcttctggtcgagttctacaaattgccaaaaccctgttggaagatgctggcagatacacatgtgtggctaccaacgcagctggagaaacacaacagcacattcaactgcatgttcatgaaccacctagtctggaagatgctggaaaaatgctgaatgagactgtgttggtgagcaaccctgtacagctggagtgtaaggcagctggaaatcctgtgcctgttattacatggtacaaagataatngtntactctcaggttccaccagcatgactttcttgaacagaggacagatcattgatattgaaagtgcccagatctcagatgctggcatatataaatgcgtggccatcaactcagctggagctacagagttattttacagtctgcaagttcatgtggccccatcaatttctggcagcaataacatggtggcagtggtggttaataacccggtgaggttagaatgtgaagccagaggtattcctgccccaagtctgacctggttgaaagatgggagtcctgtttctagtttttctaatggattacaggttctctctggtggtcgaatcctagcattgaccagtncacaaatcagcgacacaggaaggtacacctgcgtggcagtgaatgctgctggagaaaagcaaagggacattgacctccgagtatatgttccgccaaatattatgggagaagaacagaatgtctctgtcctcattagccaagctgtggaattactatgtcaaagtgatgctattcccccacctactcttacttggttaaaagacggccaccccttgctgaagaaaccaggcctcagtatatctgaaaatagaagtgtgttaaagattgaagatgctcaggttcaagacactggtcgttacacttgtgaagcaacaaatgttgctggaaaaactgaaaaaaactacaatgtcaacatttgggtccccccaaatattggtggttctgatgaacttactcaacttacagtcattgaagggaatctcattagtctgttgtgtgaatcaagtggtattccacccccaaatctcatctggaagaagaaaggctctccagtgctgactgattccatggggcgagttagaattttatctgggggcaggcaattacaaatttcaattgctgaaaagtctgatgcagcactctattcatgtgtggcgtcgaatgttgctgggactgcaaagaaagaatacaatctgcaagtttacattagaccaaccataaccaacagtggcagccaccctactgaaattattgtgacccgagggaagagtatctccttggagtgtgaggtgcagggtattccaccaccaacagtgacctggatgaaagatggccaccccttgatcaaggcaaagggagtagaaatactggatgaaggtcacatccttcagctgaagaacattcatgtatctgacacaggccgttatgtgtgtgttgctgtgaatgtagcaggaatgactgacaaaaaatatgacttaagtgtccatgctcctccaagcatcataggaaaccacaggtcacctgaaaatattagtgtggtagaaaagaactcagtatctttgacttgtgaagcttctggaattcccctgccttccanaacctggttcaaagatgggtggcctgtcagccttagcaattctgtgaggattctttcaggaggcaggatgctacggctgatgcagaccacaatggaagatgctggccaatatacttgngttgtaaggaatgcagctggtgaagaaagaaaaatctttgggctttcagtattagtaccacctcatattgtgggtgaaaatacattggaagatgtgaaggtaaaagagaaacagagtgttacgctgacttgtgaagtgacagggaatccagtgccagaaattacatggcacaaagatgggcagcccctccaagaagatgaagcccatcacattatatctggtggccgttttcttcaaattaccaatgtccaggtgccacacactggaagatatacatgtttggcttccagtccagctggccacaagagcaggagcttcagtcttaatgtatttgtatctcctacaattgctggtgtaggtagtgatggcaaccctgaagatgtcactgtcatccttaacagccctacatctttggtctgtgaagcttattcatatcctccagctaccatcacctggtttaaggatggcactcctttagaatctaaccgaaatattcgtattcttccaggaggcagaactctgcagatcctcaatgcacaggaggacaatgctggaagatactcttgtgtagccacgaatgaggctggagaaatgataaagcactatgaagtgaaggtgtacattccacccataatcaataaaggggacctttgggggccaggtctttcccctaaagaagtgaagatcaaagtaaacaacactctgaccttggaatgtgaagcgtatgcaattccttctgcctccctcagctggtacaaggatggacagccccttaaatccgatgatcatgttaatattgctgcgaatggacacacacttcaaataaaggaggctcaaatatcagacaccggacgatatacttgtgtagcatctaacattgcaggtgaagatgagttggattttgatgtgaatattcaagttcctccaagttttcagaaactctgggaaataggaaacatgctagatactggcaggaatggtgaagccaaagatgtgatcatcaacaatcccatttctctttactgtgagacaaatgctgctccccctcctacactgacatggtacaaagatggccaccctctgacctcaagtgataaagtattgattttgccaggagggcgagtgttgcagattcctcgggctaaagtagaagatgctgggagatacacatgtgtggctgtgaatgaggctggagaagattcccttcaatatgatgtccgtgtactcgtgccgccaattatcnagggagcaaatagtgatctccctgaagaggtcaccgtgctggtgaacaagagtgcactgatagagtgtttatccagtggcagcccagcaccaaggaattcctggcagaaagatggacagcccttgctagaagatgaccatcataaatttctatctaatggacgaattctgcagattctgaatactcaaataacagatatcggcaggtatgtgtgtgttgctgagaacacagctgggagtgccaaaaaatattttaacctcaatgttcatgttcctccaagtgtcattggtcctaaatctgaaaatcttaccgtcgtggtgaacaatttcatctctttgacctgtgaggtctctggttttccacctcctgacctcagctggctcaagaatgaacagcccatcaaactgaacacaaatactctcattgtgcctggtggtcgaactctacagattattcgggccaaggtatcagatggtggtgaatacacttgtatagctatcaatcaagctggcgaaagcaagaaaaagttttccctgactgtttatgtgcccccaagcattaaagaccatgacagtgaatctctttctgtagttaatgtaagagagggaacttctgtgtctttggagtgtgagtcgaacgctgtgccacctccagtcatcacttggtataagaatgggcggatgataacagagtctactcatgtggagattttagctgatggacaaatgctacacattaagaaagctgaggtatctgacacaggccagtatgtatgtagagctataaatgtagcaggacgggatgataaaaatttccacctcaatgtatatgtgccacccagtattgaaggacctgaaagagaagtgattgtggagacgatcagcaatcctgtgacattaacatgtgatgccactgggatcccacctcccacgatagcatggttaaagaaccacaagcgcatagaaaattctgactcactggaagttcgtattttgtctggaggtagcaaactccagattgcccggtctcagcattcagatagtggaaactatacatgtattgcttcaaatatggagggaaaagcccagaaatattactttctttcaattcaagttcctccaagtgttgctggtgctgaaattccaagtgatgtcagtgtccttctaggagaaaatgttgagctggtctgcaatgcaaatggcattcctactccacttattcaatggcttaaagatggaaagcccatagctagtggtgaaacagaaagaatccgagtgagtgcaaatggcagcacattaaacatttatggagctcttacatctgacacggggaaatacacatgtgttgctactaatcccgctggagaagaagaccgaatttttaacttgaatgtctatgttacacctacaattaggggtaataaagatgaagcagagaaactaatgactttagtggatacttcaataaatattgaatgcagagccacagggacgcctccaccacagataaactggctgaagaatggacttcctctgcctctctcctcccatatccggttactggcagcaggacaagttatcaggattgtgagagctcaggtgtctgatgtcgctgtgtatacttgtgtggcctccaacagagctggggtggataataagcattacaatcttcaagtgtttgcaccaccaaatatggacaattcaatggggacagaggaaatcacagttctcaaaggtagttccacctctatggcatgcattactgatggaaccccagctcccagtatggcctggcttagagatggccagcctctggggcttgatgcccatctgacagtcagcacccatggaatggtcctgcagctcctcaaagcagagactgaagattcgggaaagtacacctgcattgcctcaaatgaagctggagaagtcagcaagcactttatcctcaaggtcctagaaccacctcacattaatggatctgaagaacatgaagagatatcagtaattgttaataacccacttgaacttacctgcattgcttctggaatcccagcccctaaaatgacctggatgaaagatggccggccccttccacagacggatcaagtgcaaactctaggaggaggagaggttcttcgaatttctactgctcaggtggaggatacaggaagatatacatgtctggcatccagtcctgcaggagatgatgataaggaatatctagtgagagtgcatgtacctcctaatattgctggaactgatgagccccgggatatcactgtgttacggaacagacaagtgacattggaatgcaagtcagatgcagtgcccccacctgtaattacttggctcagaaatggagaacggttacaggcaacacctcgagtgcgaatcctatctggagggagatacttgcaaatcaacaatgctgacctaggtgatacagccaattatacctgtgttgccagcaacattgcaggaaagactacaagagaatttattctcactgtaaatgttcctccaaacataaaggggggcccccagagccttgtaattcttttaaataagtcaactgtattggaatgcatcgctgaaggtgtgccaactccaaggataacatggagaaaggatggagctgttctagctgggaatcatgcaagatattccatcttggaaaatggattccttcatattcaatcagcacatgtcactgacactggacggtatttgtgtatggccaccaatgctgctggaacagatcgcaggcgaatagatttacaggtccatgttcctccatctattgctccgggtcctaccaacatgactgtaatagtaaatgttcaaactactctggcttgtgaggctactgggataccaaaaccatcaatcaattggagaaaaaatgggcatcttcttaatgtggatcaaaatcagaactcatacaggctcctttcttcaggttcactagtaattatttccccttctgtggatgacactgcaacctatgaatgtactgtgacaaacggtgctggagatgataaaagaactgtggatctcactgtccaagttccaccttccatagctgatgagcctacagatttcctagtaaccaaacatgccccagcagtaattacctgcactgcttcgggagttccatttccctcaattcactggaccaaaaatggtataagactgcttcccaggggagatggctatagaattctgtcctcaggagcaattgaaatacttgccacccaattaaaccatgctggaagatacacttgtgtcgctaggaatgcggctggctctgcacatcgacacgtgacccttcatgttcatgagcctccagtcattcagccccaaccaagtgaactacacgtcattctgaacaatcctattttattaccatgtgaagcaacagggacacccagtcctttcattacttggcaaaaagaaggcatcaatgttaacacttcaggcagaaaccatgcagttcttcctagtggcggcttacagatctccagagctgtccgagaggatgctggcacttacatgtgtgtggcccagaacccggctggtacagccttgggcaaaatcaagttaaatgtccaagttcctccagtcattagccctcatctaaaggaatatgttattgctgtggacaagcccatcacgttatcctgtgaagcagatggcctccctccgcctgacattacatggcataaagatgggcgtgcaattgtggaatctatccgccagcgcgtcctcagctctggctctctgcaaatagcatttgtccagcctggtgatgctggccattacacgtgcatggcagccaatgtagcaggatcaagcagcacaagcaccaagctcaccgtccatgtaccacccaggatcagaagtacagaaggacactacacggtcaatgagaattcacaagccattcttccatgcgtagctgatggaatccccacaccagcaattaactggaaaaaagacaatgttcttttagctaacttgttaggaaaatacactgctgaaccatatggagaactcattttagaaaatgttgtgctggaggattctggcttctatacctgtgttgctaacaatgctgcaggtgaagatacacacactgtcagcctgactgtgcatgttctccccacttttactgaacttcctggagacgtgtcattaaataaaggagaacagctacgattaagctgtaaagctactggtattccattgcccaaattaacatggaccttcaataacaatattattccagcccactttgacagtgtgaatggacacagtgaacttgttattgaaagagtgtcaaaagaggattcaggtacttatgtgtgcaccgcagagaacagcgttggctttgtgaaggcaattggatttgtttatgtgaaagaacctccagtcttcaaaggtgattatccttctaactggattgaaccacttggtgggaatgcaatcctgaattgtgaggtgaaaggagaccccaccccaaccatccagtggaacagaaagggagtggatattgaaattagccacagaatccggcaactgggcaatggctccctggccatctatggcactgttaatgaagatgccggtgactatacatgtgtagctaccaatgaagctggggtggtggagcgcagcatgagtctgactctgcaaagtcctcctattatcactcttgagccagtggaaactgttattaatgctggtggcaaaatcatattgaattgtcaggcaactggagagcctcaaccaaccattacatggtcccgtcaagggcactctatttcctgggatgaccgggttaacgtgttgtccaacaactcattatatattgctgatgctcagaaagaagatacctctgaatttgaatgtgttgctcgaaacttaatgggttctgtccttgtcagagtgccagtcatagtccaggttcatggtggattttcccagtggtctgcatggagagcctgcagtgtcacctgtggaaaaggcatccaaaagaggagtcgtctgtgcaaccagccccttccagccaatggtgggaagccctgccaaggttcagatttggaaatgcgaaactgtcaaaataagccttgtccagtggatggtagctggtcggaatggagtctttgggaagaatgcacaaggagctgtggacgcggcaaccaaaccaggaccaggacttgcaataatccatcagttcagcatggtgggcggccatgtgaagggaatgctgtggaaataattatgtgcaacattaggccttgcccagttcatggagcatggagcgcttggcagccttggggaacatgcagcgaaagttgtgggaaaggtactcagacaagagcaagactttgtaataacccaccaccagcgtttggtgggtcctactgtgatggagcagaaacacagatgcaagtttgcaatgaaagaaattgtccaattcatggcaagtgggcgacttgggccagttggagtgcctgttctgtgtcatgtggaggaggtgccagacagagaacaaggggctgctccgaccctgtgccccagtatggaggaaggaaatgcgaagggagtgatgtccagagtgatttttgcaacagtgacccttgcccaacccatggtaactggagtccttggagtggctggggaacatgcagccggacgtgtaacggagggcagatgcggcggtaccgcacatgtgataaccctcctccctccaatgggggaagagcttgtgggggaccagactcccagatccagaggtgcaacactgacatgtgtcctgtggatggaagttggggaagctggcatagttggagccagtgctctgcctcctgtggaggaggtgaaaagactcggaagcggctgtgcgaccatcctgtgccagttaaaggtggccgtccctgtcccggagacactactcaggtgaccaggtgcaatgtacaagcatgtccaggtgggccccagcgagccagaggaagtgttattggaaatattaatgatgttgaatttggaattgctttccttaatgccacaataactgatagccctaactctgatactagaataatacgtgccaaaattaccaatgtacctcgtagtcttggttcagcaatgagaaagatagtttctattctaaatcccatttattggacaacagcaaaggaaataggagaagcagtcaatggctttaccctcaccaatgcagtcttcaaaagagaaactcaagtggaatttgcaactggagaaatcttgcagatgagtcatattgcccggggcttggattccgatggttctttgctgctagatatcgttgtgagtggctatgtcctacagcttcagtcacctgctgaagtcactgtaaaggattacacagaggactacattcaaacaggtcctgggcagctgtacgcctactcaacccggctgttcaccattgatggcatcagcatcccatacacatggaaccacaccgttttctatgatcaggcacagggaagaatgcctttcttggttgaaacacttcatgcatcctctgtggaatctgactataaccagatagaagagacactgggttttaaaattcatgcttcaatatccaaaggagatcgcagtaatcagtgcccctccgggtttaccttagactcagttggacctttttgtgctgatgaggatgaatgtgcagcagggaatccctgctcccatagctgccacaatgccatggggacttactactgctcctgccctaaaggcctcaccatagctgcagatggaagaacttgtcaagatattgatgagtgtgctttgggtaggcatacctgccacgctggtcaggactgtgacaatacgattggatcttatcgctgtgtggtccgttgtggaagtggctttcgaagaacctctgatgggctgagttgtcaagatattaatgaatgtcaagaatccagcccctgtcaccagcgctgtttcaatgccataggaagtttccattgtggatgtgaacctgggtatcagctcaaaggcagaaaatgcatggatgtgaacgagtgtagacaaaatgtatgcagaccagatcagcactgtaagaacacccgtggtggctataagtgcattgatctttgtccaaatggaatgaccaaggcagaaaatggaacctgtattgatattgatgaatgtaaagatgggacccatcagtgcagatataaccagatatgtgagaatacaagaggcagctatcgttgtgtatgcccaagaggttatcggtctcaaggagttggaagaccctgcatggatattgatgaatgtgaaaatacagatgcctgccagcatgagtgtaagaatacctttggaagttatcagtgcatctgcccacctggctatcaactcacacacaatggaaagacatgccaagatatcgatgaatgtctggagcagaatgtgcactgtggacccaatcgcatgtgcttcaacatgagaggaagctaccagtgcatcgatacaccctgtccacccaactaccaacgggatcctgtttcagggttctgcctcaagaactgtccacccaatgatttggaatgtgccttgagcccatatgccttggaatacaaactcgtctccctcccatttggaatagccaccaatcaagatttaatccggctggttgcatacacacaggatggagtgatgcatcccaggacaactttcctcatggtagatgaggaacagactgttccttttgccttgagggatgaaaacctgaaaggagtggtgtatacaacacgaccactacgagaagcagagacctaccgcatgagggtccgagcctcatcctacagtgccaatgggaccattgaatatcagaccacattcatagtttatatagctgtgtccgcctatccatactaaggaactctccaaagcctattccacatatttaaaccgcattaatcatggcaatcaagcccccttccagattactgtctcttgaacagttgcaatcttggcagcttgaaaatggtgctacactctgttttgtgtgccttccttggtacttctgaggtattttcatgatcccaccatggtcatatcttgaagtatggtctagaaaagtcccttattattttatttattacactggagcagttacttcccaaagattattctgaacatctaacaggacatatcagtgatggtttacagtagtgtagtacctaagatcattttcctgaaagccaaaccaaacaacgaaaaacaagaacaactaattcagaatcaaatagagtttttgagcatttgactatttttagaatcataaaattagttactaagtattttgatcaaagcttataaaataacttacggagatttttgtaagtattgatacattataataggacttgcctattttcatttttaagaagaaaaacaccactcattttataaaatatagtacagctactataaggcttgtttgatcccaaatggtgcttatcttgattgaacattcagaacaaggatattattttcagtgattttgtgagatcagctgaaccacttatgataataataataaaaaagactgctttgccctcacgtcagttgtacatggcatggaactttaaaaattttaatataaactttcatccagttagcttcataacttttacgttccagaattttgtttattttcctgtcaatgaaagcaatttttaaagataccagtgggacaggtttggttttttaaaaatctcatgtgttcaaattaacataaatattacacgtcaatacactgtacatggtggtaatagactctaagcaattgccaagatgtattctatttttatgaagtgtatatatattaccttagtgtgcattttctatataatatcttgatggactcttttataaaattattttataaaaaacaatgttacactaaaatcagcctaaataaattttcacaactttttttcataa

SEQ ID NO: 434523 - DNA, 17803 bp, Homo sapiens
  misc_feature (213)..(213): n is a, c, g, or t
  misc_feature (332)..(332): n is a, c, g, or t
  misc_feature (1677)..(1677): n is a, c, g, or t
  misc_feature (2522)..(2522): n is a, c, g, or t
  misc_feature (4612)..(4612): n is a, c, g, or t
  misc_feature (4860)..(4860): n is a, c, g, or t
  misc_feature (4864)..(4864): n is a, c, g, or t
  misc_feature (4937)..(4937): n is a, c, g, or t
  misc_feature (5221)..(5221): n is a, c, g, or t
  misc_feature (5291)..(5291): n is a, c, g, or t
  misc_feature (6104)..(6104): n is a, c, g, or t
  misc_feature (6107)..(6107): n is a, c, g, or t
  misc_feature (6446)..(6446): n is a, c, g, or t
  misc_feature (7482)..(7482): n is a, c, g, or t
  misc_feature (7600)..(7600): n is a, c, g, or t
  misc_feature (8843)..(8843): n is a, c, g, or t
gaagccgcatccagacaaaagctgccgcatccctgccctgcccaacccctggagggattcgagtttggtgcttgtccccgtctgattctcagcgccaaactttttgctagttcagagattccaagagtctgatgagttactctgagaggaaaccctctgcctgttgttgaggaggactgagcacagtgcttaggcgctgagggggaaaaaganggggaaaaaaaagaaaatgatttcctgggaagttgtccatacagtattcctgtttgctcttctttattcttccctagctcaagatgcgagcccccagtcagagatcagagctgaggaanttcccgagggggcctccacgttggcttttgtgtttgatgtgactggttctatgtatgatgatttagttcaggtgattgaaggggcttccaaaattttggagacgtctttgaaaagacctaaaagacctcttttcaactttgcgttggtgcctttccatgatccagaaattggcccagtgacaattaccacagatcccaagaaatttcaatatgaactcagagaactgtatgttcagggtggtggtgattgcccagaaatgagtattggagctataaaaattgccttggaaatttctcttcctggttctttcatctatgttttcactgatgctcggtccaaagattaccggctcacccatgaggtgctgcaacttatccaacagaaacagtcacaagtcgtatttgttctgactggagattgtgatgacaggacccatattggatataaagtctatgaagaaattgcctctacaagttctggtcaagtgttccatctggacaaaaaacaagttaatgaggtattaaaatgggtagaagaagcagtacaggcctccaaagttcaccttttatccacagatcatttggaacaggctgtaaatacttggagaattccttttgatcccagcctgaaagaggtcactgtgtctttgagtgggccttctccaatgattgaaattcgcaatcctttagggaagctgataaaaaagggatttggcctgcatgagctattaaatatccataactctgccaaagtagtgaatgtgaaagagccagaggctggaatgtggacagtgaagacctcaagcagtggaaggcactctgttcgcattactggcctcagtactattgatttccgagctggcttttctcgaaagcccaccctggacttcaaaaaaacagtcagcagaccagtgcaaggaatacctacctatgtactgctcaatacttctggaatttccactccagctagaatagatcttcttgaacttttgagtatctcaggaagttctcttaagactattcctgttaaatattacccacatcgaaaaccttatggcatatggaatatttctgactttgtaccaccaaatgaagctttctttctcaaagtaacaggctatgataaagatgattacctcttccagagagtatcaagtgtttccttttctagtattgtcccagatgctcccaaagttacgatgcctgagaaaaccccaggatactatctgcagccgggccaaattccctgctctgttgacagtcttttgccctttaccttgagctttgtcagaaatggagttacacttggagtagaccagtatttgaaagaatctgccagtgtgancttagatattgcaaaggtcactttgtctgacgaaggtttctatgaatgcattgctgtcagcagtgcaggtactggacgggcacagacattttttgacgtatcagagccccctccggtcatccaagtgcctaacaatgttacagtcactcctggagagagagcagttttaacatgtctcatcatcagtgcggtggattacaatctaacctggcagaggaatgacagagatgtcagactggcagagccagcgagaattaggaccttggctaatctgtcattggagctaaagagtgtgaaattcaacgatgctggagagtatcattgtatggtttctagtgaaggtggatcatcagccgcttcagttttcctcacagtgcaagaaccacccaaagtcactgtgatgcccaagaatcagtctttcacaggagggtctgaggtctccatcatgtgttctgcaacaggttatcccaaaccaaagattgcctggaccgttaacgatatgtttatcgtgggttcacacaggtataggatgacctcagatggtaccttatttatcaaaaatgcagctcccaaagatgcagggatctatggttgcctagcaagtaattcagctggaacagataaacagaattctactctcagatacattgaagcccctaagttgatggtagttcagagtgagctcttggttgcccttggggatataaccgttatggaatgcaaaacctctggtattcctccacctcaagttaaatggttcaaaggagatcttgagttgaggccctcaacattcctcattattgaccctctcttgggacttttgaagattcaagaaacacaagatntggatgctggcgattatacctgtgtagccatcaatgaggctggaagagcaactggcaagataactctggatgttggctcacctccagttttcatacaagaacctgctgatgtgtctatggaaattggctcaaatgtgacattaccttgttatgttcagggttatccagaaccaacaatcaaatggcgaagattagacaacatgccaattttctcaagacctttttcagttagttccatcagccaactaagaacaggagctctctttattttaaacttatgggcaagtgataaaggaacctatatttgtgaagctgaaaaccagtttggaaagatccagtcagagacaacagtaacagtgaccggacttgttgctccacttattggaatcagcccttcagtggccaatgttattgaaggacagcagcttactttgccctgtactctgttagctggaaatcccattccagaacgtcggtggattaagaattcagctatgttgctccaaaatccttacatcactgtgcgcagtgatgggagcctccatattgaaagagttcagcttcaggatggtggtgaatatacttgtgtggccagtaacgttgctgggaccaataacaaaactacctctgtggttgtgcatgttctgccaaccattcagcatgggcagcagatactcagtacaattgaaggcattccagtaactttaccatgcaaagcaagtggaaatcccaaaccgtctgtcatctggtccaagaaaggagagctgatttcaaccagcagtgctaagttttcagcaggagctgatggtagtctgtatgtggtatcacctggaggagaggagagtggggagtatgtctgcactgccaccaatacagccggctacgccaaaaggaaagtgcagctaacagtctatgtaaggcccagagtgtttggagatcaacgaggactgtcccaggataagcctgttgagatctccgtccttgcaggggaagaggtaacacttccatgtgaagtgaagagcttacctccacccataattacttgggccaaagaaacccagctcatctcaccgttctctccaagacacacattcctcccttctggttcaatgaagatcactgaaacccgcacttcagatagtgggatgtatctttgtgttgccacaaatattgctgggaatgtgactcaggctgtcaaattaaatgtccatgttcctccaaagatacagcgtggacctaaacatctcaaagtccaagttggtcaaagagtggatattccatgtaatgctcaagggactcctcttcctgtaatcacctggtccaaaggtggaagcactatgctggttgatggagagcaccatgttagcaatccagacggaactttaagcatcgaccaagccacgccctcagatgctggcatatatacatgtgttgctactaacatagcaggcactgatgaaacagagataacgctacatgtccaagaaccacccacagtggaagatctagaacctccatataacactactttccaagaaagagtggccaatcaacgcattgaatttccatgtcctgcaaaaggtacccctaaaccaaccatcaaatggttacacaatggtagagagttgacaggcagagagcctggcatttctatcttggaagatggcacattgctggttattgcttctgttacaccctatgacaatggggagtacatctgtgtggcagtcaatgaagctggaaccacagaaagaaaatataacctcaaagtccatgttcctccagtaattaaagataaagaacaagttacaaatgtgtcggtgttgttaaatcagctgaccaatctcttctgtgaagtggaaggcactccatctcccatcattatgtggtataaagataatgtccaggtgactgaaagcagcactattcagactgtgaacaatgggaagatactgaagctcttcagagccactccagaggatgcaggaagatattcctgcaaagcaattaatattgcaggcacttctcagaagtactttaacattgatgtgctagttccacccaccataataggtaccaacttcccaaangaagtctcagttgtcctcaaccgtgacgtcgcccttgaatgccaggtcaaaggcactccctttcctgatattcattggttcaaagatggcaagcctttatttttgggcgatcctaatgttgaacttctagacagaggacaagtcttacatttaaagaatgcacggagaaatgacaaggggcgctaccaatgtactgtgtctaatgcagctggcaaacaagccaaggatataaaactgactatctatantccncctagtattaaaggaggaaatgtcaccacagacatatcagtattgatcaacagccttattaaactggaatgtnaaacacggggacttccaatgcctgccattacttggtataaggacgggcagccaatcatgtccagctcacaagcactttatattgataaaggacaatatcttcatattcctcgagcacaggtctctgattcagcaacatatacgtgtcacgtagccaatgttgctggaactgctgaaaaatcattccatgtggatgtctatgttcctccaatgattgaaggcaacttggccacgcctttgaataagcaagtagttattgctcattctctgacactggagtgcaangctgctggaaacccttctcccattctcacctggttgaaagatggtgtacctgtgaaagctaatgacaatntccgcatagaagctggtgggaagaaactcgaaatcatgagtgcccaagaaattgatcgaggacagtacatatgcgtggctaccagtgtggcaggagaaaaggaaatcaaatatgaagttgatgtcttggtgccaccagctatagaaggaggagatgaaacatcttacttcattgtgatggttaataacttactggagctagattgtcatgtgacaggctctcccccaccaactatcatgtggctgaaggatggccagttaattgatgaaagggatggattcaagattttattaaatggacgcaaactggttattgctcaggctcaagtgtcaaacacaggcctttatcggtgcatggcagcaaatactgctggagaccacaagaaggaatttgaagtgactgttcatgttcctccaacaatcaagtcctcaggcctttctgagagagttgtggtaaaatacaagcctgtcgccttgcagtgcatagccaatgggattccaaatccttccattacatggttaaaagatgaccagcctgtgaacactgcccaaggaaaccttaaaatacagtcttctggtcgagttctacaaattgccaaaaccctgttggaagatgctggcagatacacatgtgtggctaccaacgcagctggagaaacacaacagcacattcaactgcatgttcatgaaccacctagtctggaagatgctggaaaaatgctgaatgagactgtgttggtgagcaaccctgtacagctggagtgtaaggcagctggaaatcctgtgcctgttattacatggtacaaagataatngtntactctcaggttccaccagcatgactttcttgaacagaggacagatcattgatattgaaagtgcccagatctcagatgctggcatatataaatgcgtggccatcaactcagctggagctacagagttattttacagtctgcaagttcatgtggccccatcaatttctggcagcaataacatggtggcagtggtggttaataacccggtgaggttagaatgtgaagccagaggtattcctgccccaagtctgacctggttgaaagatgggagtcctgtttctagtttttctaatggattacaggttctctctggtggtcgaatcctagcattgaccagtncacaaatcagcgacacaggaaggtacacctgcgtggcagtgaatgctgctggagaaaagcaaagggacattgacctccgagtatatgttccgccaaatattatgggagaagaacagaatgtctctgtcctcattagccaagctgtggaattactatgtcaaagtgatgctattcccccacctactcttacttggttaaaagacggccaccccttgctgaagaaaccaggcctcagtatatctgaaaatagaagtgtgttaaagattgaagatgctcaggttcaagacactggtcgttacacttgtgaagcaacaaatgttgctggaaaaactgaaaaaaactacaatgtcaacatttgggtccccccaaatattggtggttctgatgaacttactcaacttacagtcattgaagggaatctcattagtctgttgtgtgaatcaagtggtattccacccccaaatctcatctggaagaagaaaggctctccagtgctgactgattccatggggcgagttagaattttatctgggggcaggcaattacaaatttcaattgctgaaaagtctgatgcagcactctattcatgtgtggcgtcgaatgttgctgggactgcaaagaaagaatacaatctgcaagtttacattagaccaaccataaccaacagtggcagccaccctactgaaattattgtgacccgagggaagagtatctccttggagtgtgaggtgcagggtattccaccaccaacagtgacctggatgaaagatggccaccccttgatcaaggcaaagggagtagaaatactggatgaaggtcacatccttcagctgaagaacattcatgtatctgacacaggccgttatgtgtgtgttgctgtgaatgtagcaggaatgactgacaaaaaatatgacttaagtgtccatgctcctccaagcatcataggaaaccacaggtcacctgaaaatattagtgtggtagaaaagaactcagtatctttgacttgtgaagcttctggaattcccctgccttccanaacctggttcaaagatgggtggcctgtcagccttagcaattctgtgaggattctttcaggaggcaggatgctacggctgatgcagaccacaatggaagatgctggccaatatacttgngttgtaaggaatgcagctggtgaagaaagaaaaatctttgggctttcagtattagtaccacctcatattgtgggtgaaaatacattggaagatgtgaaggtaaaagagaaacagagtgttacgctgacttgtgaagtgacagggaatccagtgccagaaattacatggcacaaagatgggcagcccctccaagaagatgaagcccatcacattatatctggtggccgttttcttcaaattaccaatgtccaggtgccacacactggaagatatacatgtttggcttccagtccagctggccacaagagcaggagcttcagtcttaatgtatttgtatctcctacaattgctggtgtaggtagtgatggcaaccctgaagatgtcactgtcatccttaacagccctacatctttggtctgtgaagcttattcatatcctccagctaccatcacctggtttaaggatggcactcctttagaatctaaccgaaatattcgtattcttccaggaggcagaactctgcagatcctcaatgcacaggaggacaatgctggaagatactcttgtgtagccacgaatgaggctggagaaatgataaagcactatgaagtgaaggtgtacattccacccataatcaataaaggggacctttgggggccaggtctttcccctaaagaagtgaagatcaaagtaaacaacactctgaccttggaatgtgaagcgtatgcaattccttctgcctccctcagctggtacaaggatggacagccccttaaatccgatgatcatgttaatattgctgcgaatggacacacacttcaaataaaggaggctcaaatatcagacaccggacgatatacttgtgtagcatctaacattgcaggtgaagatgagttggattttgatgtgaatattcaagttcctccaagttttcagaaactctgggaaataggaaacatgctagatactggcaggaatggtgaagccaaagatgtgatcatcaacaatcccatttctctttactgtgagacaaatgctgctccccctcctacactgacatggtacaaagatggccaccctctgacctcaagtgataaagtattgattttgccaggagggcgagtgttgcagattcctcgggctaaagtagaagatgctgggagatacacatgtgtggctgtgaatgaggctggagaagattcccttcaatatgatgtccgtgtactcgtgccgccaattatcnagggagcaaatagtgatctccctgaagaggtcaccgtgctggtgaacaagagtgcactgatagagtgtttatccagtggcagcccagcaccaaggaattcctggcagaaagatggacagcccttgctagaagatgaccatcataaatttctatctaatggacgaattctgcagattctgaatactcaaataacagatatcggcaggtatgtgtgtgttgctgagaacacagctgggagtgccaaaaaatattttaacctcaatgttcatgttcctccaagtgtcattggtcctaaatctgaaaatcttaccgtcgtggtgaacaatttcatctctttgacctgtgaggtctctggttttccacctcctgacctcagctggctcaagaatgaacagcccatcaaactgaacacaaatactctcattgtgcctggtggtcgaactctacagattattcgggccaaggtatcagatggtggtgaatacacttgtatagctatcaatcaagctggcgaaagcaagaaaaagttttccctgactgtttatgtgcccccaagcattaaagaccatgacagtgaatctctttctgtagttaatgtaagagagggaacttctgtgtctttggagtgtgagtcgaacgctgtgccacctccagtcatcacttggtataagaatgggcggatgataacagagtctactcatgtggagattttagctgatggacaaatgctacacattaagaaagctgaggtatctgacacaggccagtatgtatgtagagctataaatgtagcaggacgggatgataaaaatttccacctcaatgtatatgtgccacccagtattgaaggacctgaaagagaagtgattgtggagacgatcagcaatcctgtgacattaacatgtgatgccactgggatcccacctcccacgatagcatggttaaagaaccacaagcgcatagaaaattctgactcactggaagttcgtattttgtctggaggtagcaaactccagattgcccggtctcagcattcagatagtggaaactatacatgtattgcttcaaatatggagggaaaagcccagaaatattactttctttcaattcaagttcctccaagtgttgctggtgctgaaattccaagtgatgtcagtgtccttctaggagaaaatgttgagctggtctgcaatgcaaatggcattcctactccacttattcaatggcttaaagatggaaagcccatagctagtggtgaaacagaaagaatccgagtgagtgcaaatggcagcacattaaacatttatggagctcttacatctgacacggggaaatacacatgtgttgctactaatcccgctggagaagaagaccgaatttttaacttgaatgtctatgttacacctacaattaggggtaataaagatgaagcagagaaactaatgactttagtggatacttcaataaatattgaatgcagagccacagggacgcctccaccacagataaactggctgaagaatggacttcctctgcctctctcctcccatatccggttactggcagcaggacaagttatcaggattgtgagagctcaggtgtctgatgtcgctgtgtatacttgtgtggcctccaacagagctggggtggataataagcattacaatcttcaagtgtttgcaccaccaaatatggacaattcaatggggacagaggaaatcacagttctcaaaggtagttccacctctatggcatgcattactgatggaaccccagctcccagtatggcctggcttagagatggccagcctctggggcttgatgcccatctgacagtcagcacccatggaatggtcctgcagctcctcaaagcagagactgaagattcgggaaagtacacctgcattgcctcaaatgaagctggagaagtcagcaagcactttatcctcaaggtcctagaaccacctcacattaatggatctgaagaacatgaagagatatcagtaattgttaataacccacttgaacttacctgcattgcttctggaatcccagcccctaaaatgacctggatgaaagatggccggccccttccacagacggatcaagtgcaaactctaggaggaggagaggttcttcgaatttctactgctcaggtggaggatacaggaagatatacatgtctggcatccagtcctgcaggagatgatgataaggaatatctagtgagagtgcatgtacctcctaatattgctggaactgatgagccccgggatatcactgtgttacggaacagacaagtgacattggaatgcaagtcagatgcagtgcccccacctgtaattacttggctcagaaatggagaacggttacaggcaacacctcgagtgcgaatcctatctggagggagatacttgcaaatcaacaatgctgacctaggtgatacagccaattatacctgtgttgccagcaacattgcaggaaagactacaagagaatttattctcactgtaaatgttcctccaaacataaaggggggcccccagagccttgtaattcttttaaataagtcaactgtattggaatgcatcgctgaaggtgtgccaactccaaggataacatggagaaaggatggagctgttctagctgggaatcatgcaagatattccatcttggaaaatggattccttcatattcaatcagcacatgtcactgacactggacggtatttgtgtatggccaccaatgctgctggaacagatcgcaggcgaatagatttacaggtccatgttcctccatctattgctccgggtcctaccaacatgactgtaatagtaaatgttcaaactactctggcttgtgaggctactgggataccaaaaccatcaatcaattggagaaaaaatgggcatcttcttaatgtggatcaaaatcagaactcatacaggctcctttcttcaggttcactagtaattatttccccttctgtggatgacactgcaacctatgaatgtactgtgacaaacggtgctggagatgataaaagaactgtggatctcactgtccaagttccaccttccatagctgatgagcctacagatttcctagtaaccaaacatgccccagcagtaattacctgcactgcttcgggagttccatttccctcaattcactggaccaaaaatggtataagactgcttcccaggggagatggctatagaattctgtcctcaggagcaattgaaatacttgccacccaattaaaccatgctggaagatacacttgtgtcgctaggaatgcggctggctctgcacatcgacacgtgacccttcatgttcatgagcctccagtcattcagccccaaccaagtgaactacacgtcattctgaacaatcctattttattaccatgtgaagcaacagggacacccagtcctttcattacttggcaaaaagaaggcatcaatgttaacacttcaggcagaaaccatgcagttcttcctagtggcggcttacagatctccagagctgtccgagaggatgctggcacttacatgtgtgtggcccagaacccggctggtacagccttgggcaaaatcaagttaaatgtccaagttcctccagtcattagccctcatctaaaggaatatgttattgctgtggacaagcccatcacgttatcctgtgaagcagatggcctccctccgcctgacattacatggcataaagatgggcgtgcaattgtggaatctatccgccagcgcgtcctcagctctggctctctgcaaatagcatttgtccagcctggtgatgctggccattacacgtgcatggcagccaatgtagcaggatcaagcagcacaagcaccaagctcaccgtccatgtaccacccaggatcagaagtacagaaggacactacacggtcaatgagaattcacaagccattcttccatgcgtagctgatggaatccccacaccagcaattaactggaaaaaagacaatgttcttttagctaacttgttaggaaaatacactgctgaaccatatggagaactcattttagaaaatgttgtgctggaggattctggcttctatacctgtgttgctaacaatgctgcaggtgaagatacacacactgtcagcctgactgtgcatgttctccccacttttactgaacttcctggagacgtgtcattaaataaaggagaacagctacgattaagctgtaaagctactggtattccattgcccaaattaacatggaccttcaataacaatattattccagcccactttgacagtgtgaatggacacagtgaacttgttattgaaagagtgtcaaaagaggattcaggtacttatgtgtgcaccgcagagaacagcgttggctttgtgaaggcaattggatttgtttatgtgaaagaacctccagtcttcaaaggtgattatccttctaactggattgaaccacttggtgggaatgcaatcctgaattgtgaggtgaaaggagaccccaccccaaccatccagtggaacagaaagggagtggatattgaaattagccacagaatccggcaactgggcaatggctccctggccatctatggcactgttaatgaagatgccggtgactatacatgtgtagctaccaatgaagctggggtggtggagcgcagcatgagtctgactctgcaaagtcctcctattatcactcttgagccagtggaaactgttattaatgctggtggcaaaatcatattgaattgtcaggcaactggagagcctcaaccaaccattacatggtcccgtcaagggcactctatttcctgggatgaccgggttaacgtgttgtccaacaactcattatatattgctgatgctcagaaagaagatacctctgaatttgaatgtgttgctcgaaacttaatgggttctgtccttgtcagagtgccagtcatagtccaggttcatggtggattttcccagtggtctgcatggagagcctgcagtgtcacctgtggaaaaggcatccaaaagaggagtcgtctgtgcaaccagccccttccagccaatggtgggaagccctgccaaggttcagatttggaaatgcgaaactgtcaaaataagccttgtccagtggatggtagctggtcggaatggagtctttgggaagaatgcacaaggagctgtggacgcggcaaccaaaccaggaccaggacttgcaataatccatcagttcagcatggtgggcggccatgtgaagggaatgctgtggaaataattatgtgcaacattaggccttgcccagttcatggagcatggagcgcttggcagccttggggaacatgcagcgaaagttgtgggaaaggtactcagacaagagcaagactttgtaataacccaccaccagcgtttggtgggtcctactgtgatggagcagaaacacagatgcaagtttgcaatgaaagaaattgtccaattcatggcaagtgggcgacttgggccagttggagtgcctgttctgtgtcatgtggaggaggtgccagacagagaacaaggggctgctccgaccctgtgccccagtatggaggaaggaaatgcgaagggagtgatgtccagagtgatttttgcaacagtgacccttgcccaacccatggtaactggagtccttggagtggctggggaacatgcagccggacgtgtaacggagggcagatgcggcggtaccgcacatgtgataaccctcctccctccaatgggggaagagcttgtgggggaccagactcccagatccagaggtgcaacactgacatgtgtcctgtggatggaagttggggaagctggcatagttggagccagtgctctgcctcctgtggaggaggtccctgtcccggagacactactcaggtgaccaggtgcaatgtacaagcatgtccaggtgggccccagcgagccagaggaagtgttattggaaatattaatgatgttgaatttggaattgctttccttaatgccacaataactgatagccctaactctgatactagaataatacgtgccaaaattaccaatgtacctcgtagtcttggttcagcaatgagaaagatagtttctattctaaatcccatttattggacaacagcaaaggaaataggagaagcagtcaatggctttaccctcaccaatgcagtcttcaaaagagaaactcaagtggaatttgcaactggagaaatcttgcagatgagtcatattgcccggggcttggattccgatggttctttgctgctagatatcgttgtgagtggctatgtcctacagcttcagtcacctgctgaagtcactgtaaaggattacacagaggactacattcaaacaggtcctgggcagctgtacgcctactcaacccggctgttcaccattgatggcatcagcatcccatacacatggaaccacaccgttttctatgatcaggcacagggaagaatgcctttcttggttgaaacacttcatgcatcctctgtggaatctgactataaccagatagaagagacactgggttttaaaattcatgcttcaatatccaaaggagatcgcagtaatcagtgcccctccgggtttaccttagactcagttggacctttttgtgctgatgaggatgaatgtgcagcagggaatccctgctcccatagctgccacaatgccatggggacttactactgctcctgccctaaaggcctcaccatagctgcagatggaagaacttgtcaagatattgatgagtgtgctttgggtaggcatacctgccacgctggtcaggactgtgacaatacgattggatcttatcgctgtgtggtccgttgtggaagtggctttcgaagaacctctgatgggctgagttgtcaagatattaatgaatgtcaagaatccagcccctgtcaccagcgctgtttcaatgccataggaagtttccattgtggatgtgaacctgggtatcagctcaaaggcagaaaatgcatggatgtgaacgagtgtagacaaaatgtatgcagaccagatcagcactgtaagaacacccgtggtggctataagtgcattgatctttgtccaaatggaatgaccaaggcagaaaatggaacctgtattgatattgatgaatgtaaagatgggacccatcagtgcagatataaccagatatgtgagaatacaagaggcagctatcgttgtgtatgcccaagaggttatcggtctcaaggagttggaagaccctgcatggatattgatgaatgtgaaaatacagatgcctgccagcatgagtgtaagaatacctttggaagttatcagtgcatctgcccacctggctatcaactcacacacaatggaaagacatgccaagatatcgatgaatgtctggagcagaatgtgcactgtggacccaatcgcatgtgcttcaacatgagaggaagctaccagtgcatcgatacaccctgtccacccaactaccaacgggatcctgtttcagggttctgcctcaagaactgtccacccaatgatttggaatgtgccttgagcccatatgccttggaatacaaactcgtctccctcccatttggaatagccaccaatcaagatttaatccggctggttgcatacacacaggatggagtgatgcatcccaggacaactttcctcatggtagatgaggaacagactgttccttttgccttgagggatgaaaacctgaaaggagtggtgtatacaacacgaccactacgagaagcagagacctaccgcatgagggtccgagcctcatcctacagtgccaatgggaccattgaatatcagaccacattcatagtttatatagctgtgtccgcctatccatactaaggaactctccaaagcctattccacatatttaaaccgcattaatcatggcaatcaagcccccttccagattactgtctcttgaacagttgcaatcttggcagcttgaaaatggtgctacactctgttttgtgtgccttccttggtacttctgaggtattttcatgatcccaccatggtcatatcttgaagtatggtctagaaaagtcccttattattttatttattacactggagcagttacttcccaaagattattctgaacatctaacaggacatatcagtgatggtttacagtagtgtagtacctaagatcattttcctgaaagccaaaccaaacaacgaaaaacaagaacaactaattcagaatcaaatagagtttttgagcatttgactatttttagaatcataaaattagttactaagtattttgatcaaagcttataaaataacttacggagatttttgtaagtattgatacattataataggacttgcctattttcatttttaagaagaaaaacaccactcattttataaaatatagtacagctactataaggcttgtttgatcccaaatggtgcttatcttgattgaacattcagaacaaggatattattttcagtgattttgtgagatcagctgaaccacttatgataataataataaaaaagactgctttgccctcacgtcagttgtacatggcatggaactttaaaaattttaatataaactttcatccagttagcttcataacttttacgttccagaattttgtttattttcctgtcaatgaaagcaatttttaaagataccagtgggacaggtttggttttttaaaaatctcatgtgttcaaattaacataaatattacacgtcaatacactgtacatggtggtaatagactctaagcaattgccaagatgtattctatttttatgaagtgtatatatattaccttagtgtgcattttctatataatatcttgatggactcttttataaaattattttataaaaaacaatgttacactaaaatcagcctaaataaattttcacaactttttttcataa

SEQ ID NO: 434524 - DNA, 17485 bp, Homo sapiens
  misc_feature (213)..(213): n is a, c, g, or t
  misc_feature (332)..(332): n is a, c, g, or t
  misc_feature (1677)..(1677): n is a, c, g, or t
  misc_feature (2522)..(2522): n is a, c, g, or t
  misc_feature (4612)..(4612): n is a, c, g, or t
  misc_feature (4860)..(4860): n is a, c, g, or t
  misc_feature (4864)..(4864): n is a, c, g, or t
  misc_feature (4937)..(4937): n is a, c, g, or t
  misc_feature (5221)..(5221): n is a, c, g, or t
  misc_feature (5291)..(5291): n is a, c, g, or t
  misc_feature (6104)..(6104): n is a, c, g, or t
  misc_feature (6107)..(6107): n is a, c, g, or t
  misc_feature (6446)..(6446): n is a, c, g, or t
  misc_feature (7482)..(7482): n is a, c, g, or t
  misc_feature (7600)..(7600): n is a, c, g, or t
  misc_feature (8843)..(8843): n is a, c, g, or t
gaagccgcatccagacaaaagctgccgcatccctgccctgcccaacccctggagggattcgagtttggtgcttgtccccgtctgattctcagcgccaaactttttgctagttcagagattccaagagtctgatgagttactctgagaggaaaccctctgcctgttgttgaggaggactgagcacagtgcttaggcgctgagggggaaaaaganggggaaaaaaaagaaaatgatttcctgggaagttgtccatacagtattcctgtttgctcttctttattcttccctagctcaagatgcgagcccccagtcagagatcagagctgaggaanttcccgagggggcctccacgttggcttttgtgtttgatgtgactggttctatgtatgatgatttagttcaggtgattgaaggggcttccaaaattttggagacgtctttgaaaagacctaaaagacctcttttcaactttgcgttggtgcctttccatgatccagaaattggcccagtgacaattaccacagatcccaagaaatttcaatatgaactcagagaactgtatgttcagggtggtggtgattgcccagaaatgagtattggagctataaaaattgccttggaaatttctcttcctggttctttcatctatgttttcactgatgctcggtccaaagattaccggctcacccatgaggtgctgcaacttatccaacagaaacagtcacaagtcgtatttgttctgactggagattgtgatgacaggacccatattggatataaagtctatgaagaaattgcctctacaagttctggtcaagtgttccatctggacaaaaaacaagttaatgaggtattaaaatgggtagaagaagcagtacaggcctccaaagttcaccttttatccacagatcatttggaacaggctgtaaatacttggagaattccttttgatcccagcctgaaagaggtcactgtgtctttgagtgggccttctccaatgattgaaattcgcaatcctttagggaagctgataaaaaagggatttggcctgcatgagctattaaatatccataactctgccaaagtagtgaatgtgaaagagccagaggctggaatgtggacagtgaagacctcaagcagtggaaggcactctgttcgcattactggcctcagtactattgatttccgagctggcttttctcgaaagcccaccctggacttcaaaaaaacagtcagcagaccagtgcaaggaatacctacctatgtactgctcaatacttctggaatttccactccagctagaatagatcttcttgaacttttgagtatctcaggaagttctcttaagactattcctgttaaatattacccacatcgaaaaccttatggcatatggaatatttctgactttgtaccaccaaatgaagctttctttctcaaagtaacaggctatgataaagatgattacctcttccagagagtatcaagtgtttccttttctagtattgtcccagatgctcccaaagttacgatgcctgagaaaaccccaggatactatctgcagccgggccaaattccctgctctgttgacagtcttttgccctttaccttgagctttgtcagaaatggagttacacttggagtagaccagtatttgaaagaatctgccagtgtgancttagatattgcaaaggtcactttgtctgacgaaggtttctatgaatgcattgctgtcagcagtgcaggtactggacgggcacagacattttttgacgtatcagagccccctccggtcatccaagtgcctaacaatgttacagtcactcctggagagagagcagttttaacatgtctcatcatcagtgcggtggattacaatctaacctggcagaggaatgacagagatgtcagactggcagagccagcgagaattaggaccttggctaatctgtcattggagctaaagagtgtgaaattcaacgatgctggagagtatcattgtatggtttctagtgaaggtggatcatcagccgcttcagttttcctcacagtgcaagaaccacccaaagtcactgtgatgcccaagaatcagtctttcacaggagggtctgaggtctccatcatgtgttctgcaacaggttatcccaaaccaaagattgcctggaccgttaacgatatgtttatcgtgggttcacacaggtataggatgacctcagatggtaccttatttatcaaaaatgcagctcccaaagatgcagggatctatggttgcctagcaagtaattcagctggaacagataaacagaattctactctcagatacattgaagcccctaagttgatggtagttcagagtgagctcttggttgcccttggggatataaccgttatggaatgcaaaacctctggtattcctccacctcaagttaaatggttcaaaggagatcttgagttgaggccctcaacattcctcattattgaccctctcttgggacttttgaagattcaagaaacacaagatntggatgctggcgattatacctgtgtagccatcaatgaggctggaagagcaactggcaagataactctggatgttggctcacctccagttttcatacaagaacctgctgatgtgtctatggaaattggctcaaatgtgacattaccttgttatgttcagggttatccagaaccaacaatcaaatggcgaagattagacaacatgccaattttctcaagacctttttcagttagttccatcagccaactaagaacaggagctctctttattttaaacttatgggcaagtgataaaggaacctatatttgtgaagctgaaaaccagtttggaaagatccagtcagagacaacagtaacagtgaccggacttgttgctccacttattggaatcagcccttcagtggccaatgttattgaaggacagcagcttactttgccctgtactctgttagctggaaatcccattccagaacgtcggtggattaagaattcagctatgttgctccaaaatccttacatcactgtgcgcagtgatgggagcctccatattgaaagagttcagcttcaggatggtggtgaatatacttgtgtggccagtaacgttgctgggaccaataacaaaactacctctgtggttgtgcatgttctgccaaccattcagcatgggcagcagatactcagtacaattgaaggcattccagtaactttaccatgcaaagcaagtggaaatcccaaaccgtctgtcatctggtccaagaaaggagagctgatttcaaccagcagtgctaagttttcagcaggagctgatggtagtctgtatgtggtatcacctggaggagaggagagtggggagtatgtctgcactgccaccaatacagccggctacgccaaaaggaaagtgcagctaacagtctatgtaaggcccagagtgtttggagatcaacgaggactgtcccaggataagcctgttgagatctccgtccttgcaggggaagaggtaacacttccatgtgaagtgaagagcttacctccacccataattacttgggccaaagaaacccagctcatctcaccgttctctccaagacacacattcctcccttctggttcaatgaagatcactgaaacccgcacttcagatagtgggatgtatctttgtgttgccacaaatattgctgggaatgtgactcaggctgtcaaattaaatgtccatgttcctccaaagatacagcgtggacctaaacatctcaaagtccaagttggtcaaagagtggatattccatgtaatgctcaagggactcctcttcctgtaatcacctggtccaaaggtggaagcactatgctggttgatggagagcaccatgttagcaatccagacggaactttaagcatcgaccaagccacgccctcagatgctggcatatatacatgtgttgctactaacatagcaggcactgatgaaacagagataacgctacatgtccaagaaccacccacagtggaagatctagaacctccatataacactactttccaagaaagagtggccaatcaacgcattgaatttccatgtcctgcaaaaggtacccctaaaccaaccatcaaatggttacacaatggtagagagttgacaggcagagagcctggcatttctatcttggaagatggcacattgctggttattgcttctgttacaccctatgacaatggggagtacatctgtgtggcagtcaatgaagctggaaccacagaaagaaaatataacctcaaagtccatgttcctccagtaattaaagataaagaacaagttacaaatgtgtcggtgttgttaaatcagctgaccaatctcttctgtgaagtggaaggcactccatctcccatcattatgtggtataaagataatgtccaggtgactgaaagcagcactattcagactgtgaacaatgggaagatactgaagctcttcagagccactccagaggatgcaggaagatattcctgcaaagcaattaatattgcaggcacttctcagaagtactttaacattgatgtgctagttccacccaccataataggtaccaacttcccaaangaagtctcagttgtcctcaaccgtgacgtcgcccttgaatgccaggtcaaaggcactccctttcctgatattcattggttcaaagatggcaagcctttatttttgggcgatcctaatgttgaacttctagacagaggacaagtcttacatttaaagaatgcacggagaaatgacaaggggcgctaccaatgtactgtgtctaatgcagctggcaaacaagccaaggatataaaactgactatctatantccncctagtattaaaggaggaaatgtcaccacagacatatcagtattgatcaacagccttattaaactggaatgtnaaacacggggacttccaatgcctgccattacttggtataaggacgggcagccaatcatgtccagctcacaagcactttatattgataaaggacaatatcttcatattcctcgagcacaggtctctgattcagcaacatatacgtgtcacgtagccaatgttgctggaactgctgaaaaatcattccatgtggatgtctatgttcctccaatgattgaaggcaacttggccacgcctttgaataagcaagtagttattgctcattctctgacactggagtgcaangctgctggaaacccttctcccattctcacctggttgaaagatggtgtacctgtgaaagctaatgacaatntccgcatagaagctggtgggaagaaactcgaaatcatgagtgcccaagaaattgatcgaggacagtacatatgcgtggctaccagtgtggcaggagaaaaggaaatcaaatatgaagttgatgtcttggtgccaccagctatagaaggaggagatgaaacatcttacttcattgtgatggttaataacttactggagctagattgtcatgtgacaggctctcccccaccaactatcatgtggctgaaggatggccagttaattgatgaaagggatggattcaagattttattaaatggacgcaaactggttattgctcaggctcaagtgtcaaacacaggcctttatcggtgcatggcagcaaatactgctggagaccacaagaaggaatttgaagtgactgttcatgttcctccaacaatcaagtcctcaggcctttctgagagagttgtggtaaaatacaagcctgtcgccttgcagtgcatagccaatgggattccaaatccttccattacatggttaaaagatgaccagcctgtgaacactgcccaaggaaaccttaaaatacagtcttctggtcgagttctacaaattgccaaaaccctgttggaagatgctggcagatacacatgtgtggctaccaacgcagctggagaaacacaacagcacattcaactgcatgttcatgaaccacctagtctggaagatgctggaaaaatgctgaatgagactgtgttggtgagcaaccctgtacagctggagtgtaaggcagctggaaatcctgtgcctgttattacatggtacaaagataatngtntactctcaggttccaccagcatgactttcttgaacagaggacagatcattgatattgaaagtgcccagatctcagatgctggcatatataaatgcgtggccatcaactcagctggagctacagagttattttacagtctgcaagttcatgtggccccatcaatttctggcagcaataacatggtggcagtggtggttaataacccggtgaggttagaatgtgaagccagaggtattcctgccccaagtctgacctggttgaaagatgggagtcctgtttctagtttttctaatggattacaggttctctctggtggtcgaatcctagcattgaccagtncacaaatcagcgacacaggaaggtacacctgcgtggcagtgaatgctgctggagaaaagcaaagggacattgacctccgagtatatgttccgccaaatattatgggagaagaacagaatgtctctgtcctcattagccaagctgtggaattactatgtcaaagtgatgctattcccccacctactcttacttggttaaaagacggccaccccttgctgaagaaaccaggcctcagtatatctgaaaatagaagtgtgttaaagattgaagatgctcaggttcaagacactggtcgttacacttgtgaagcaacaaatgttgctggaaaaactgaaaaaaactacaatgtcaacatttgggtccccccaaatattggtggttctgatgaacttactcaacttacagtcattgaagggaatctcattagtctgttgtgtgaatcaagtggtattccacccccaaatctcatctggaagaagaaaggctctccagtgctgactgattccatggggcgagttagaattttatctgggggcaggcaattacaaatttcaattgctgaaaagtctgatgcagcactctattcatgtgtggcgtcgaatgttgctgggactgcaaagaaagaatacaatctgcaagtttacattagaccaaccataaccaacagtggcagccaccctactgaaattattgtgacccgagggaagagtatctccttggagtgtgaggtgcagggtattccaccaccaacagtgacctggatgaaagatggccaccccttgatcaaggcaaagggagtagaaatactggatgaaggtcacatccttcagctgaagaacattcatgtatctgacacaggccgttatgtgtgtgttgctgtgaatgtagcaggaatgactgacaaaaaatatgacttaagtgtccatgctcctccaagcatcataggaaaccacaggtcacctgaaaatattagtgtggtagaaaagaactcagtatctttgacttgtgaagcttctggaattcccctgccttccanaacctggttcaaagatgggtggcctgtcagccttagcaattctgtgaggattctttcaggaggcaggatgctacggctgatgcagaccacaatggaagatgctggccaatatacttgngttgtaaggaatgcagctggtgaagaaagaaaaatctttgggctttcagtattagtaccacctcatattgtgggtgaaaatacattggaagatgtgaaggtaaaagagaaacagagtgttacgctgacttgtgaagtgacagggaatccagtgccagaaattacatggcacaaagatgggcagcccctccaagaagatgaagcccatcacattatatctggtggccgttttcttcaaattaccaatgtccaggtgccacacactggaagatatacatgtttggcttccagtccagctggccacaagagcaggagcttcagtcttaatgtatttgtatctcctacaattgctggtgtaggtagtgatggcaaccctgaagatgtcactgtcatccttaacagccctacatctttggtctgtgaagcttattcatatcctccagctaccatcacctggtttaaggatggcactcctttagaatctaaccgaaatattcgtattcttccaggaggcagaactctgcagatcctcaatgcacaggaggacaatgctggaagatactcttgtgtagccacgaatgaggctggagaaatgataaagcactatgaagtgaaggtgtacattccacccataatcaataaaggggacctttgggggccaggtctttcccctaaagaagtgaagatcaaagtaaacaacactctgaccttggaatgtgaagcgtatgcaattccttctgcctccctcagctggtacaaggatggacagccccttaaatccgatgatcatgttaatattgctgcgaatggacacacacttcaaataaaggaggctcaaatatcagacaccggacgatatacttgtgtagcatctaacattgcaggtgaagatgagttggattttgatgtgaatattcaagttcctccaagttttcagaaactctgggaaataggaaacatgctagatactggcaggaatggtgaagccaaagatgtgatcatcaacaatcccatttctctttactgtgagacaaatgctgctccccctcctacactgacatggtacaaagatggccaccctctgacctcaagtgataaagtattgattttgccaggagggcgagtgttgcagattcctcgggctaaagtagaagatgctgggagatacacatgtgtggctgtgaatgaggctggagaagattcccttcaatatgatgtccgtgtactcgtgccgccaattatcnagggagcaaatagtgatctccctgaagaggtcaccgtgctggtgaacaagagtgcactgatagagtgtttatccagtggcagcccagcaccaaggaattcctggcagaaagatggacagcccttgctagaagatgaccatcataaatttctatctaatggacgaattctgcagattctgaatactcaaataacagatatcggcaggtatgtgtgtgttgctgagaacacagctgggagtgccaaaaaatattttaacctcaatgttcatgttcctccaagtgtcattggtcctaaatctgaaaatcttaccgtcgtggtgaacaatttcatctctttgacctgtgaggtctctggttttccacctcctgacctcagctggctcaagaatgaacagcccatcaaactgaacacaaatactctcattgtgcctggtggtcgaactctacagattattcgggccaaggtatcagatggtggtgaatacacttgtatagctatcaatcaagctggcgaaagcaagaaaaagttttccctgactgtttatgtgcccccaagcattaaagaccatgacagtgaatctctttctgtagttaatgtaagagagggaacttctgtgtctttggagtgtgagtcgaacgctgtgccacctccagtcatcacttggtataagaatgggcggatgataacagagtctactcatgtggagattttagctgatggacaaatgctacacattaagaaagctgaggtatctgacacaggccagtatgtatgtagagctataaatgtagcaggacgggatgataaaaatttccacctcaatgtatatgtgccacccagtattgaaggacctgaaagagaagtgattgtggagacgatcagcaatcctgtgacattaacatgtgatgccactgggatcccacctcccacgatagcatggttaaagaaccacaagcgcatagaaaattctgactcactggaagttcgtattttgtctggaggtagcaaactccagattgcccggtctcagcattcagatagtggaaactatacatgtattgcttcaaatatggagggaaaagcccagaaatattactttctttcaattcaagttcctccaagtgttgctggtgctgaaattccaagtgatgtcagtgtccttctaggagaaaatgttgagctggtctgcaatgcaaatggcattcctactccacttattcaatggcttaaagatggaaagcccatagctagtggtgaaacagaaagaatccgagtgagtgcaaatggcagcacattaaacatttatggagctcttacatctgacacggggaaatacacatgtgttgctactaatcccgctggagaagaagaccgaatttttaacttgaatgtctatgttacacctacaattaggggtaataaagatgaagcagagaaactaatgactttagtggatacttcaataaatattgaatgcagagccacagggacgcctccaccacagataaactggctgaagaatggacttcctctgcctctctcctcccatatccggttactggcagcaggacaagttatcaggattgtgagagctcaggtgtctgatgtcgctgtgtatacttgtgtggcctccaacagagctggggtggataataagcattacaatcttcaagtgtttgcaccaccaaatatggacaattcaatggggacagaggaaatcacagttctcaaaggtagttccacctctatggcatgcattactgatggaaccccagctcccagtatggcctggcttagagatggccagcctctggggcttgatgcccatctgacagtcagcacccatggaatggtcctgcagctcctcaaagcagagactgaagattcgggaaagtacacctgcattgcctcaaatgaagctggagaagtcagcaagcactttatcctcaaggtcctagaaccacctcacattaatggatctgaagaacatgaagagatatcagtaattgttaataacccacttgaacttacctgcattgcttctggaatcccagcccctaaaatgacctggatgaaagatggccggccccttccacagacggatcaagtgcaaactctaggaggaggagaggttcttcgaatttctactgctcaggtggaggatacaggaagatatacatgtctggcatccagtcctgcaggagatgatgataaggaatatctagtgagagtgcatgtacctcctaatattgctggaactgatgagccccgggatatcactgtgttacggaacagacaagtgacattggaatgcaagtcagatgcagtgcccccacctgtaattacttggctcagaaatggagaacggttacaggcaacacctcgagtgcgaatcctatctggagggagatacttgcaaatcaacaatgctgacctaggtgatacagccaattatacctgtgttgccagcaacattgcaggaaagactacaagagaatttattctcactgtaaatgttcctccaaacataaaggggggcccccagagccttgtaattcttttaaataagtcaactgtattggaatgcatcgctgaaggtgtgccaactccaaggataacatggagaaaggatggagctgttctagctgggaatcatgcaagatattccatcttggaaaatggattccttcatattcaatcagcacatgtcactgacactggacggtatttgtgtatggccaccaatgctgctggaacagatcgcaggcgaatagatttacaggtccatgttcctccatctattgctccgggtcctaccaacatgactgtaatagtaaatgttcaaactactctggcttgtgaggctactgggataccaaaaccatcaatcaattggagaaaaaatgggcatcttcttaatgtggatcaaaatcagaactcatacaggctcctttcttcaggttcactagtaattatttccccttctgtggatgacactgcaacctatgaatgtactgtgacaaacggtgctggagatgataaaagaactgtggatctcactgtccaagttccaccttccatagctgatgagcctacagatttcctagtaaccaaacatgccccagcagtaattacctgcactgcttcgggagttccatttccctcaattcactggaccaaaaatggtataagactgcttcccaggggagatggctatagaattctgtcctcaggagcaattgaaatacttgccacccaattaaaccatgctggaagatacacttgtgtcgctaggaatgcggctggctctgcacatcgacacgtgacccttcatgttcatgagcctccagtcattcagccccaaccaagtgaactacacgtcattctgaacaatcctattttattaccatgtgaagcaacagggacacccagtcctttcattacttggcaaaaagaaggcatcaatgttaacacttcaggcagaaaccatgcagttcttcctagtggcggcttacagatctccagagctgtccgagaggatgctggcacttacatgtgtgtggcccagaacccggctggtacagccttgggcaaaatcaagttaaatgtccaagttcctccagtcattagccctcatctaaaggaatatgttattgctgtggacaagcccatcacgttatcctgtgaagcagatggcctccctccgcctgacattacatggcataaagatgggcgtgcaattgtggaatctatccgccagcgcgtcctcagctctggctctctgcaaatagcatttgtccagcctggtgatgctggccattacacgtgcatggcagccaatgtagcaggatcaagcagcacaagcaccaagctcaccgtccatgtaccacccaggatcagaagtacagaaggacactacacggtcaatgagaattcacaagccattcttccatgcgtagctgatggaatccccacaccagcaattaactggaaaaaagacaatgttcttttagctaacttgttaggaaaatacactgctgaaccatatggagaactcattttagaaaatgttgtgctggaggattctggcttctatacctgtgttgctaacaatgctgcaggtgaagatacacacactgtcagcctgactgtgcatgttctccccacttttactgaacttcctggagacgtgtcattaaataaaggagaacagctacgattaagctgtaaagctactggtattccattgcccaaattaacatggaccttcaataacaatattattccagcccactttgacagtgtgaatggacacagtgaacttgttattgaaagagtgtcaaaagaggattcaggtacttatgtgtgcaccgcagagaacagcgttggctttgtgaaggcaattggatttgtttatgtgaaagaacctccagtcttcaaaggtgattatccttctaactggattgaaccacttggtgggaatgcaatcctgaattgtgaggtgaaaggagaccccaccccaaccatccagtggaacagaaagggagtggatattgaaattagccacagaatccggcaactgggcaatggctccctggccatctatggcactgttaatgaagatgccggtgactatacatgtgtagctaccaatgaagctggggtggtggagcgcagcatgagtctgactctgcaaagtcctcctattatcactcttgagccagtggaaactgttattaatgctggtggcaaaatcatattgaattgtcaggcaactggagagcctcaaccaaccattacatggtcccgtcaagggcactctatttcctgggatgaccgggttaacgtgttgtccaacaactcattatatattgctgatgctcagaaagaagatacctctgaatttgaatgtgttgctcgaaacttaatgggttctgtccttgtcagagtgccagtcatagtccaggttcatggtggattttcccagtggtctgcatggagagcctgcagtgtcacctgtggaaaaggcatccaaaagaggagtcgtctgtgcaaccagccccttccagccaatggtgggaagccctgccaaggttcagatttggaaatgcgaaactgtcaaaataagccttgtccagtggatggtagctggtcggaatggagtctttgggaagaatgcacaaggagctgtggacgcggcaaccaaaccaggaccaggacttgcaataatccatcagttcagcatggtgggcggccatgtgaagggaatgctgtggaaataattatgtgcaacattaggccttgcccagttcatggagcatggagcgcttggcagccttggggaacatgcagcgaaagttgtgggaaaggtactcagacaagagcaagactttgtaataacccaccaccagcgtttggtgggtcctactgtgatggagcagaaacacagatgcaagtttgcaatgaaagaaattgtccaattcatggcaagtgggcgacttgggccagttggagtgcctgttctgtgtcatgtggaggaggtgccagacagagaacaaggggctgctccgaccctgtgccccagtatggaggaaggaaatgcgaagggagtgatgtccagagtgatttttgcaacagtgacccttgcccaacccatggtaactggagtccttggagtggctggggaacatgcagccggacgtgtaacggagggcagatgcggcggtaccgcacatgtgataaccctcctccctccaatgggggaagagcttgtgggggaccagactcccagatccagaggtgcaacactgacatgtgtcctgtggatggaagttggggaagctggcatagttggagccagtgctctgcctcctgtggaggaggtccctgtcccggagacactactcaggtgaccaggtgcaatgtacaagcatgtccaggtgggccccagcgagccagaggaagtgttattggaaatattaatgatgttgaatttggaattgctttccttaatgccacaataactgatagccctaactctgatactagaataatacgtgccaaaattaccaatgtacctcgtagtcttggttcagcaatgagaaagatagtttctattctaaatcccatttattggacaacagcaaaggaaataggagaagcagtcaatggctttaccctcaccaatgcagtcttcaaaagagaaactcaagtggaatttgcaactggagaaatcttgcagatgagtcatattgcccggggcttggattccgatggttctttgctgctagatatcgttgtgagtggctatgtcctacagcttcagtcacctgctgaagtcactgtaaaggattacacagaggactacattcaaacaggtcctgggcagctgtacgcctactcaacccggctgttcaccattgatggcatcagcatcccatacacatggaaccacaccgttttctatgatcaggcacagggaagaatgcctttcttggttgaaacacttcatgcatcctctgtggaatctgactataaccagatagaagagacactgggttttaaaattcatgcttcaatatccaaagatattaatgaatgtcaagaatccagcccctgtcaccagcgctgtttcaatgccataggaagtttccattgtggatgtgaacctgggtatcagctcaaaggcagaaaatgcatggatgtgaacgagtgtagacaaaatgtatgcagaccagatcagcactgtaagaacacccgtggtggctataagtgcattgatctttgtccaaatggaatgaccaaggcagaaaatggaacctgtattgatattgatgaatgtaaagatgggacccatcagtgcagatataaccagatatgtgagaatacaagaggcagctatcgttgtgtatgcccaagaggttatcggtctcaaggagttggaagaccctgcatggatattgatgaatgtgaaaatacagatgcctgccagcatgagtgtaagaatacctttggaagttatcagtgcatctgcccacctggctatcaactcacacacaatggaaagacatgccaagatatcgatgaatgtctggagcagaatgtgcactgtggacccaatcgcatgtgcttcaacatgagaggaagctaccagtgcatcgatacaccctgtccacccaactaccaacgggatcctgtttcagggttctgcctcaagaactgtccacccaatgatttggaatgtgccttgagcccatatgccttggaatacaaactcgtctccctcccatttggaatagccaccaatcaagatttaatccggctggttgcatacacacaggatggagtgatgcatcccaggacaactttcctcatggtagatgaggaacagactgttccttttgccttgagggatgaaaacctgaaaggagtggtgtatacaacacgaccactacgagaagcagagacctaccgcatgagggtccgagcctcatcctacagtgccaatgggaccattgaatatcagaccacattcatagtttatatagctgtgtccgcctatccatactaaggaactctccaaagcctattccacatatttaaaccgcattaatcatggcaatcaagcccccttccagattactgtctcttgaacagttgcaatcttggcagcttgaaaatggtgctacactctgttttgtgtgccttccttggtacttctgaggtattttcatgatcccaccatggtcatatcttgaagtatggtctagaaaagtcccttattattttatttattacactggagcagttacttcccaaagattattctgaacatctaacaggacatatcagtgatggtttacagtagtgtagtacctaagatcattttcctgaaagccaaaccaaacaacgaaaaacaagaacaactaattcagaatcaaatagagtttttgagcatttgactatttttagaatcataaaattagttactaagtattttgatcaaagcttataaaataacttacggagatttttgtaagtattgatacattataataggacttgcctattttcatttttaagaagaaaaacaccactcattttataaaatatagtacagctactataaggcttgtttgatcccaaatggtgcttatcttgattgaacattcagaacaaggatattattttcagtgattttgtgagatcagctgaaccacttatgataataataataaaaaagactgctttgccctcacgtcagttgtacatggcatggaactttaaaaattttaatataaactttcatccagttagcttcataacttttacgttccagaattttgtttattttcctgtcaatgaaagcaatttttaaagataccagtgggacaggtttggttttttaaaaatctcatgtgttcaaattaacataaatattacacgtcaatacactgtacatggtggtaatagactctaagcaattgccaagatgtattctatttttatgaagtgtatatatattaccttagtgtgcattttctatataatatcttgatggactcttttataaaattattttataaaaaacaatgttacactaaaatcagcctaaataaattttcacaactttttttcataa

SEQ ID NO: 434525 - DNA, 427 bp, Homo sapiens
tgcaaagtgatgttagaatgattgtgatcctatatctttaaaagaaccaataaaggtattcagtatatgtcctgataattgatgaatgtaaacagtgtgctggcctgttttatcctgaaagaaaacccatctttcatgtagttccgccaaatattatgggagaagaacagaatgtctctgtcctcattagccaagctgtggaattactatgtcaaagtgatgctattcccccacctactcttacttggttaaaagacggccaccccttgctgaagaaaccaggcctcagtatatctgaaaatagaagtgtgttaaaggtaaggatatggattcatttattttaccttatgttattagaagttcatggttttggtattaccctatttagcgtgactgtcttttataagtgttggactaattttctctt

SEQ ID NO: 434526 - DNA, 1533 bp, Homo sapiens
ctagaattcagcggccgctgaattctagtactggggtccagaaagtgatcgctgccgtggtcgccatggggaagtcggattttcttactcccaaggctatcgccaacaggatcaagtccaaggggctgcagaagctacgctggtattgccagatgtgccagaagcagtgccgggacgagaatggctttaagtgtcattgtatgtccgaatctcatcagagacaactattgctggcttcagaaaatcctcagcagtttatggattatttttcagaggaattccgaaatgactttctagaacttctcaggagacgctttggcactaaaagggtccacaacaacattgtctacaacgaatacatcagccaccgagagcacatccacatgaatgccactcagtgggaaactctgactgattttactaagtggctgggcagagaaggcttgtgcaaagtggacgagacaccaaaaggctggtatattcagtacatagacagggacccagaaactatccgccggcaactggaactggagaaaaagaaaaagcaggaccttgatgatgaagaaaaaactgccaaatttattgaagagcaagtgagaagaggcctggaagggaaggaacaggaggtccctacttttacggaattaagcagagaaaatgatgaagagaaagtcacgtttaatttgagtaaaggagcatgtagctcatccggagcaacatcttccaagtcaagtactctgggaccgagtgcactgaagacgataggaagttcagcatcagtgaaacgaaaagaatcttcccagagctcaactcagtctaaagaaaagaagaaaaagaaatctgcactggatgaaatcatggagattgaagaggaaaagaaaagaactgcccgaacagactactggctacagcctgaaattattgtgaaaattataaccaagaaactgggagagaaatatcataagaaaaaggctattgttaaggaagtaattgacaaatatacagctgttgtgaagatgattgattctggagacaagctgaaacttgaccagactcatttagagacagtaattccagcaccaggaaaaagaattctagttttaaatggaggctacagaggaaatgaaggtaccctagaatccatcaatgagaagactttttcagctactatcgtcattgaaactggccctttaaaaggacgcagagttgaaggaattcaatatgaagacatttctaaacttgcctgagtttgaaaatttgttaacaatacattaaaatcttaaagcatcaaattggtgttcgccaaggcattatgagactctactgtgttagggtatattcttttgtataaaacaaacaggtttttgaaaatattactgtatagttagttgttcagctaaactttgagaagaatttaattatgtctcatgaggtatcaaactatgtaattttgtccttgttatttttgtttcctttgtaatttacttgatgagtttatatcttcattaaagaatgttattataaagtgaaaaa

SEQ ID NO: 434527 - DNA, 1102 bp, Homo sapiens
tttcaaacagggagccccctgtttgctaccaggctgtatacttaaccacactgtgctacattgatccatgtgttatgattttactgcatgaaaacgtggcctcttttccagctcctgacagtcacatgggagaaagtgggtgagggcaggtactggctggtctttcagctgaataggagttgtgtctgtttgcttcctaggtcagttgacttgctttattatatacttttaaaaactgaagttttttttaaatcaaaaactaatgacaagtaatgtttatttgtatttatcagagctcgcaaattatgtcattggtcttctgtgaagtagaggacttcacagttttatggtgttattttgctaaatagaatggtattttgaaatccaatgaggattttagggagataatttaagacattatgtgttctacagattgaagaggaaaagaaaagaactgcccgaacagactactggctacagcctgaaattattgtgaaaattataaccaagaaactgggagagaaatatcataagaaaaaggctattgttaaggaagtaattgacaaatatacagctgttgtgaagatgattgattctggagacaagctgaaacttgaccagactcatttagagacagtaattccagcaccaggaaaaagaattctagttttaaatggaggctacagaggaaatgaaggtaccctagaatccatcaatgagaagactttttcagctactatcgtcattgaaactggccctttaaaaggacgcagagttgaaggaattcaatatgaagacatttctaaacttgcctgagtttgaaaatttgttaacaatacattaaaatcttaaagcatcaaattggtgttcgccaaggcattatgagactctactgtgttagggtatattcttttgtataaaacaaacaggtttttgaaaatattactgtatagttagttgttcagctaaactttgagaagaatttaattatgtctcatgaggtatcaaactatgtaattttgtccttgttatttttgtttcctttgtaatttacttgatgagtttatatcttcattaaagaatgttattataaagtgaaaaa

SEQ ID NO: 434528 - DNA, 870 bp, Homo sapiens
tttcaaacagggagccccctgtttgctaccaggctgtatacttaaccacactgtgctacattgatccatgtgttatgattttactgcatgaaaacgtggcctcttttccagctcctgacagtcacatgggagaaagtgggtgagggcaggtactggctggtctttcagctgaataggagttgtgtctgtttgcttcctagattgaagaggaaaagaaaagaactgcccgaacagactactggctacagcctgaaattattgtgaaaattataaccaagaaactgggagagaaatatcataagaaaaaggctattgttaaggaagtaattgacaaatatacagctgttgtgaagatgattgattctggagacaagctgaaacttgaccagactcatttagagacagtaattccagcaccaggaaaaagaattctagttttaaatggaggctacagaggaaatgaaggtaccctagaatccatcaatgagaagactttttcagctactatcgtcattgaaactggccctttaaaaggacgcagagttgaaggaattcaatatgaagacatttctaaacttgcctgagtttgaaaatttgttaacaatacattaaaatcttaaagcatcaaattggtgttcgccaaggcattatgagactctactgtgttagggtatattcttttgtataaaacaaacaggtttttgaaaatattactgtatagttagttgttcagctaaactttgagaagaatttaattatgtctcatgaggtatcaaactatgtaattttgtccttgttatttttgtttcctttgtaatttacttgatgagtttatatcttcattaaagaatgttattataaagtgaaaaa

SEQ ID NO: 434529 - DNA, 570 bp, Homo sapiens
taagaaaaagggttttgttttttattatgtttattcagtgtagtacattttgctgtaacaagttagaagaaaagtggagatatttcttcacattaatttttatattcttttccatcataggaaaaagaattctagttttaaatggaggctacagaggaaatgaaggtaccctagaatccatcaatgagaagactttttcagctactatcgtcattgaaactggccctttaaaaggacgcagagttgaaggaattcaatatgaagacatttctaaacttgcctgagtttgaaaatttgttaacaatacattaaaatcttaaagcatcaaattggtgttcgccaaggcattatgagactctactgtgttagggtatattcttttgtataaaacaaacaggtttttgaaaatattactgtatagttagttgttcagctaaactttgagaagaatttaattatgtctcatgaggtatcaaactatgtaattttgtccttgttatttttgtttcctttgtaatttacttgatgagtttatatcttcattaaagaatgttattataaagtgaaaaa

SEQ ID NO: 434530 - DNA, 760 bp, Homo sapiens
gggcaggcaaaaggagcttggcagattgtgtgtcagttatagcacgtctggaccgtcacttctgtttgctttcatgggctggagctccatgcatggccacagctaaccacaagggagccaggaaactggctatttatccaggaagcagaggagatactgaacagctagcaggtctctgccacaatgtctattgataacgtatgtcagatgtcacagaagaaaatatggtagttcttaatgagaatgccatagattattcttaaaattcatagatgtatacaaatgttaacaatcttaatggtattttagggatgcggaaaaggcaaatttgtatccataagtatggtgtcatttttttgtcttttaggaatatgtgtttttaaccttattttaaattattttaatttgtagggccctttaaaaggacgcagagttgaaggaattcaatatgaagacatttctaaacttgcctgagtttgaaaatttgttaacaatacattaaaatcttaaagcatcaaattggtgttcgccaaggcattatgagactctactgtgttagggtatattcttttgtataaaacaaacaggtttttgaaaatattactgtatagttagttgttcagctaaactttgagaagaatttaattatgtctcatgaggtatcaaactatgtaattttgtccttgttatttttgtttcctttgtaatttacttgatgagtttatatcttcattaaagaatgttattataaagtgaaaaa

SEQ ID NO: 434531 - DNA, 1688 bp, Homo sapiens
ctagaattcagcggccgctgaattctagtactggggtccagaaagtgatcgctgccgtggtcgccatggggaagtcggattttcttactcccaaggctatcgccaacaggatcaagtccaaggggctgcagaagctacgctggtattgccagatgtgccagaagcagtgccgggacgagaatggctttaagtgtcattgtatgtccgaatctcatcagagacaactattgctggcttcagaaaatcctcagcagtttatggattatttttcagaggaattccgaaatgactttctagaacttctcaggagacgctttggcactaaaagggtccacaacaacattgtctacaacgaatacatcagccaccgagagcacatccacatgaatgccactcagtgggaaactctgactgattttactaagtggctgggcagagaaggcttgtgcaaagtggacgagacaccaaaaggctggtatattcagtacatagacagggacccagaaactatccgccggcaactggaactggagaaaaagaaaaagcaggaccttgatgatgaagaaaaaactgccaaatttattgaagagcaagtgagaagaggcctggaagggaaggaacaggaggtccctacttttacggaattaagcagagaaaatgatgaagagaaagtcacgtttaatttgagtaaaggagcatgtagctcatccggagcaacatcttccaagtcaagtactctgggaccgagtgcactgaagacgataggaagttcagcatcagtgaaacgaaaagaatcttcccagagctcaactcagtctaaagaaaagaagaaaaagaaatctgcactggatgaaatcatggagattgaagaggaaaagaaaagaactgcccgaacagactactggctacagcctgaaattattgtgaaaattataaccaagaaactgggagagaaatatcataagaaaaaggctattgttaaggaagtaattgacaaatatacagctgttgtgaagatgattgattctggagacaagctgaaacttgaccagactcatttagagacagtaattccagcaccaggaaaaagaattctagttttaaatggaggctacagaggaaatgaaggtaccctagaatccatcaatgagaagactttttcagctactatcgtcattgaaactgtgtgagctaccacgccttgcctgagttgatcttctacaagagttcaaacaaaaaacagaccataccaggatgatcacttcaaacatgaggatgggtataagctgacgtcagacacagcagggttgatgggagacctacagaaaatacatataaatcatcagacatgaagtccagcacatagtaggtattgaataaatggcagtgagtggtcatgtccagaaatgaagccaagaagttgagcctggactactaagaatctggtctgaagaatttcaaaaaggagaatggttctccctgataacaaatagtgatgagtaaaaccagacaaattacatatgcctcccccaagtatgtacgtttggaatcaacttggtggttttcttcagagaaaaaatgtttcatgtctgcctcccacatttaattctccaacgtctttctgaaattatttcagaatgaaatgaggcagcatacttgaggttaaattcaataaaaaatatctgaag

SEQ ID NO: 434532 - DNA, 2037 bp, Homo sapiens
ctagaattcagcggccgctgaattctagtactggggtccagaaagtgatcgctgccgtggtcgccatggggaagtcggattttcttactcccaaggctatcgccaacaggatcaagtccaaggggctgcagaagctacgctggtattgccagatgtgccagaagcagtgccgggacgagaatggctttaagtgtcattgtatgtccgaatctcatcagagacaactattgctggcttcagaaaatcctcagcagtttatggattatttttcagaggaattccgaaatgactttctagaacttctcaggagacgctttggcactaaaagggtccacaacaacattgtctacaacgaatacatcagccaccgagagcacatccacatgaatgccactcagtgggaaactctgactgattttactaagtggctgggcagagaaggcttgtgcaaagtggacgagacaccaaaaggctggtatattcagtacatagacagggacccagaaactatccgccggcaactggaactggagaaaaagaaaaagcaggaccttgatgatgaagaaaaaactgccaaatttattgaagagcaagtgagaagaggcctggaagggaaggaacaggaggtccctacttttacggaattaagcagagaaaatgatgaagagaaagtcacgtttaatttgagtaaaggagcatgtagctcatccggagcaacatcttccaagtcaagtactctgggaccgagtgcactgaagacgataggaagttcagcatcagtgaaacgaaaagaatcttcccagagctcaactcagtctaaagaaaagaagaaaaagaaatctgcactggatgaaatcatggagattgaagaggaaaagaaaagaactgcccgaacagactactggctacagcctgaaattattgtgaaaattataaccaagaaactgggagagaaatatcataagaaaaaggctattgttaaggaagtaattgacaaatatacagctgttgtgaagatgattgattctggagacaagctgaaacttgaccagactcatttagagacagtaattccagcaccaggaaaaagaattctagttttaaatggaggctacagaggaaatgaaggtaccctagaatccatcaatgagaagactttttcagctactatcgtcattgaaactgtgtgagctaccacgccttgcctgagttgatcttctacaagagttcaaacaaaaaacagaccataccaggatgatcacttcaaacatgaggatgggtataagctgacgtcagacacaggtacggtgccaaaccctgggatctctctctttaactgagagtcagggagggctgattgcttctattctcagaagatgggagaacgtatgctgttagcagaaatgtaagaggcagtaaagaaatactaataggatgatggcagaagctttacagaaaatgttcctcagggatgaattaaggtttttccaaagtaacctgacagcacattatggaaagcaactgggttttgggtgtgggcagtctttagatcaaattctggcagttctgttcattggctttgtaatattagaatgttaatgttcttgaattgcaatgtttttaatgtataaattgtcaaaatgtttttcagcagggttgatgggagacctacagaaaatacatataaatcatcagacatgaagtccagcacatagtaggtattgaataaatggcagtgagtggtcatgtccagaaatgaagccaagaagttgagcctggactactaagaatctggtctgaagaatttcaaaaaggagaatggttctccctgataacaaatagtgatgagtaaaaccagacaaattacatatgcctcccccaagtatgtacgtttggaatcaacttggtggttttcttcagagaaaaaatgtttcatgtctgcctcccacatttaattctccaacgtctttctgaaattatttcagaatgaaatgaggcagcatacttgaggttaaattcaataaaaaatatctgaag

SEQ ID NO: 434533 - DNA, 1290 bp, Homo sapiens
ctagaattcagcggccgctgaattctagtactggggtccagaaagtgatcgctgccgtggtcgccatggggaagtcggattttcttactcccaaggctatcgccaacaggatcaagtccaaggggctgcagaagctacgctggtattgccagatgtgccagaagcagtgccgggacgagaatggctttaagtgtcattgtatgtccgaatctcatcagagacaactattgctggcttcagaaaatcctcagcagtttatggattatttttcagaggaattccgaaatgactttctagaacttctcaggagacgctttggcactaaaagggtccacaacaacattgtctacaacgaatacatcagccaccgagagcacatccacatgaatgccactcagtgggaaactctgactgattttactaagtggctgggcagagaaggcttgtgcaaagtggacgagacaccaaaaggctggtatattcagtacatagacagggacccagaaactatccgccggcaactggaactggagaaaaagaaaaagcaggaccttgatgatgaagaaaaaactgccaaatttattgaagagcaagtgagaagaggcctggaagggaaggaacaggaggtccctacttttacggaattaagcagagaaaatgatgaagagaaagtcacgtttaatttgagtaaaggagcatgtagctcatccggagcaacatcttccaagtcaagtactctgggaccgagtgcactgaagacgataggaagttcagcatcagtgaaacgaaaagaatcttcccagagctcaactcagtctaaagaaaagaagaaaaagaaatctgcactggatgaaatcatggagattgaagaggaaaagaaaagaactgcccgaacagactactggctacagcctgaaattattgtgaaaattataaccaagaaactgggagagaaatatcataagaaaaaggctattgttaaggaagtaattgacaaatatacagctgttgtgaagatgattgattctggagacaagctgaaacttgaccagactcatttagagacagtaattccagcaccaggtgtctttgccttttggaaacttatccgtatctgagtacaaacactactttgaccaggttgtttacctctgactcaaaatcttcctgggggtgtcattgccaatgtagtgataacatcagtctctggaacttcttattatcatattctttattctttttccccctaaagtaaaaattctttttacagattagaaaaatttatgttag

SEQ ID NO: 434534 - DNA, 946 bp, Homo sapiens
agatgaggtcttgctatgttgcccaggctggtctcaaactcttgagctcaagcaatcctcctgcctcggccttctaaaatgttgtgattacaggtgtgagctaccacgccttgcctgagttgatcttctacaagagttcaaacaaaaaacagaccataccaggatgatcacttcaaacatgaggatgggtataagctgacgtcagacacaggtacggtgccaaaccctgggatctctctctttaactgagagtcagggagggctgattgcttctattctcagaagatgggagaacgtatgctgttagcagaaatgtaagaggcagtaaagaaatactaataggatgatggcagaagctttacagaaaatgttcctcagggatgaattaaggtttttccaaagtaacctgacagcacattatggaaagcaactgggttttgggtgtgggcagtctttagatcaaattctggcagttctgttcattggctttgtaatattagaatgttaatgttcttgaattgcaatgtttttaatgtataaattgtcaaaatgtttttcagcagggttgatgggagacctacagaaaatacatataaatcatcagacatgaagtccagcacatagtaggtattgaataaatggcagtgagtggtcatgtccagaaatgaagccaagaagttgagcctggactactaagaatctggtctgaagaatttcaaaaaggagaatggttctccctgataacaaatagtgatgagtaaaaccagacaaattacatatgcctcccccaagtatgtacgtttggaatcaacttggtggttttcttcagagaaaaaatgtttcatgtctgcctcccacatttaattctccaacgtctttctgaaattatttcagaatgaaatgaggcagcatacttgaggttaaattcaataaaaaatatctgaag

SEQ ID NO: 434535 - DNA, 803 bp, Homo sapiens
ctagaattcagcggccgctgaattctagtactggggtccagaaagtgatcgctgccgtggtcgccatggggaagtcggattttcttactcccaaggctatcgccaacaggatcaagtccaaggggctgcagaagctacgctggtattgccagatgtgccagaagcagtgccgggacgagaatggctttaagtgtcattgtatgtccgaatctcatcagagacaactattgctggcttcagaaaatcctcagcagtttatggattatttttcagaggaattccgaaatgactttctagaacttctcaggagacgctttggcactaaaagggtccacaacaacattgtctacaacgaatacatcagccaccgagagcacatccacatgaatgccactcagtgggaaactctgactgattttactaagtggctgggcagagaaggtaagaatgagattttaaagttgctttttctttcccacttctaatcttcataggatgagatgtttgggataagaaaagagaaaaaaaattgggtcagtgttttgctttttcatcgtgttagttgattccattttgggagcataatttctgccttaagttaatagaacatcatataactgttggacattaaatacttagatagaactgaataaatactatgcaaggtaatacagttgtctctcagtatccgtgggggattgggtccaggaccccttgctgataaccaaaattcacagatactcaagtcccttatataaaataaaatgatgtagcacttgcatgtaacctatatacatcctccc

SEQ ID NO: 434536 - DNA, 882 bp, Homo sapiens
ctagaattcagcggccgctgaattctagtactggggtccagaaagtgatcgctgccgtggtcgccatggggaagtcggattttcttactcccaaggctatcgccaacaggatcaagtccaaggggctgcagaagctacgctggtattgccagatgtgccagaagcagtgccgggacgagaatggctttaagtgtcattgtatgtccgaatctcatcagagacaactattgctggcttcagaaaatcctcagcagtttatggattatttttcagaggaattccgaaatgactttctagaacttctcaggagacgctttggcactaaaagggtccacaacaacattgtctacaacgaatacatcagccaccgagagcacatccacatgaatgccactcagtgggaaactctgactgattttactaagtggctgggcagagaaggcttgtgcaaagtggacgagacaccaaaaggctggtatattcagtacatagacagggacccagaaactatccgccggcaactggaactggagaaaaagaaaaagcaggaccttgatgatgaagaaaaaactgccaaatttattgaagagcaagtgagaagaggcctggaagggaaggaacaggaggtccctacttttacggaattaagcagagaaaatgatgaagagaaaggtagttttattttttattttttctttttttaaacatagatgcttttatattggctttgttaaaaatgcaacttgtcaacatatctgagaataagacatcgaatgtgtctgagttacattgttcttattaatttaatgaaaaggtaatactaatgaattgattggataggatagctgaagccacaagtaacaaaactgactacaattaact

SEQ ID NO: 434537 - DNA, 614 bp, Homo sapiens
agcggggtctcccagcaggcagtgcagcctagggacgctgacaaaggagcggaggagcagtcgcagctgctttccgaggaagccggtgttgccgagattgccaaaatgctttggagtttttaactgaatctaagaaaagtccaaaatagatttgagactgtaaaaacagaaactgcagcaagggggattcagtgccaatgcatcaacaaaaaagacaaccagagttagtggaaggaaatcttcctgttttcgtgttccccacggagctcatattttatgcagatgatcagtcaacacataagcaagtgttgacactgtacaatccctatgagtttgccttaaagttcaaaggtgagtctcctagctctattttctgggtttttaactggtccctactaattttttacttgtagaaactaattaaaaaaaaaaaacactaatggccattgtgactttttctttcagttttgtgtactactccaaataagtatgttgtcgttgatgctgcaggtgcagtaaagcctcagtgttgtgtggatatgtaagtcaagatcaattcctggtaacacgttttaagtgtgttaatatttatgtttttaacttgaaaaaaaaaa

SEQ ID NO: 434538 - DNA, 1100 bp, Homo sapiens
agcggggtctcccagcaggcagtgcagcctagggacgctgacaaaggagcggaggagcagtcgcagctgctttccgaggaagccggtgttgccgagattgccaaaatgctttggagtttttaactgaatctaagaaaagtccaaaatagatttgagactgtaaaaacagaaactgcagcaagggggattcagtgccaatgcatcaacaaaaaagacaaccagagttagtggaaggaaatcttcctgttttcgtgttccccacggagctcatattttatgcagatgatcagtcaacacataagcaagtgttgacactgtacaatccctatgagtttgccttaaagttcaaagttttgtgtactactccaaataagtatgttgtcgttgatgctgcaggtgcagtaaagcctcagtgttgtgtggatattgtgattcgtcatcgagatgttcgatcctgtcactatggtgtaatagacaaattccgtctccaagtttccgagcaaagccaaaggaaggctttgggaagaaaagaggttgttgctactcttctcccatcagcaaaagaacaacaaaaggaagaagaggaaaaaagattaaaggaacatttaactgaaagtttattttttgagcagtcgtttcaaccaggtagtttggggttgttttaaagcccttttgaggtcttacacattattaactttaaaataatcaggcagctaagaataattactagaaaaatcatctaccacttcaaacatggtcaactacttcaaaactgcacctagagaatcaggtacctgaagtagaacaagaagcctggaggtggactttgagaggagggaatacccctcactggaccaggctgtaaggagcgggtagatgttgctgtagccttttaaatatatctgtatttaaacataaacataaatatatctaagactgcaggcaccatactttatgaagctagtacaatttggcagttcctatacttttgtttccatgactttcctatatcctttctcatttaattagttccaaggaagagagagattgtgtttggcaataggccaagcttagtgcactgttcatattattttgaaaaa

SEQ ID NO: 434539 - DNA, 884 bp, Homo sapiens
agcggggtctcccagcaggcagtgcagcctagggacgctgacaaaggagcggaggagcagtcgcagctgctttccgaggaagccggtgttgccgagattgccaaaatgctttggagtttttaactgaatctaagaaaagtccaaaatagatttgagactgtaaaaacagaaactgcagcaagggggattcagtgccaatgcatcaacaaaaaagacaaccagagttagtggaaggaaatcttcctgttttcgtgttccccacggagctcatattttatgcagatgatcagtcaacacataagcaagtgttgacactgtacaatccctatgagtttgccttaaagttcaaagttttgtgtactactccaaataagtatgttgtcgttgatgctgcaggtgcagtaaagcctcagtgttgtgtggatatgtaagtcaagatcaattcctgtgtgattcgtcatcgagatgttcgatcctgtcactatggtgtaatagacaaattccgtctccaagtttccgagcaaagccaaaggaaggctttgggaagaaaagaggttgttgctactcttctcccatcagcaaaagaacaacaaaaggaagaagaggaaaaaagattaaaggaacatttaactgaaagtttattttttgagcagtcgtttcaaccaggtagtttggggttgttttaaagcccttttgaggtcttacacattattaactttaaaataatcaggcagctaagaataattactagaaaaatcatctaccacttcaaacatggtcaactacttcaaatgcctagagatagtctgagtgaaaaaagccgggggggtggaggggggaacccccctggcaccggtagaggcggaatgggctaattggtgacc

SEQ ID NO: 434540 - DNA, 2611 bp, Homo sapiens
agcggggtctcccagcaggcagtgcagcctagggacgctgacaaaggagcggaggagcagtcgcagctgctttccgaggaagccggtgttgccgagattgccaaaatgctttggagtttttaactgaatctaagaaaagtccaaaatagatttgagactgtaaaaacagaaactgcagcaagggggattcagtgccaatgcatcaacaaaaaagacaaccagagttagtggaaggaaatcttcctgttttcgtgttccccacggagctcatattttatgcagatgatcagtcaacacataagcaagtgttgacactgtacaatccctatgagtttgccttaaagttcaaagttttgtgtactactccaaataagtatgttgtcgttgatgctgcaggtgcagtaaagcctcagtgttgtgtggatattgtgattcgtcatcgagatgttcgatcctgtcactatggtgtaatagacaaattccgtctccaagtttccgagcaaagccaaaggaaggctttgggaagaaaagaggttgttgctactcttctcccatcagcaaaagaacaacaaaaggaagaagaggaaaaaagattaaaggaacatttaactgaaagtttattttttgagcagtcgtttcaaccagaaaacagagctgtatcctcaggacctagtttactaactgtcttcctgggagtggtgtgcattgcagccctgatgctgcctacactgggggatgtggaatcgctggtgcctctctacctccacttaagtgtgaatcaaaaattagtggctgcttatatcttaggtcttatcacaatggccatacttagaacatgagcaaggatttcaattgacttctgaagtaaatctgtcttgaaaatatgaatgtggactgccttttatctctatttcactccattaacatgcaacaaactattgaatgatttcaaataattgcaaatgtataatatatattttaaattataatttaatttgaaggactgcagaacattattttacagacagcaaggatgcttctgagtgacacctaggaaattatttgaagaaattctttttatatctatacctgttgtgtaagaaactttaaaacatttgttattttctcacctttttttctaattcactttgattgctaggggtcatgtatgcttcgaagttacaggactaaaagagcaaactgaccggcctaaaactaaaatgacatttattccctagctacaaacatcagcgttattatgttaattataccttgccctctatcattataaatggttgccatggtgtttctaaaaataagtgttttaccattaatgtgtagagggcaaacaaagcataaagtactaagggatcatgcttatcctagggtctcacagaagagaggacatatttaattaatcttgtgaattacagaacaggttgtggtccagacaccaagaatcataggggtttttttttaaaaaacctaatagaagtagggtgacctctctctttggtctaagagttctaaaggaaggtaggcatctgtttaattagttggttcaccctggctttacctctggttaatgctttgtgttaataggaaggaaaaatcactttatcttttcttccaagcccctccctgcctgacttacccagactgggattaccagataccaggtgatttatgtggagatgatttttcacctttaaactctaagccaagtgtaagaaactcttgatagctatgtctattttatatcagtcactgagacttttttttaagtttttatttattattaagacaactttgccaaaaaagtcccctaagcacaactatttacatttctttatagcctcttctgatctctaacacatatgcagttttaactgttattttcatagtaactgatcttttgtctaaggatttttacctgaaagcacaatgtattgagtctcttgaaaatcatctttcagatctttttacagaatgaacttatgcactgctactgtagtattctcaaggaatatatgtaaacacaaatgtatgcctgaggttggtttttgcagaaaacagtctctgcttctaaaaacttctatgtctagtcttccataggaaatcctcactgtttaaccatgtgaggagcctaagtcattaaacggatcatgtctgtacattgtgtaatgaatgaaaagcacataaatgtaatctactttgaactttgtaaaaatgatgtgtggaggctattcttgtttctccatctcaagtcctgtgtgtgcacgtgtgtgcaagtgcacatgtgtgtgtgtaataacacattgtaaagaacagaaattactttaaaaaataaacagaaatggagacctgagcttcaaaaaaaaaaaaaaaaacagaacaaagaaaaaacaaaacaagaaaaaaaaaagaaaaaaaaaaaaaaaaaaagacagacacaagagaagagaaacaacagaaagaagaagaggaggcgcggagggagagaggacgagaaggagaacaaaaaaaaaaaagaagaggaacgacaaagaaatagaaaaaacaaaaggataacaataaaaatagaaatacagacagaaaacaaaggagagag

SEQ ID NO: 434541 - DNA, 2449 bp, Homo sapiens
agcggggtctcccagcaggcagtgcagcctagggacgctgacaaaggagcggaggagcagtcgcagctgctttccgaggaagccggtgttgccgagattgccaaaatgctttggagtttttaactgaatctaagaaaagtccaaaatagatttgagactgtaaaaacagaaactgcagcaagggggattcagtgccaatgcatcaacaaaaaagacaaccagagttagtggaaggaaatcttcctgttttcgtgttccccacggagctcatattttatgcagatgatcagtcaacacataagcaagtgttgacactgtacaatccctatgagtttgccttaaagttcaaagttttgtgtactactccaaataagtatgttgtcgttgatgctgcaggtgcagtaaagcctcagtgttgtgtggatattgtgattcgtcatcgagatgttcgatcctgtcactatggtgtaatagacaaattccgtctccaagtttccgagcaaagccaaaggaaggctttgggaagaaaagaggttgttgctactcttctcccatcagcaaaagaacaacaaaaggaagaagaggaaaaaagattaaaggaacatttaactgaaagtttattttttgagcagtcgtttcaaccaggtcttatcacaatggccatacttagaacatgagcaaggatttcaattgacttctgaagtaaatctgtcttgaaaatatgaatgtggactgccttttatctctatttcactccattaacatgcaacaaactattgaatgatttcaaataattgcaaatgtataatatatattttaaattataatttaatttgaaggactgcagaacattattttacagacagcaaggatgcttctgagtgacacctaggaaattatttgaagaaattctttttatatctatacctgttgtgtaagaaactttaaaacatttgttattttctcacctttttttctaattcactttgattgctaggggtcatgtatgcttcgaagttacaggactaaaagagcaaactgaccggcctaaaactaaaatgacatttattccctagctacaaacatcagcgttattatgttaattataccttgccctctatcattataaatggttgccatggtgtttctaaaaataagtgttttaccattaatgtgtagagggcaaacaaagcataaagtactaagggatcatgcttatcctagggtctcacagaagagaggacatatttaattaatcttgtgaattacagaacaggttgtggtccagacaccaagaatcataggggtttttttttaaaaaacctaatagaagtagggtgacctctctctttggtctaagagttctaaaggaaggtaggcatctgtttaattagttggttcaccctggctttacctctggttaatgctttgtgttaataggaaggaaaaatcactttatcttttcttccaagcccctccctgcctgacttacccagactgggattaccagataccaggtgatttatgtggagatgatttttcacctttaaactctaagccaagtgtaagaaactcttgatagctatgtctattttatatcagtcactgagacttttttttaagtttttatttattattaagacaactttgccaaaaaagtcccctaagcacaactatttacatttctttatagcctcttctgatctctaacacatatgcagttttaactgttattttcatagtaactgatcttttgtctaaggatttttacctgaaagcacaatgtattgagtctcttgaaaatcatctttcagatctttttacagaatgaacttatgcactgctactgtagtattctcaaggaatatatgtaaacacaaatgtatgcctgaggttggtttttgcagaaaacagtctctgcttctaaaaacttctatgtctagtcttccataggaaatcctcactgtttaaccatgtgaggagcctaagtcattaaacggatcatgtctgtacattgtgtaatgaatgaaaagcacataaatgtaatctactttgaactttgtaaaaatgatgtgtggaggctattcttgtttctccatctcaagtcctgtgtgtgcacgtgtgtgcaagtgcacatgtgtgtgtgtaataacacattgtaaagaacagaaattactttaaaaaataaacagaaatggagacctgagcttcaaaaaaaaaaaaaaaaacagaacaaagaaaaaacaaaacaagaaaaaaaaaagaaaaaaaaaaaaaaaaaaagacagacacaagagaagagaaacaacagaaagaagaagaggaggcgcggagggagagaggacgagaaggagaacaaaaaaaaaaaagaagaggaacgacaaagaaatagaaaaaacaaaaggataacaataaaaatagaaatacagacagaaaacaaaggagagag

SEQ ID NO: 434542 - DNA, 2733 bp, Homo sapiens
agcggggtctcccagcaggcagtgcagcctagggacgctgacaaaggagcggaggagcagtcgcagctgctttccgaggaagccggtgttgccgagatggagtctcactctgtctcccaggttggagtgcagtggcatgatctcggctcactgcaacctccgcctcccgggttcaagtgattctcctgcctcagcctccctagtagctgggattacagattgccaaaatgctttggagtttttaactgaatctaagaaaagtccaaaatagatttgagactgtaaaaacagaaactgcagcaagggggattcagtgccaatgcatcaacaaaaaagacaaccagagttagtggaaggaaatcttcctgttttcgtgttccccacggagctcatattttatgcagatgatcagtcaacacataagcaagtgttgacactgtacaatccctatgagtttgccttaaagttcaaagttttgtgtactactccaaataagtatgttgtcgttgatgctgcaggtgcagtaaagcctcagtgttgtgtggatattgtgattcgtcatcgagatgttcgatcctgtcactatggtgtaatagacaaattccgtctccaagtttccgagcaaagccaaaggaaggctttgggaagaaaagaggttgttgctactcttctcccatcagcaaaagaacaacaaaaggaagaagaggaaaaaagattaaaggaacatttaactgaaagtttattttttgagcagtcgtttcaaccagaaaacagagctgtatcctcaggacctagtttactaactgtcttcctgggagtggtgtgcattgcagccctgatgctgcctacactgggggatgtggaatcgctggtgcctctctacctccacttaagtgtgaatcaaaaattagtggctgcttatatcttaggtcttatcacaatggccatacttagaacatgagcaaggatttcaattgacttctgaagtaaatctgtcttgaaaatatgaatgtggactgccttttatctctatttcactccattaacatgcaacaaactattgaatgatttcaaataattgcaaatgtataatatatattttaaattataatttaatttgaaggactgcagaacattattttacagacagcaaggatgcttctgagtgacacctaggaaattatttgaagaaattctttttatatctatacctgttgtgtaagaaactttaaaacatttgttattttctcacctttttttctaattcactttgattgctaggggtcatgtatgcttcgaagttacaggactaaaagagcaaactgaccggcctaaaactaaaatgacatttattccctagctacaaacatcagcgttattatgttaattataccttgccctctatcattataaatggttgccatggtgtttctaaaaataagtgttttaccattaatgtgtagagggcaaacaaagcataaagtactaagggatcatgcttatcctagggtctcacagaagagaggacatatttaattaatcttgtgaattacagaacaggttgtggtccagacaccaagaatcataggggtttttttttaaaaaacctaatagaagtagggtgacctctctctttggtctaagagttctaaaggaaggtaggcatctgtttaattagttggttcaccctggctttacctctggttaatgctttgtgttaataggaaggaaaaatcactttatcttttcttccaagcccctccctgcctgacttacccagactgggattaccagataccaggtgatttatgtggagatgatttttcacctttaaactctaagccaagtgtaagaaactcttgatagctatgtctattttatatcagtcactgagacttttttttaagtttttatttattattaagacaactttgccaaaaaagtcccctaagcacaactatttacatttctttatagcctcttctgatctctaacacatatgcagttttaactgttattttcatagtaactgatcttttgtctaaggatttttacctgaaagcacaatgtattgagtctcttgaaaatcatctttcagatctttttacagaatgaacttatgcactgctactgtagtattctcaaggaatatatgtaaacacaaatgtatgcctgaggttggtttttgcagaaaacagtctctgcttctaaaaacttctatgtctagtcttccataggaaatcctcactgtttaaccatgtgaggagcctaagtcattaaacggatcatgtctgtacattgtgtaatgaatgaaaagcacataaatgtaatctactttgaactttgtaaaaatgatgtgtggaggctattcttgtttctccatctcaagtcctgtgtgtgcacgtgtgtgcaagtgcacatgtgtgtgtgtaataacacattgtaaagaacagaaattactttaaaaaataaacagaaatggagacctgagcttcaaaaaaaaaaaaaaaaacagaacaaagaaaaaacaaaacaagaaaaaaaaaagaaaaaaaaaaaaaaaaaaagacagacacaagagaagagaaacaacagaaagaagaagaggaggcgcggagggagagaggacgagaaggagaacaaaaaaaaaaaagaagaggaacgacaaagaaatagaaaaaacaaaaggataacaataaaaatagaaatacagacagaaaacaaaggagagag

SEQ ID NO: 434543 - DNA, 2380 bp, Homo sapiens
agcggggtctcccagcaggcagtgcagcctagggacgctgacaaaggagcggaggagcagtcgcagctgctttccgaggaagccggtgttgccgagattgccaaaatgctttggagtttttaactgaatctaagaaaagtccaaaatagatttgagactgtaaaaacagaaactgcagcaagggggattcagtgccaatgcatcaacaaaaaagacaaccagagttagtggaaggaaatcttcctgttttcgtgttccccacggagctcatattttatgcagatgatcagtcaacacataagcaagtgttgacactgtacaatccctatgagtttgccttaaagttcaaagttttgtgtactactccaaataagtatgttgtcgttgatgctgcaggtgcagtaaagcctcagtgttgtgtggatattgtgattcgtcatcgagatgttcgatcctgtcactatggtgtaatagacaaattccgtctccaagtttccgagcaaagccaaaggaaggctttgggaagaaaagaggttgttgctactcttctcccatcagcaaaagaacaacaaaaggaagaagaggaaaaaagattaaaggaacatttaactgaaagtttattttttgagcagtcgtttcaaccagaaaacagagctgtatcctcaggacctagtttactaactgtcttcctgggagtggtgtgcattgcagccctgatgctgcctacactgggggatgtggaatcgctggtgcctctctacctccacttaagtgtgaatcaaaaattagtggctgcttatatcttaggtcttatcacaatggccatacttagaacatgagcaaggatttcaattgacttctgaagtaaatctgtcttgaaaatatgaatgtggactgccttttatctctatttcactccattaacatgcaacaaactattgaatgatttcaaataattgcaaatgtataatatatattttaaattataatttaatttgaaggactgcagaacattattttacagacagcaaggatgcttctgagtgacacctaggaaattatttgaagaaattctttttatatctatacctgttgtgtaagaaactttaaaacatttgttattttctcacctttttttctaattcactttgattgctaggggtcatgtatgcttcgaagttacaggactaaaagagcaaactgaccggcctaaaactaaaatgacatttattccctagctacaaacatcagcgttattatgttaattataccttgccctctatcattataaatggttgccatggtgtttctaaaaataagtgttttaccattaatgtgtagagggcaaacaaagcataaagtactaagggatcatgcttatcctagggtctcacagaagagaggacatatttaattaatcttgtgaattacagaacaggttgtggtccagacaccaagaatcataggggtttttttttaaaaaacctaatagaagtagggtgacctctctctttggtctaagagttctaaaggaaggtaggcatctgtttaattagttggttcaccctggctttacctctggttaatgctttgtgttaataggaaggaaaaatcactttatcttttcttccaagcccctccctgcctgacttacccagactgggattaccagataccaggtgatttatgtggagatgatttttcacctttaaactctaagccaagtgtaagaaactcttgatagctatgtctattttatatcagtcactgagacttttttttaagtttttatttattattaagacaactttgccaaaaaagtcccctaagcacaactatttacatttctttatagcctcttctgatctctaacacatatgcagttttaactgttattttcatagtaactgatcttttgtctaaggatttttacctgaaagcacaatgtattgagtctcttgaaaatcatctttcagatctttttacagaatgaacttatgcactgctactgtagtattctcaaggaatatatgtaaacacaaatgtatgcctgaggttggtttttgcagaaaacagtctctgcttctaaaaacttctatgtctagtcttccataggaaatcctcactgtttaaccatgtgaggagcctaagtcattaaacggatcatgtctgtacattgtgtaatgaatgaaaagcacataaatgtaatctactttgaactttgtaaaaatgatgtgtggaggctattcttgtttctccatctcaagtcctgtgtgtgcacgtgtgtgcaagtgcacatgtgtgtgtgtaataacacattgtaaagaacagaaattactttaaaaaaaaagtcgacgcggccgcgaatttagtagtagta

SEQ ID NO: 434544 - DNA, 2234 bp, Homo sapiens
ggtcgggggagttggtgaccacctttcagtaagaactcactacctcacaatgccacgtcagcattccatcctgcaatgattcagaccagttaagacatgggcttccacatcagcccagcagttaactctcagatggaaaaaatgatggggaaacaattggagaagttagacaaaatcagaatactggtctgtggtggccagtgtttgtgaaggaacttttgtcttaaagtttttagaaggaagcttagggatttttgtctttttacagaaaacagagctgtatcctcaggacctagtttactaactgtcttcctgggagtggtgtgcattgcagccctgatgctgcctacactgggggatgtggaatcgctggtgcctctctacctccacttaagtgtgaatcaaaaattagtggctgcttatatcttaggtcttatcacaatggccatacttagaacatgagcaaggatttcaattgacttctgaagtaaatctgtcttgaaaatatgaatgtggactgccttttatctctatttcactccattaacatgcaacaaactattgaatgatttcaaataattgcaaatgtataatatatattttaaattataatttaatttgaaggactgcagaacattattttacagacagcaaggatgcttctgagtgacacctaggaaattatttgaagaaattctttttatatctatacctgttgtgtaagaaactttaaaacatttgttattttctcacctttttttctaattcactttgattgctaggggtcatgtatgcttcgaagttacaggactaaaagagcaaactgaccggcctaaaactaaaatgacatttattccctagctacaaacatcagcgttattatgttaattataccttgccctctatcattataaatggttgccatggtgtttctaaaaataagtgttttaccattaatgtgtagagggcaaacaaagcataaagtactaagggatcatgcttatcctagggtctcacagaagagaggacatatttaattaatcttgtgaattacagaacaggttgtggtccagacaccaagaatcataggggtttttttttaaaaaacctaatagaagtagggtgacctctctctttggtctaagagttctaaaggaaggtaggcatctgtttaattagttggttcaccctggctttacctctggttaatgctttgtgttaataggaaggaaaaatcactttatcttttcttccaagcccctccctgcctgacttacccagactgggattaccagataccaggtgatttatgtggagatgatttttcacctttaaactctaagccaagtgtaagaaactcttgatagctatgtctattttatatcagtcactgagacttttttttaagtttttatttattattaagacaactttgccaaaaaagtcccctaagcacaactatttacatttctttatagcctcttctgatctctaacacatatgcagttttaactgttattttcatagtaactgatcttttgtctaaggatttttacctgaaagcacaatgtattgagtctcttgaaaatcatctttcagatctttttacagaatgaacttatgcactgctactgtagtattctcaaggaatatatgtaaacacaaatgtatgcctgaggttggtttttgcagaaaacagtctctgcttctaaaaacttctatgtctagtcttccataggaaatcctcactgtttaaccatgtgaggagcctaagtcattaaacggatcatgtctgtacattgtgtaatgaatgaaaagcacataaatgtaatctactttgaactttgtaaaaatgatgtgtggaggctattcttgtttctccatctcaagtcctgtgtgtgcacgtgtgtgcaagtgcacatgtgtgtgtgtaataacacattgtaaagaacagaaattactttaaaaaataaacagaaatggagacctgagcttcaaaaaaaaaaaaaaaaacagaacaaagaaaaaacaaaacaagaaaaaaaaaagaaaaaaaaaaaaaaaaaaagacagacacaagagaagagaaacaacagaaagaagaagaggaggcgcggagggagagaggacgagaaggagaacaaaaaaaaaaaagaagaggaacgacaaagaaatagaaaaaacaaaaggataacaataaaaatagaaatacagacagaaaacaaaggagagag

SEQ ID NO: 434545 - DNA, 2535 bp, Homo sapiens
agcggggtctcccagcaggcagtgcagcctagggacgctgacaaaggagcggaggagcagtcgcagctgctttccgaggaagccggtgttgccgagattgccaaaatgctttggagtttttaactgaatctaagaaaagtccaaaatagatttgagactgtaaaaacagaaactgcagcaagggggattcagtgccaatgcatcaacaaaaaagacaaccagagttagtggaaggaaatcttcctgttttcgtgttccccacggagctcatattttatgcagatgatcagtcaacacataagcaagtgttgacactgtacaatccctatgagtttgccttaaagttcaaagtgtgattcgtcatcgagatgttcgatcctgtcactatggtgtaatagacaaattccgtctccaagtttccgagcaaagccaaaggaaggctttgggaagaaaagaggttgttgctactcttctcccatcagcaaaagaacaacaaaaggaagaagaggaaaaaagattaaaggaacatttaactgaaagtttattttttgagcagtcgtttcaaccagaaaacagagctgtatcctcaggacctagtttactaactgtcttcctgggagtggtgtgcattgcagccctgatgctgcctacactgggggatgtggaatcgctggtgcctctctacctccacttaagtgtgaatcaaaaattagtggctgcttatatcttaggtcttatcacaatggccatacttagaacatgagcaaggatttcaattgacttctgaagtaaatctgtcttgaaaatatgaatgtggactgccttttatctctatttcactccattaacatgcaacaaactattgaatgatttcaaataattgcaaatgtataatatatattttaaattataatttaatttgaaggactgcagaacattattttacagacagcaaggatgcttctgagtgacacctaggaaattatttgaagaaattctttttatatctatacctgttgtgtaagaaactttaaaacatttgttattttctcacctttttttctaattcactttgattgctaggggtcatgtatgcttcgaagttacaggactaaaagagcaaactgaccggcctaaaactaaaatgacatttattccctagctacaaacatcagcgttattatgttaattataccttgccctctatcattataaatggttgccatggtgtttctaaaaataagtgttttaccattaatgtgtagagggcaaacaaagcataaagtactaagggatcatgcttatcctagggtctcacagaagagaggacatatttaattaatcttgtgaattacagaacaggttgtggtccagacaccaagaatcataggggtttttttttaaaaaacctaatagaagtagggtgacctctctctttggtctaagagttctaaaggaaggtaggcatctgtttaattagttggttcaccctggctttacctctggttaatgctttgtgttaataggaaggaaaaatcactttatcttttcttccaagcccctccctgcctgacttacccagactgggattaccagataccaggtgatttatgtggagatgatttttcacctttaaactctaagccaagtgtaagaaactcttgatagctatgtctattttatatcagtcactgagacttttttttaagtttttatttattattaagacaactttgccaaaaaagtcccctaagcacaactatttacatttctttatagcctcttctgatctctaacacatatgcagttttaactgttattttcatagtaactgatcttttgtctaaggatttttacctgaaagcacaatgtattgagtctcttgaaaatcatctttcagatctttttacagaatgaacttatgcactgctactgtagtattctcaaggaatatatgtaaacacaaatgtatgcctgaggttggtttttgcagaaaacagtctctgcttctaaaaacttctatgtctagtcttccataggaaatcctcactgtttaaccatgtgaggagcctaagtcattaaacggatcatgtctgtacattgtgtaatgaatgaaaagcacataaatgtaatctactttgaactttgtaaaaatgatgtgtggaggctattcttgtttctccatctcaagtcctgtgtgtgcacgtgtgtgcaagtgcacatgtgtgtgtgtaataacacattgtaaagaacagaaattactttaaaaaataaacagaaatggagacctgagcttcaaaaaaaaaaaaaaaaacagaacaaagaaaaaacaaaacaagaaaaaaaaaagaaaaaaaaaaaaaaaaaaagacagacacaagagaagagaaacaacagaaagaagaagaggaggcgcggagggagagaggacgagaaggagaacaaaaaaaaaaaagaagaggaacgacaaagaaatagaaaaaacaaaaggataacaataaaaatagaaatacagacagaaaacaaaggagagag

SEQ ID NO: 434546 - DNA, 2470 bp, Homo sapiens
agcggggtctcccagcaggcagtgcagcctagggacgctgacaaaggagcggaggagcagtcgcagctgctttccgaggaagccggtgttgccgagattgccaaaatgctttggagtttttaactgaatctaagaaaagtccaaaatagatttgagactgtaaaaacagaaactgcagcaagggggattcagtgccaatgcatcaacaaaaaagacaaccagagttagtggaaggaaatcttcctgttttcgtgttccccacggagctcatattttatgcagatgatcagtcaacacataagcaagtgttgacactgtacaatccctatgagtttgccttaaagttcaaagttttgtgtactactccaaataagtatgttgtcgttgatgctgcaggtgcagtaaagcctcagtgttgtgtggatatgtaagtcaagatcaattcctgtgtgattcgtcatcgagatgttcgatcctgtcactatggtgtaatagacaaattccgtctccaagtttccgagcaaagccaaaggaaggctttgggaagaaaagaggttgttgctactcttctcccatcagcaaaagaacaacaaaaggaagaagaggaaaaaagattaaaggaacatttaactgaaagtttattttttgagcagtcgtttcaaccaggtcttatcacaatggccatacttagaacatgagcaaggatttcaattgacttctgaagtaaatctgtcttgaaaatatgaatgtggactgccttttatctctatttcactccattaacatgcaacaaactattgaatgatttcaaataattgcaaatgtataatatatattttaaattataatttaatttgaaggactgcagaacattattttacagacagcaaggatgcttctgagtgacacctaggaaattatttgaagaaattctttttatatctatacctgttgtgtaagaaactttaaaacatttgttattttctcacctttttttctaattcactttgattgctaggggtcatgtatgcttcgaagttacaggactaaaagagcaaactgaccggcctaaaactaaaatgacatttattccctagctacaaacatcagcgttattatgttaattataccttgccctctatcattataaatggttgccatggtgtttctaaaaataagtgttttaccattaatgtgtagagggcaaacaaagcataaagtactaagggatcatgcttatcctagggtctcacagaagagaggacatatttaattaatcttgtgaattacagaacaggttgtggtccagacaccaagaatcataggggtttttttttaaaaaacctaatagaagtagggtgacctctctctttggtctaagagttctaaaggaaggtaggcatctgtttaattagttggttcaccctggctttacctctggttaatgctttgtgttaataggaaggaaaaatcactttatcttttcttccaagcccctccctgcctgacttacccagactgggattaccagataccaggtgatttatgtggagatgatttttcacctttaaactctaagccaagtgtaagaaactcttgatagctatgtctattttatatcagtcactgagacttttttttaagtttttatttattattaagacaactttgccaaaaaagtcccctaagcacaactatttacatttctttatagcctcttctgatctctaacacatatgcagttttaactgttattttcatagtaactgatcttttgtctaaggatttttacctgaaagcacaatgtattgagtctcttgaaaatcatctttcagatctttttacagaatgaacttatgcactgctactgtagtattctcaaggaatatatgtaaacacaaatgtatgcctgaggttggtttttgcagaaaacagtctctgcttctaaaaacttctatgtctagtcttccataggaaatcctcactgtttaaccatgtgaggagcctaagtcattaaacggatcatgtctgtacattgtgtaatgaatgaaaagcacataaatgtaatctactttgaactttgtaaaaatgatgtgtggaggctattcttgtttctccatctcaagtcctgtgtgtgcacgtgtgtgcaagtgcacatgtgtgtgtgtaataacacattgtaaagaacagaaattactttaaaaaataaacagaaatggagacctgagcttcaaaaaaaaaaaaaaaaacagaacaaagaaaaaacaaaacaagaaaaaaaaaagaaaaaaaaaaaaaaaaaaagacagacacaagagaagagaaacaacagaaagaagaagaggaggcgcggagggagagaggacgagaaggagaacaaaaaaaaaaaagaagaggaacgacaaagaaatagaaaaaacaaaaggataacaataaaaatagaaatacagacagaaaacaaaggagagag

SEQ ID NO: 434547 - DNA, 2584 bp, Homo sapiens
agcggggtctcccagcaggcagtgcagcctagggacgctgacaaaggagcggaggagcagtcgcagctgctttccgaggaagccggtgttgccgagattgccaaaatgctttggagtttttaactgaatctaagaaaagtccaaaatagatttgagactgtaaaaacagaaactgcagcaagggggattcagtgccaatgcatcaacaaaaaagacaaccagagttagtggaaggaaatcttcctgttttcgtgttccccacggagctcatattttatgcagatgatcagtcaacacataagcaagtgttgacactgtacaatccctatgagtttgccttaaagttcaaaggtgagtctcctagctctattttctgggtttttaactggtccctactaattttttacttgtagaaactaattaaaaaaaaaaaacactaatggccattgtgactttttctttcagttttgtgtactactccaaataagtatgttgtcgttgatgctgcaggtgcagtaaagcctcagtgttgtgtggatatgtaagtcaagatcaattcctgtgtgattcgtcatcgagatgttcgatcctgtcactatggtgtaatagacaaattccgtctccaagtttccgagcaaagccaaaggaaggctttgggaagaaaagaggttgttgctactcttctcccatcagcaaaagaacaacaaaaggaagaagaggaaaaaagattaaaggaacatttaactgaaagtttattttttgagcagtcgtttcaaccaggtcttatcacaatggccatacttagaacatgagcaaggatttcaattgacttctgaagtaaatctgtcttgaaaatatgaatgtggactgccttttatctctatttcactccattaacatgcaacaaactattgaatgatttcaaataattgcaaatgtataatatatattttaaattataatttaatttgaaggactgcagaacattattttacagacagcaaggatgcttctgagtgacacctaggaaattatttgaagaaattctttttatatctatacctgttgtgtaagaaactttaaaacatttgttattttctcacctttttttctaattcactttgattgctaggggtcatgtatgcttcgaagttacaggactaaaagagcaaactgaccggcctaaaactaaaatgacatttattccctagctacaaacatcagcgttattatgttaattataccttgccctctatcattataaatggttgccatggtgtttctaaaaataagtgttttaccattaatgtgtagagggcaaacaaagcataaagtactaagggatcatgcttatcctagggtctcacagaagagaggacatatttaattaatcttgtgaattacagaacaggttgtggtccagacaccaagaatcataggggtttttttttaaaaaacctaatagaagtagggtgacctctctctttggtctaagagttctaaaggaaggtaggcatctgtttaattagttggttcaccctggctttacctctggttaatgctttgtgttaataggaaggaaaaatcactttatcttttcttccaagcccctccctgcctgacttacccagactgggattaccagataccaggtgatttatgtggagatgatttttcacctttaaactctaagccaagtgtaagaaactcttgatagctatgtctattttatatcagtcactgagacttttttttaagtttttatttattattaagacaactttgccaaaaaagtcccctaagcacaactatttacatttctttatagcctcttctgatctctaacacatatgcagttttaactgttattttcatagtaactgatcttttgtctaaggatttttacctgaaagcacaatgtattgagtctcttgaaaatcatctttcagatctttttacagaatgaacttatgcactgctactgtagtattctcaaggaatatatgtaaacacaaatgtatgcctgaggttggtttttgcagaaaacagtctctgcttctaaaaacttctatgtctagtcttccataggaaatcctcactgtttaaccatgtgaggagcctaagtcattaaacggatcatgtctgtacattgtgtaatgaatgaaaagcacataaatgtaatctactttgaactttgtaaaaatgatgtgtggaggctattcttgtttctccatctcaagtcctgtgtgtgcacgtgtgtgcaagtgcacatgtgtgtgtgtaataacacattgtaaagaacagaaattactttaaaaaataaacagaaatggagacctgagcttcaaaaaaaaaaaaaaaaacagaacaaagaaaaaacaaaacaagaaaaaaaaaagaaaaaaaaaaaaaaaaaaagacagacacaagagaagagaaacaacagaaagaagaagaggaggcgcggagggagagaggacgagaaggagaacaaaaaaaaaaaagaagaggaacgacaaagaaatagaaaaaacaaaaggataacaataaaaatagaaatacagacagaaaacaaaggagagag

SEQ ID NO: 434548 - DNA, 2383 bp, Homo sapiens
  misc_feature (2335)..(2335): n is a, c, g, or t
  misc_feature (2355)..(2355): n is a, c, g, or t
  misc_feature (2358)..(2358): n is a, c, g, or t
  misc_feature (2361)..(2361): n is a, c, g, or t
  misc_feature (2368)..(2368): n is a, c, g, or t
agcggggtctcccagcaggcagtgcagcctagggacgctgacaaaggagcggaggagcagtcgcagctgctttccgaggaagccggtgttgccgagattgccaaaatgctttggagtttttaactgaatctaagaaaagtccaaaatagatttgagactgtaaaaacagaaactgcagcaagggggattcagtgccaatgcatcaacaaaaaagacaaccagagttagtggaaggaaatcttcctgttttcgtgttccccacggagctcatattttatgcagatgatcagtcaacacataagcaagtgttgacactgtacaatccctatgagtttgccttaaagttcaaagttttgtgtactactccaaataagtatgttgtcgttgatgctgcaggtgcagtaaagcctcagtgttgtgtggatattgtgattcgtcatcgagatgttcgatcctgtcactatggtgtaatagacaaattccgtctccaagtttccgagcaaagccaaaggaaggctttgggaagaaaagaggttgttgctactcttctcccatcagcaaaagaacaacaaaaggaagaagaggaaaaaagattaaaggaacatttaactgaaagtttattttttgagcagtcgtttcaaccagaaaacagagctgtatcctcaggacctagtttactaactgtcttcctgggagtggtgtgcattgcagccctgatgctgcctacactgggggatgtggaatcgctggtgcctctctacctccacttaagtgtgaatcaaaaattagtggctgcttatatcttaggtcttatcacaatggccatacttagaacatgagcaaggatttcaattgacttctgaagtaaatctgtcttgaaaatatgaatgtggactgccttttatctctatttcactccattaacatgcaacaaactattgaatgatttcaaataattgcaaatgtataatatatattttaaattataatttaatttgaaggactgcagaacattattttacagacagcaaggatgcttctgagtgacacctaggaaattatttgaagaaattctttttatatctatacctgttgtgtaagaaactttaaaacatttgttattttctcacctttttttctaattcactttgattgctaggggtcatgtatgcttcgaagttacaggactaaaagagcaaactgaccggcctaaaactaaaatgacatttattccctagctacaaacatcagcgttattatgttaattataccttgccctctatcattataaatggttgccatggtgtttctaaaaataagtgttttaccattaatgtgtagagggcaaacaaagcataaagtactaagggatcatgcttatcctagggtctcacagaagagaggacatatttaattaatcttgtgaattacagaacaggttgtggtccagacaccaagaatcataggggtttttttttaaaaaacctaatagaagtagggtgacctctctctttggtctaagagttctaaaggaaggtaggcatctgtttaattagttggttcaccctggctttacctctggttaatgctttgtgttaataggaaggaaaaatcactttatcttttcttccaagcccctccctgcctgacttacccagactgggattaccagataccaggtgatttatgtggagatgatttttcacctttaaactctaagccaagtgtaagaaactcttgatagctatgtctattttatatcagtcactgagacttttttttaagtttttatttattattaagacaactttgccaaaaaagtcccctaagcacaactatttacatttctttatagcctcttctgatctctaacacatatgcagttttaactgttattttcatagtaactgatcttttgtctaaggatttttacctgaaagcacaatgtattgagtctcttgaaaatcatctttcagatctttttacagaatgaacttatgcactgctactgtagtattctcaaggaatatatgtaaacacaaatgtatgcctgaggttggtttttgcagaaaacagtctctgcttctaaaaacttctatgtctagtcttccataggaaatcctcactgtttaaccatgtgaggagcctaagtcattaaacggatcatgtctgtacattgtgtaatgaatgaaaagcacataaatgtaatctactttgaactttgtaaaaatgatgtgtggaggctattcttgtttctccatctcaagtcctgtgtgtgcacgtgtgtgcaagtgcacatgtgtgtgtgtaataacatcacttggttaaaaagacnaattaaacaccactctaccnttnttnaacaaantaacatgaattagcc

SEQ ID NO: 434549 - DNA, 2583 bp, Homo sapiens
agcggggtctcccagcaggcagtgcagcctagggacgctgacaaaggagcggaggagcagtcgcagctgctttccgaggaagccggtgttgccgagattgccaaaatgctttggagtttttaactgaatctaagaaaagtccaaaatagatttgagactgtaaaaacagaaactgcagcaagggggattcagtgccaatgcatcaacaaaaaagacaaccagagttagtggaaggaaatcttcctgttttcgtgttccccacggagctcatattttatgcagatgatcagtcaacacataagcaagtgttgacactgtacaatccctatgagtttgccttaaagttcaaagttttgtgtactactccaaataagtatgttgtcgttgatgctgcaggtgcagtaaagcctcagtgttgtgtggatattgtgattcgtcatcgagatgttcgatcctgtcactatggtgtaatagacaaattccgtctccaagtttccgagcaaagccaaaggaaggctttgggaagaaaagaggttgttgctactcttctcccatcagcaaaagaacaacaaaaggaagaagaggaaaaaagattaaaggaacatttaactgaaagtttattttttgagcagtcgtttcaaccagaaaacagagctgtatcctcaggacctagtttactaactgtcttcctgggagtggtgtgcattgcagccctgatgctgcctacactgggggatgtggaatcgctggtgcctctctacctccacttaagtgtgaatcaaaaattagtggctgcttatatcttaggtcttatcacaatggccatacttagaacatgagcaaggatttcaattgacttctgaagtaaatctgtcttgaaaatatgaatgtggactgccttttatctctatttcactccattaacatgcaacaaactattgaatgatttcaaataattgcaaatgtataatatatattttaaattataatttaatttgaaggactgcagaacattattttacagacagcaaggatgcttctgagtgacacctaggaaattatttgaagaaattctttttatatctatacctgttgtgtaagaaactttaaaacatttgttattttctcacctttttttctaattcactttgattgctaggggtcatgtatgcttcgaagttacaggactaaaagagcaaactgaccggcctaaaactaaaatgacatttattccctagctacaaacatcagcgttattatgttaattataccttgccctctatcattataaatggttgccatggtgtttctaaaaataagtgttttaccattaatgtgtagagggcaaacaaagcataaagtactaagggatcatgcttatcctagggtctcacagaagagaggacatatttaattaatcttgtgaattacagaacaggttgtggtccagacaccaagaatcataggggtttttttttaaaaaacctaatagaagtagggtgacctctctctttggtctaagagttctaaaggaaggtaggcatctgtttaattagttggttcaccctggctttacctctggttaatgctttgtgttaataggaaggaaaaatcactttatcttttcttccaagcccctccctgcctgacttacccagactgggattaccagataccaggtgatttatgtggagatgatttttcacctttaaactctaagccaagtgtaagaaactcttgatagctatgtctattttatatcagtcactgagacttttttttaagtttttatttattattaagacaactttgccaaaaaagtcccctaagcacaactatttacatttctttatagcctcttctgatctctaacacatatgcagttttaactgttattttcatagtaactgatcttttgtctaaggatttttacctgaaagcacaatgtattgagtctcttgaaaatcatctttcagatctttttacagaatgaacttatgcactgctactgtagtattctcaaggaatatatgtaaacacaaatgtatgcctgaggttggtttttgcagaaaacagtctctgcttctaaaaacttctatgtctagtcttccataggaaatcctcactgtttaaccatgtgaggagcctaagtcattaaacggatcatgtctgtacattgtgtaatgaatgaaaagcacataaatgtaatctactttgaactttgtaaaaatgatgtgtggaggctattcttgtttctccatctcaagtcatgtgtgtgtgtaataacacattgtaaagaacagaaattactttaaaaaataaacagaaatggagacctgagcttcaaaaaaaaaaaaaaaaacagaacaaagaaaaaacaaaacaagaaaaaaaaaagaaaaaaaaaaaaaaaaaaagacagacacaagagaagagaaacaacagaaagaagaagaggaggcgcggagggagagaggacgagaaggagaacaaaaaaaaaaaagaagaggaacgacaaagaaatagaaaaaacaaaaggataacaataaaaatagaaatacagacagaaaacaaaggagagag

SEQ ID NO: 434550 - DNA, 1941 bp, Homo sapiens
aggggggtgctctcgccgccgggagaggcgagcgcgaggcagagagcgcgattcggctccaaactccggcgctgcagccgatcggactctgggccgcggtgggcaccgcgcgcagctagggagccgagaaccgcggcgagccccgaggacgcccagagcgcgagggtcgctgcgcctcgcagagccggagccgagtcgagccgggcgcccgggctgcctggccgcggcggcatgggggcgcccccgcggctctccgcgctgcccgccaccgcctcggccagtggccggaggcaggagcgcgtctgagcccatggcgaggggacccgccgccaccgcctccacccccgccgccccgccaccgccgccagctcccgggcaccatgcgaaccgccccgagcctccgccgctgcgtctgcctgctgctcgccgcgatcctggacctggcgcgcggctacctgacagtcaacattgagcctctcccccctgtggtggctggagacgccgtgactttgaagtgtaacttcaagacagatgggcgcatgcgggagatcgtgtggtaccgggtgacggatggtggcaccatcaagcaaaagatcttcaccttcgacgccatgttctccaccaactactcacacatggagaactaccgcaagcgagaggacctggtgtaccagtccactgtgaggctgcccgaggtccggatctcagacaatggtccctatgagtgccatgtgggcatctacgaccgcgccaccagggagaaggtggtcctggcatcaggcaacatcttcctcaacgtcatggctcctcccacctccattgaagtggtggctgctgacacaccagcccccttcagccgctaccaagcccagaacttcacgctggtctgcatcgtgtctggaggaaaaccagcacccatggtttatttcaaacgagatggggaaccaatcgacgcagtgcccctatcagagccaccagctgcgagctccggccccctacaggacagcaggcccttccgcagccttctgcaccgtgacctggatgacaccaagatgcagaagtcactgtccctcctggacgccgagaaccggggtgggcgaccctacacggagcgcccctcccgtggcctgaccccagatcccaacatcctcctccagccaaccacagagaacataccagagacggtcgtgagccgtgagtttccccgctgggtccacagcgccgagcccacctacttcctgcgccacagccgcaccccgagcagtgacggcactgtggaagtacgtgccctgctcacctggaccctcaacccacagatcgacaacgaggccctcttcagctgcgaggtcaagcacccagctctgtcgatgcccatgcaggcagaggtcacgctggttgcccccaaaggacccaaaattgtgatgacgcccagcagagcccgggtaggggacacagtgaggattctggtccatgggtttcagaacgaagtcttcccggagcccatgttcacgtggacgcgggttgggagccgcctcctggacggcagcgctgagttcgacgggaaggagctggtgctggagcgggttcccgccgagctcaatggctccatgtatcgctgcaccgcccagaacccactgggctccaccgacacgcacacccggctcatcgtgtttgaaaacccaaatatcccaagaggaacggaggactctaatggttccattggccccactggtgcccggctcaccttggtgctcgccctgacagtgattctggagctgacgtgaaggcacccgccccggccactccatcaggcactgacatctccacgaccggttttcatttcttttctaaactatttccagtcttgttcttagtctctttccatctgtgtcttggcttcttcagtcggtttaattaaaacaaacagaacaattttcccca

SEQ ID NO: 434551 - DNA, 1418 bp, Homo sapiens
tgcacccagcccatgttcacattttaattgtggaagccaggtgacggatggtggcaccatcaagcaaaagatcttcaccttcgacgccatgttctccaccaactactcacacatggagaactaccgcaagcgagaggacctggtgtaccagtccactgtgaggctgcccgaggtccggatctcagacaatggtccctatgagtgccatgtgggcatctacgaccgcgccaccagggagaaggtggtcctggcatcaggcaacatcttcctcaacgtcatggctcctcccacctccattgaagtggtggctgctgacacaccagcccccttcagccgctaccaagcccagaacttcacgctggtctgcatcgtgtctggaggaaaaccagcacccatggtttatttcaaacgagatggggaaccaatcgacgcagtgcccctatcagagccaccagctgcgagctccggccccctacaggacagcaggcccttccgcagccttctgcaccgtgacctggatgacaccaagatgcagaagtcactgtccctcctggacgccgagaaccggggtgggcgaccctacacggagcgcccctcccgtggcctgaccccagatcccaacatcctcctccagccaaccacagagaacataccagagacggtcgtgagccgtgagtttccccgctgggtccacagcgccgagcccacctacttcctgcgccacagccgcaccccgagcagtgacggcactgtggaagtacgtgccctgctcacctggaccctcaacccacagatcgacaacgaggccctcttcagctgcgaggtcaagcacccagctctgtcgatgcccatgcaggcagaggtcacgctggttgcccccaaaggacccaaaattgtgatgacgcccagcagagcccgggtaggggacacagtgaggattctggtccatgggtttcagaacgaagtcttcccggagcccatgttcacgtggacgcgggttgggagccgcctcctggacggcagcgctgagttcgacgggaaggagctggtgctggagcgggttcccgccgagctcaatggctccatgtatcgctgcaccgcccagaacccactgggctccaccgacacgcacacccggctcatcgtgtttgaaaacccaaatatcccaagaggaacggaggactctaatggttccattggccccactggtgcccggctcaccttggtgctcgccctgacagtgattctggagctgacgtgaaggcacccgccccggccactccatcaggcactgacatctccacgaccggttttcatttcttttctaaactatttccagtcttgttcttagtctctttccatctgtgtcttggcttcttcagtcggtttaattaaaacaaacagaacaattttcccca

SEQ ID NO: 434552 - DNA, 1705 bp, Homo sapiens
aggggggtgctctcgccgccgggagaggcgagcgcgaggcagagagcgcgattcggctccaaactccggcgctgcagccgatcggactctgggccgcggtgggcaccgcgcgcagctagggagccgagaaccgcggcgagccccgaggacgcccagagcgcgagggtcgctgcgcctcgcagagccggagccgagtcgagccgggcgcccgggctgcctggccgcggcggcatgggggcgcccccgcggctctccgcgctgcccgccaccgcctcggccagtggccggaggcaggagcgcgtctgagcccatggcgaggggacccgccggcaaccggctttcacccaaattatcttctcaccatggtgggaaactatcggcgagcgcagaggggcccctgggtgtgtcccgtccccctgtgtaggcgtgcccgagggtgcccgggatctcctcgaccacatgggtgccctttattgtagttgtccctgtggggcgactctatcgagcagcgcccaccccggggagaaggtggtcctggcatcaggcaacatcttcctcaacgtcatggctcctcccacctccattgaagtggtggctgctgacacaccagcccccttcagccgctaccaagcccagaacttcacgctggtctgcatcgtgtctggaggaaaaccagcacccatggtttatttcaaacgagatggggaaccaatcgacgcagtgcccctatcagagccaccagctgcgagctccggccccctacaggacagcaggcccttccgcagccttctgcaccgtgacctggatgacaccaagatgcagaagtcactgtccctcctggacgccgagaaccggggtgggcgaccctacacggagcgcccctcccgtggcctgaccccagatcccaacatcctcctccagccaaccacagagaacataccagagacggtcgtgagccgtgagtttccccgctgggtccacagcgccgagcccacctacttcctgcgccacagccgcaccccgagcagtgacggcactgtggaagtacgtgccctgctcacctggaccctcaacccacagatcgacaacgaggccctcttcagctgcgaggtcaagcacccagctctgtcgatgcccatgcaggcagaggtcacgctggttgcccccaaaggacccaaaattgtgatgacgcccagcagagcccgggtaggggacacagtgaggattctggtccatgggtttcagaacgaagtcttcccggagcccatgttcacgtggacgcgggttgggagccgcctcctggacggcagcgctgagttcgacgggaaggagctggtgctggagcgggttcccgccgagctcaatggctccatgtatcgctgcaccgcccagaacccactgggctccaccgacacgcacacccggctcatcgtgtttgaaaacccaaatatcccaagaggaacggaggactctaatggttccattggccccactggtgcccggctcaccttggtgctcgccctgacagtgattctggagctgacgtgaaggcacccgccccggccactccatcaggcactgacatctccacgaccggttttcatttcttttctaaactatttccagtcttgttcttagtctctttccatctgtgtcttggcttcttcagtcggtttaattaaaacaaacagaacaattttcccca

SEQ ID NO: 434553 - DNA, 901 bp, Homo sapiens
gaccccactgtccactgggcctctctgatcttgtccctcatggcactggcttgtacttgtctgttgtttgtctttcttccccactgatgtgtgaaccccccaagagcaggaatcatgtcctatatacacccttgactccccaggtcctagagagcatctgattcattgcatgggcttagggaatatgtctgaatgaatgcagctgtgaatgagtgaatgaatgaatgagcacactgagcttctcacagaagcagctgatcccaaggatgttgattgctagactagaactttctcttccatgtaccctgtccctcctttccttactctctctgacctggcctttctctccctacagttgcccccaaaggacccaaaattgtgatgacgcccagcagagcccgggtaggggacacagtgaggattctggtccatgggtttcagaacgaagtcttcccggagcccatgttcacgtggacgcgggttgggagccgcctcctggacggcagcgctgagttcgacgggaaggagctggtgctggagcgggttcccgccgagctcaatggctccatgtatcgctgcaccgcccagaacccactgggctccaccgacacgcacacccggctcatcgtgtttgaaaacccaaatatcccaagaggaacggaggactctaatggttccattggccccactggtgcccggctcaccttggtgctcgccctgacagtgattctggagctgacgtgaaggcacccgccccggccactccatcaggcactgacatctccacgaccggttttcatttcttttctaaactatttccagtcttgttcttagtctctttccatctgtgtcttggcttcttcagtcggtttaattaaaacaaacagaacaattttcccca

SEQ ID NO: 434554 - DNA, 3471 bp, Homo sapiens
  misc_feature (594)..(594): n is a, c, g, or t
  misc_feature (669)..(669): n is a, c, g, or t
  misc_feature (1723)..(1723): n is a, c, g, or t
taacagaggataatgttaacggaaattgtgtagtcaagagttaaaatctggccaaaataatctgaccagatagttatatagttaggctacattctatcaagaaacataaaggaatagagatattttaaatgttgtgatattccttatttataatccccttcatagtacttttcatactgtactataatataatgtatctgtttacttgtctgtatccccctctaggctgtaagttccttgaagaaagaaagaactctctcccattctctcttatagtagaagttagcatagaggtgcctggcatataggtggccagacacctattcaaaccctgtagaatgaatgcttttacagctagtaaacagaccaaagcccatacccaatatcatatgctgcatattgtcaatagaaatactggaggagcaactgggaagcaggcactcagaaattttttttgagtggtaaagagggtcctgatcttagatgctttcagtcagagctgcagtatacagttggataggttgttcactgcacaaggttaaccagctaagggcactaattggggcagaaaatccagcctgtattctacttganaagccatcaactccaacaccgctctgtatctgcccacaggaagcaatgccttttttcaaattcctacaaaggccntgtacaaacttcagatagtcttgatttaaataatgacagagtaataatgtctgacaggttacatctcaggagcaagaaaaattgccctaccaatctgattccaccagagagtaaaagaaatagtgaagactgtctattcttaaaatgaaaacactgaggttggagatggtttttctctggattctcaacatagggtgatgtgcttacaaaataattttttttaaataaaaaagacccacataagggagcctctgtattcaacttgatcccagaatatgagttacagaatcagagatgcataaaaatctggaagaaaccttaaagttcatagaattccattgctagaaggaactttagatatcatctggtccaagaatcttaattttacagatgaggaaaccaaaaagatcaggaagattatgtgatttgcctgtggatggttagcaaagctaaatctagaacctggttgttttctacctctcaatcgaacactctttaccacagctggttggacttgacatcattataatcaactaagactgattgcgcacccactgtgtgggagaggctgacatggacttggtttccatcaagggcctagcaatgaggttgagaaaacaggaaatccaagcatcaaaagataagtaataatatgagatggcatatgaagcaaggtttagattccagtttcccagtgggagtggtgacaccaaggtgagtgatgggtgtggggtggagtgccctcgtatccacccacctatgcgtcctggttctgtctggaggcaccagggccaggtgacaaaacgtccaggcgaggccgcagtagggcctaaggtcaaaaagagcaatgctgaatcctacatcctggggccctcctaacacgtagcttaaggctctgggctcatgacccacattgtaaggatgagtggggtaaagcctatccacatctgggctgtgaattccagaagcgggggaccgaggcagctgtgcatgaagaccgcaaggaaggaggaagggagccgaggaggcccaagagcggcgggcgacctgacancaccctgccctcccagccagaggggcaggggggaaccccgcgcgcggcgccggtgcagcccgggcttccggggcggcgcacgcggccggggggcggggcgggggccgaagcaccgcctacgtcgggctgcgtgacaatggggccggcggcagaacgcagctgcggcggctgcgggtctcgtgggggcggagcggtcgccgctgccgccgcagctcgggtcgggatttgaaagattagaaacttcgggtggagagggcggcggcgttgaatgtgtggcggaagcgctgggggtcacggctccgcgcgccgccggacagccggcggcgtctccacagcatgaattacccgggccgcgggtccccacggagccccgagcataacggccgaggcggcggcggcggcgcctgggagctgggctcagacgcgaggccagcgttcggcggcggcgtctgctgcttcgagcacctgcccggcggggacccggacgacggcgacgtgcccctggccctgctgcgcggggaacccgggctgcatttggcgccgggcaccgacgaccacaaccaccacctcgcgctggacccctgcctcagtgacgagaactatgactttagctccgccgagtcgggctcctcgctgcgctactacagcgagggtgagagcggcggcggcggcggcggcagctccttgtcgctgcatccgccgcagcagcctccgctggtcccgacgaactcggggggcggcggcgcgacaggagggtcccccggggaaaggaaacgtacccggcttggcggcccggcggcccggcaccgctatgaggtagtgacggagctgggcccggaggaggtacgctggttctacaaggaggacaagaagacctggaagcccttcatcggctacgactcgctccgcatcgagctcgccttccggaccctgctgcagaccacgggtgcccggccccagggcggggaccgggacggcgaccatgtgtgctcccccacgggcccagcctccagttccggagaagatgacgatgaggaccgcgcctgcggcttctgccagagtacgacggggcacgagccggagatggtggagcttgtgaacatcgagcctgtgtgcgtgcggggcggcctctacgaggtggatgtgacccaaggagagtgctacccggtgtactggaaccaggctgataaaataccagtaatgcgtggacagtggtttattgacggcacttggcagcctctagaagaggaagaaagtaatttaattgagcaagaacatctcaattgttttaggggccagcagatgcaggaaaatttcgatattgaagtgtcaaaatccatagatggaaaagatggtaagatcaattgatacatttaatatattctacaaaccaagtaagttgttgataaagtttagagtggtttgtaaatttgacataataattcaggaggtttagaattagaaaatttgatttttttaaacatttgattattctagaatttaaaaattaactactataaatatctgaactatctcaatttttattttaatatgtatggtaagtgtcatgatattaacacagtttactataaatgtacagattgttacaatgcactccctatttaatcttttttagtaattttttagttatcaaaggaaattgaacttaacccaaaaattccttgttgttatatcaagacaagtttcattaatatttcaatgttcttttcctgaagttcaaaaaaaaa

SEQ ID NO: 434555 - DNA, 6208 bp, Homo sapiens
  misc_feature (733)..(733): n is a, c, g, or t
  misc_feature (752)..(752): n is a, c, g, or t
gccattccctgtagcaggattaatcatttataaaataaagtccctatccattacttgcttcacataactttttttatgtgaaatagtgttttattgaattaagttccatatctgagttttttagataacatattgattttaaaatctgagtgttataattcttcaaacaaataaagtttgtcttggagaccttcaaattagcttttcctttttgcaatagctgttcatagtttcaagttgagtcgaaaccatgtggactggcacagtgtgggatgaagtatatctttatagtgatgcaacaacatctaaaattgcaagaacagttacccaaaaactggggattttctaaaggtaattgttaaatattactagagcttatcaaaattttgggaatctgactttctctcatattcaaaatagacaattcatattctgtttttagtatgttttaagtatattaaatttagtgacagattcctttttaaatgaaacttttattaagttgattgagttgacatgtgttcatcaaggaataattattatatatttagaatgatttgacaaaattaataaatatcttttatacttctaaaagcacaaaagctgttaaacctaaaatgtggcagttgaaatatagtgtcaaggaagatgaggactgaaagttttccattgtatttagtgatctggaggtcactggtgacttagatggattgatggggcagaaaccagatcngcatgggttgaagcgtaantagaaggtgaagcaatggaagcaatgagaatagacaactcctttttttttttcttcttttatttttaagatggggtctcactctgtctcccaggctggagtacagtggtgtgatcatagcacatcataacctggaactaattcctgggctcaagcaatcctccaaactcagcctcctcagtaactaggattacagggatgcatcactatgcccagctaattttttttatttttttgtagaaacggagtctccttgtgttgtccaggctggtctcaaatttttgggcacaagccatcctctcgccttggtctcccaaagctctggggttacaggcttgaaatacagtgcctggcctgacaactgtttagagaagtttgactaaatgaaagaaaagagagaatgatacctgggaaagatgtgagagcattatcaaaaaataaatgtaaaaagaattttaaagtttgataaaatttttatatcctattttaaaattttaatttcatcaataagtgtgctttgaatatctttttatgtttattagttatatttattttgaattaccttccataactttaacttattttgctatttgaatggttgtctttactttttaattagtaagctctctctgtatacttaagtaattatgtgttatattttgcatatttttttccagtttgccatttcttttttcctgatattttcttattataatatagaagctttaaatttttatatattcagtttgtccttctttccttccatttctttctctttatggtttctggctttggtgttgtgtccagttcactttatatcacagctgatcaatatataccttcttacagtttttatttcctcccccacagccagtgaaattttttcataatattccttttacttcttttttttcttttaacatattgtggaaatgctatttctcagattaaatagtaaacttagaattataatttttctacgcatcaagtagtgggtaccagacttcatagaggttatgtaggaggaagccacattaggaggacaagccatcacagactacccatattgtatttgttgtgcatggcattgggcagaaaatggaccaaggaagaattatcaaaaatacagctatgatgagagaagctgcaagaaaaatagaagaaaggcatttttccaaccatgcaacacatgttgaatttctgcctgttgagtggcggtcaaaacttactcttgatggagacactgttgattccattactcctgacaaagtacgaggtttaagggatatgctgaacagcagtgcaatggacataatgtattatactagtccactttatagagatgaactagttaaaggccttcagcaagagctgaatcgattgtattcccttttctgttctcggaatccagactttgaagaaaaagggggtaaagtctcaatagtatcacattccttgggatgtgtaattacttatgacataatgactggctggaatccagttcggctgtatgaacagttgctgcaaaaggaagaagagttgcctgatgaacgatggatgagctatgaagaacgacatcttcttgatgaactctatataacaaaacgacggctgaaggaaatagaagaacggcttcacggattgaaagcatcatctatgacacaaacacctgccttaaaatttaaggttgagaatttcttctgtatgggatccccattagcagttttcttggcgttgcgtggcatccgcccaggaaatactggaagtcaagaccatattttgcctagagagatttgtaaccggttactaaatatttttcatcctacagatccagtggcttatagattagaaccattaatactgaaacactacagcaacatttcacctgtccagatccactggtacaatacttcaaatcctttaccttatgaacatatgaagccaagctttctcaacccagctaaagaacctacctcagtttcagagaatgaaggcatttcaaccataccaagccctgtgacctcaccagttttgtcccgccgacactatggagaatctataacaaatataggcaaagcaagcatattaggggctgctagcattggaaagggacttggaggaatgttgttctcaagatttggacgttcatctacaacacagtcatctgaaacatcaaaagactcaatggaagatgagaagaagccagttgcctcaccttctgctaccaccgtagggacacagacccttccacatagcagttctggcttcctcgattctgcattggagttggatcacaggattgattttgaactcagagaaggccttgtggagagccgctattggtcagctgtcacgtcgcatactgcctattggtcatccttggatgttgccctttttcttttaaccttcatgtataaacatgagcacgatgatgatgcaaaacccaatttagatccaatctgaactcttgaaggacatgaatggcctaaaactgattttttttttttccgttaaaatgtgtgtgtcaagatacggagatttcagggttaaagtatatttcagttttctttagggcaacatatatttgaatttaaaagcactttatttaaaaaaaaaaagaagttttcagttctgaagaagtcatttacagtttgcatcattttaattatgagtctgacaaaaccttctccagagaatcaagcaagacctggatgtgaagaaggtttgggtaaactgcatgtaaaggctacaaatcacaatctgattcctcccaaatataaaggcatatggaacataatgtattaaccaaagtatgttataaatcaaaaatggtcaaggttcagcatattctatatgaagatcacaaggtggtatcgttttagatttctatgaaggctttcatttgtacatccctttgaaaaaatataacagatttaaaatgttttgaatttaacttgtttagaaaaactaatgcttaaaacaatatttgaactactgtatttataatttattacctctaattgctttatttcagtgtatgagacattactgttttaatgtttgctttgaacataatttaagaaccagatttattttctatagtgataaacccttttttctcagaactccatctttgtactcttcagatgaatatatagacactgtggcatacattttttttcattaaaaacttatggcttcataaaaaaaaagttcaattttttaaataaactttttattatgttacatgtacttcagagaaagctaaagtttctctaaacttgacacggagtactccataatgggtacatttcattagctttattagaaaactagtaaatgcttttgaataggtagtatgacagctattttaaatgtataaacatttgtgtgccaaacaacatatatgaagggatgtgatgccactaactagtgcacattgtttctcaatgtgccattgagacacaaggcacagtaagtcaggattctgaggcattggaagggttttcttcagctgtaattgtttccacagtgcttttcatctgaggggctcaaagtttaagagtgcattcaataacccatgtactagcttcttgaggtaagtaaataaatcttgttctcatgttacatgttaatacaccaaggcaccaaaacatttaaagtgccatgaattagattacatcaggaaatcagaaaagcttggattgagctagtcaccgtggttcacgcctgtaatcccaacacttcgggaggccaagatgggaggatctcttgagcccaggatttcaagaccagcttgggcaacatagtgagaccctcttctctgcaaaaactgacaaaaattagccacttgtagtggtgtacacctgtagtcccagctactcaagaggctgaggtgggaggatcacccgagcccagaagttcaaagctgcagtgagctctgatcacaccaatgcactccagcctgggtgacagagccagaccctgtctctaaaaaacaaaaaagaaaagcttgggttgaagccaggccatattcttttatatgctgttcaatgacttgattcacatgtgaccttttagtagtttgcaaacaataataacagaagttgcaattcataattcagagaaatgaccatgaagccggtgtttccctgcttgatttctatgttcttggattctcacacaaaagaggagttacctagaggggatcagtagccatccctgttgcacacaaccctcacttctgagtggtttccactaggttccacttaaggtgctgtcttttcttaacttgcaaggaattgcttagcttcccaataatcattgtcaaactgggagcaaagttggtcagctgtatctctcacctcctcctttcttcataagatagtagaatctgtggcttacttgtaggttttacttagtgcttcagtactgttggctgttttggccttttgctgaatttgcacaacaacataaagcacttctttttaatgtttaaaaaaaattccaaggctccatgaccaagtatgtgactcactaagaaacccttgctataaaaggcttttgatgaaatcttagcaaagctaaattatctctaacttagagattcctatgaactcaggtcattttcatagcctgtttattttgtaggtctaatttagttctcaggaaaattaaactcatgctatatgactgtatcgttaaaggtacttgagcgtatgttgctgtaggtggtatgacactcaaatgcataagaacttgaagggatttattcttaaccactagaatatgaagagccctttttacctgagaagagtgaaattatgtcagaccttttaatttgatatcactgagtaaaaggtatgttcctatagccataggaatatgtctgcttcctttttttcatgttgagaaaacagtcaaatttaaccatttggagtttatttgaattcttggaaagagcaatattcaaaaccttttcaaaaataagatattctggactactggatggatgttttgttttcagttcatttttcatcagtagagatggtgatttcggttttgtagtatccttgtttctatgtctgtgcatgttaacattggatgtatttgtatatacttaattaatatacagactgtgtgtcattctggcttgattagaagctaagtcagttactgagtaacattttgcaactttattccagcaagtactaaatcggccaaaaaaagttttgtttttgataccattaaaattttattctctattttgtgtacatgctatgatgattctcccaagtactgattagatcactgaactttagttagcttcccaagaattattaaccgttagaataagacttagattaaatcttgctttatttttactttaaaattagtcttgctaaggccttatgttagttcatactttcttttcaacagtaatcttgtttataatcc

SEQ ID NO: 434556 - DNA, 522 bp, Homo sapiens
  misc_feature (468)..(468): n is a, c, g, or t
  misc_feature (476)..(476): n is a, c, g, or t
gccattccctgtagcaggattaatcatttataaaataaagtccctatccattacttgcttcacataactttttttatgtgaaatagtgttttattgaattaagttccatatctgagttttttagataacatattgattttaaaatctgagtgttataattcttcaaacaaataaagtttgtcttggagaccttcaaattagcttttcctttttgcaatagctgttcatagtttcaagttgagtcgaaaccatgtggactggcacagtgtgggatgaagtatatctttatagtgatgcaacaacatctaaaattgcaagaacagttacccaaaaactggggattttctaaaggcatcaagtagtgggtaccagacttcatagaggttatgtaggaggaagccacattaggaggacaagccatcacagactacccatattgtatttgttgtgcatggcattggggccggnaaatgggncccagggaggatttttccaaaattaccggctttgggtgggggggta

SEQ ID NO: 434557 - DNA, 9065 bp, Homo sapiens
  misc_feature (594)..(594): n is a, c, g, or t
  misc_feature (669)..(669): n is a, c, g, or t
  misc_feature (1723)..(1723): n is a, c, g, or t
  misc_feature (3590)..(3590): n is a, c, g, or t
  misc_feature (3609)..(3609): n is a, c, g, or t
taacagaggataatgttaacggaaattgtgtagtcaagagttaaaatctggccaaaataatctgaccagatagttatatagttaggctacattctatcaagaaacataaaggaatagagatattttaaatgttgtgatattccttatttataatccccttcatagtacttttcatactgtactataatataatgtatctgtttacttgtctgtatccccctctaggctgtaagttccttgaagaaagaaagaactctctcccattctctcttatagtagaagttagcatagaggtgcctggcatataggtggccagacacctattcaaaccctgtagaatgaatgcttttacagctagtaaacagaccaaagcccatacccaatatcatatgctgcatattgtcaatagaaatactggaggagcaactgggaagcaggcactcagaaattttttttgagtggtaaagagggtcctgatcttagatgctttcagtcagagctgcagtatacagttggataggttgttcactgcacaaggttaaccagctaagggcactaattggggcagaaaatccagcctgtattctacttganaagccatcaactccaacaccgctctgtatctgcccacaggaagcaatgccttttttcaaattcctacaaaggccntgtacaaacttcagatagtcttgatttaaataatgacagagtaataatgtctgacaggttacatctcaggagcaagaaaaattgccctaccaatctgattccaccagagagtaaaagaaatagtgaagactgtctattcttaaaatgaaaacactgaggttggagatggtttttctctggattctcaacatagggtgatgtgcttacaaaataattttttttaaataaaaaagacccacataagggagcctctgtattcaacttgatcccagaatatgagttacagaatcagagatgcataaaaatctggaagaaaccttaaagttcatagaattccattgctagaaggaactttagatatcatctggtccaagaatcttaattttacagatgaggaaaccaaaaagatcaggaagattatgtgatttgcctgtggatggttagcaaagctaaatctagaacctggttgttttctacctctcaatcgaacactctttaccacagctggttggacttgacatcattataatcaactaagactgattgcgcacccactgtgtgggagaggctgacatggacttggtttccatcaagggcctagcaatgaggttgagaaaacaggaaatccaagcatcaaaagataagtaataatatgagatggcatatgaagcaaggtttagattccagtttcccagtgggagtggtgacaccaaggtgagtgatgggtgtggggtggagtgccctcgtatccacccacctatgcgtcctggttctgtctggaggcaccagggccaggtgacaaaacgtccaggcgaggccgcagtagggcctaaggtcaaaaagagcaatgctgaatcctacatcctggggccctcctaacacgtagcttaaggctctgggctcatgacccacattgtaaggatgagtggggtaaagcctatccacatctgggctgtgaattccagaagcgggggaccgaggcagctgtgcatgaagaccgcaaggaaggaggaagggagccgaggaggcccaagagcggcgggcgacctgacancaccctgccctcccagccagaggggcaggggggaaccccgcgcgcggcgccggtgcagcccgggcttccggggcggcgcacgcggccggggggcggggcgggggccgaagcaccgcctacgtcgggctgcgtgacaatggggccggcggcagaacgcagctgcggcggctgcgggtctcgtgggggcggagcggtcgccgctgccgccgcagctcgggtcgggatttgaaagattagaaacttcgggtggagagggcggcggcgttgaatgtgtggcggaagcgctgggggtcacggctccgcgcgccgccggacagccggcggcgtctccacagcatgaattacccgggccgcgggtccccacggagccccgagcataacggccgaggcggcggcggcggcgcctgggagctgggctcagacgcgaggccagcgttcggcggcggcgtctgctgcttcgagcacctgcccggcggggacccggacgacggcgacgtgcccctggccctgctgcgcggggaacccgggctgcatttggcgccgggcaccgacgaccacaaccaccacctcgcgctggacccctgcctcagtgacgagaactatgactttagctccgccgagtcgggctcctcgctgcgctactacagcgagggtgagagcggcggcggcggcggcggcagctccttgtcgctgcatccgccgcagcagcctccgctggtcccgacgaactcggggggcggcggcgcgacaggagggtcccccggggaaaggaaacgtacccggcttggcggcccggcggcccggcaccgctatgaggtagtgacggagctgggcccggaggaggtacgctggttctacaaggaggacaagaagacctggaagcccttcatcggctacgactcgctccgcatcgagctcgccttccggaccctgctgcagaccacgggtgcccggccccagggcggggaccgggacggcgaccatgtgtgctcccccacgggcccagcctccagttccggagaagatgacgatgaggaccgcgcctgcggcttctgccagagtacgacggggcacgagccggagatggtggagcttgtgaacatcgagcctgtgtgcgtgcggggcggcctctacgaggtggatgtgacccaaggagagtgctacccggtgtactggaaccaggctgataaaataccagtaatgcgtggacagtggtttattgacggcacttggcagcctctagaagaggaagaaagtaatttaattgagcaagaacatctcaattgttttaggggccagcagatgcaggaaaatttcgatattgaagtgtcaaaatccatagatggaaaagatgctgttcatagtttcaagttgagtcgaaaccatgtggactggcacagtgtgggatgaagtatatctttatagtgatgcaacaacatctaaaattgcaagaacagttacccaaaaactggggattttctaaaggtaattgttaaatattactagagcttatcaaaattttgggaatctgactttctctcatattcaaaatagacaattcatattctgtttttagtatgttttaagtatattaaatttagtgacagattcctttttaaatgaaacttttattaagttgattgagttgacatgtgttcatcaaggaataattattatatatttagaatgatttgacaaaattaataaatatcttttatacttctaaaagcacaaaagctgttaaacctaaaatgtggcagttgaaatatagtgtcaaggaagatgaggactgaaagttttccattgtatttagtgatctggaggtcactggtgacttagatggattgatggggcagaaaccagatcngcatgggttgaagcgtaantagaaggtgaagcaatggaagcaatgagaatagacaactcctttttttttttcttcttttatttttaagatggggtctcactctgtctcccaggctggagtacagtggtgtgatcatagcacatcataacctggaactaattcctgggctcaagcaatcctccaaactcagcctcctcagtaactaggattacagggatgcatcactatgcccagctaattttttttatttttttgtagaaacggagtctccttgtgttgtccaggctggtctcaaatttttgggcacaagccatcctctcgccttggtctcccaaagctctggggttacaggcttgaaatacagtgcctggcctgacaactgtttagagaagtttgactaaatgaaagaaaagagagaatgatacctgggaaagatgtgagagcattatcaaaaaataaatgtaaaaagaattttaaagtttgataaaatttttatatcctattttaaaattttaatttcatcaataagtgtgctttgaatatctttttatgtttattagttatatttattttgaattaccttccataactttaacttattttgctatttgaatggttgtctttactttttaattagtaagctctctctgtatacttaagtaattatgtgttatattttgcatatttttttccagtttgccatttcttttttcctgatattttcttattataatatagaagctttaaatttttatatattcagtttgtccttctttccttccatttctttctctttatggtttctggctttggtgttgtgtccagttcactttatatcacagctgatcaatatataccttcttacagtttttatttcctcccccacagccagtgaaattttttcataatattccttttacttcttttttttcttttaacatattgtggaaatgctatttctcagattaaatagtaaacttagaattataatttttctacgcatcaagtagtgggtaccagacttcatagaggttatgtaggaggaagccacattaggaggacaagccatcacagactacccatattgtatttgttgtgcatggcattgggcagaaaatggaccaaggaagaattatcaaaaatacagctatgatgagagaagctgcaagaaaaatagaagaaaggcatttttccaaccatgcaacacatgttgaatttctgcctgttgagtggcggtcaaaacttactcttgatggagacactgttgattccattactcctgacaaagtacgaggtttaagggatatgctgaacagcagtgcaatggacataatgtattatactagtccactttatagagatgaactagttaaaggccttcagcaagagctgaatcgattgtattcccttttctgttctcggaatccagactttgaagaaaaagggggtaaagtctcaatagtatcacattccttgggatgtgtaattacttatgacataatgactggctggaatccagttcggctgtatgaacagttgctgcaaaaggaagaagagttgcctgatgaacgatggatgagctatgaagaacgacatcttcttgatgaactctatataacaaaacgacggctgaaggaaatagaagaacggcttcacggattgaaagcatcatctatgacacaaacacctgccttaaaatttaaggttgagaatttcttctgtatgggatccccattagcagttttcttggcgttgcgtggcatccgcccaggaaatactggaagtcaagaccatattttgcctagagagatttgtaaccggttactaaatatttttcatcctacagatccagtggcttatagattagaaccattaatactgaaacactacagcaacatttcacctgtccagatccactggtacaatacttcaaatcctttaccttatgaacatatgaagccaagctttctcaacccagctaaagaacctacctcagtttcagagaatgaaggcatttcaaccataccaagccctgtgacctcaccagttttgtcccgccgacactatggagaatctataacaaatataggcaaagcaagcatattaggggctgctagcattggaaagggacttggaggaatgttgttctcaagatttggacgttcatctacaacacagtcatctgaaacatcaaaagactcaatggaagatgagaagaagccagttgcctcaccttctgctaccaccgtagggacacagacccttccacatagcagttctggcttcctcgattctgcattggagttggatcacaggattgattttgaactcagagaaggccttgtggagagccgctattggtcagctgtcacgtcgcatactgcctattggtcatccttggatgttgccctttttcttttaaccttcatgtataaacatgagcacgatgatgatgcaaaacccaatttagatccaatctgaactcttgaaggacatgaatggcctaaaactgattttttttttttccgttaaaatgtgtgtgtcaagatacggagatttcagggttaaagtatatttcagttttctttagggcaacatatatttgaatttaaaagcactttatttaaaaaaaaaaagaagttttcagttctgaagaagtcatttacagtttgcatcattttaattatgagtctgacaaaaccttctccagagaatcaagcaagacctggatgtgaagaaggtttgggtaaactgcatgtaaaggctacaaatcacaatctgattcctcccaaatataaaggcatatggaacataatgtattaaccaaagtatgttataaatcaaaaatggtcaaggttcagcatattctatatgaagatcacaaggtggtatcgttttagatttctatgaaggctttcatttgtacatccctttgaaaaaatataacagatttaaaatgttttgaatttaacttgtttagaaaaactaatgcttaaaacaatatttgaactactgtatttataatttattacctctaattgctttatttcagtgtatgagacattactgttttaatgtttgctttgaacataatttaagaaccagatttattttctatagtgataaacccttttttctcagaactccatctttgtactcttcagatgaatatatagacactgtggcatacattttttttcattaaaaacttatggcttcataaaaaaaaagttcaattttttaaataaactttttattatgttacatgtacttcagagaaagctaaagtttctctaaacttgacacggagtactccataatgggtacatttcattagctttattagaaaactagtaaatgcttttgaataggtagtatgacagctattttaaatgtataaacatttgtgtgccaaacaacatatatgaagggatgtgatgccactaactagtgcacattgtttctcaatgtgccattgagacacaaggcacagtaagtcaggattctgaggcattggaagggttttcttcagctgtaattgtttccacagtgcttttcatctgaggggctcaaagtttaagagtgcattcaataacccatgtactagcttcttgaggtaagtaaataaatcttgttctcatgttacatgttaatacaccaaggcaccaaaacatttaaagtgccatgaattagattacatcaggaaatcagaaaagcttggattgagctagtcaccgtggttcacgcctgtaatcccaacacttcgggaggccaagatgggaggatctcttgagcccaggatttcaagaccagcttgggcaacatagtgagaccctcttctctgcaaaaactgacaaaaattagccacttgtagtggtgtacacctgtagtcccagctactcaagaggctgaggtgggaggatcacccgagcccagaagttcaaagctgcagtgagctctgatcacaccaatgcactccagcctgggtgacagagccagaccctgtctctaaaaaacaaaaaagaaaagcttgggttgaagccaggccatattcttttatatgctgttcaatgacttgattcacatgtgaccttttagtagtttgcaaacaataataacagaagttgcaattcataattcagagaaatgaccatgaagccggtgtttccctgcttgatttctatgttcttggattctcacacaaaagaggagttacctagaggggatcagtagccatccctgttgcacacaaccctcacttctgagtggtttccactaggttccacttaaggtgctgtcttttcttaacttgcaaggaattgcttagcttcccaataatcattgtcaaactgggagcaaagttggtcagctgtatctctcacctcctcctttcttcataagatagtagaatctgtggcttacttgtaggttttacttagtgcttcagtactgttggctgttttggccttttgctgaatttgcacaacaacataaagcacttctttttaatgtttaaaaaaaattccaaggctccatgaccaagtatgtgactcactaagaaacccttgctataaaaggcttttgatgaaatcttagcaaagctaaattatctctaacttagagattcctatgaactcaggtcattttcatagcctgtttattttgtaggtctaatttagttctcaggaaaattaaactcatgctatatgactgtatcgttaaaggtacttgagcgtatgttgctgtaggtggtatgacactcaaatgcataagaacttgaagggatttattcttaaccactagaatatgaagagccctttttacctgagaagagtgaaattatgtcagaccttttaatttgatatcactgagtaaaaggtatgttcctatagccataggaatatgtctgcttcctttttttcatgttgagaaaacagtcaaatttaaccatttggagtttatttgaattcttggaaagagcaatattcaaaaccttttcaaaaataagatattctggactactggatggatgttttgttttcagttcatttttcatcagtagagatggtgatttcggttttgtagtatccttgtttctatgtctgtgcatgttaacattggatgtatttgtatatacttaattaatatacagactgtgtgtcattctggcttgattagaagctaagtcagttactgagtaacattttgcaactttattccagcaagtactaaatcggccaaaaaaagttttgtttttgataccattaaaattttattctctattttgtgtacatgctatgatgattctcccaagtactgattagatcactgaactttagttagcttcccaagaattattaaccgttagaataagacttagattaaatcttgctttatttttactttaaaattagtcttgctaaggccttatgttagttcatactttcttttcaacagtaatcttgtttataatcc

SEQ ID NO: 434558 - DNA, 9149 bp, Homo sapiens
  misc_feature (594)..(594): n is a, c, g, or t
  misc_feature (669)..(669): n is a, c, g, or t
  misc_feature (1723)..(1723): n is a, c, g, or t
  misc_feature (3590)..(3590): n is a, c, g, or t
  misc_feature (3609)..(3609): n is a, c, g, or t
taacagaggataatgttaacggaaattgtgtagtcaagagttaaaatctggccaaaataatctgaccagatagttatatagttaggctacattctatcaagaaacataaaggaatagagatattttaaatgttgtgatattccttatttataatccccttcatagtacttttcatactgtactataatataatgtatctgtttacttgtctgtatccccctctaggctgtaagttccttgaagaaagaaagaactctctcccattctctcttatagtagaagttagcatagaggtgcctggcatataggtggccagacacctattcaaaccctgtagaatgaatgcttttacagctagtaaacagaccaaagcccatacccaatatcatatgctgcatattgtcaatagaaatactggaggagcaactgggaagcaggcactcagaaattttttttgagtggtaaagagggtcctgatcttagatgctttcagtcagagctgcagtatacagttggataggttgttcactgcacaaggttaaccagctaagggcactaattggggcagaaaatccagcctgtattctacttganaagccatcaactccaacaccgctctgtatctgcccacaggaagcaatgccttttttcaaattcctacaaaggccntgtacaaacttcagatagtcttgatttaaataatgacagagtaataatgtctgacaggttacatctcaggagcaagaaaaattgccctaccaatctgattccaccagagagtaaaagaaatagtgaagactgtctattcttaaaatgaaaacactgaggttggagatggtttttctctggattctcaacatagggtgatgtgcttacaaaataattttttttaaataaaaaagacccacataagggagcctctgtattcaacttgatcccagaatatgagttacagaatcagagatgcataaaaatctggaagaaaccttaaagttcatagaattccattgctagaaggaactttagatatcatctggtccaagaatcttaattttacagatgaggaaaccaaaaagatcaggaagattatgtgatttgcctgtggatggttagcaaagctaaatctagaacctggttgttttctacctctcaatcgaacactctttaccacagctggttggacttgacatcattataatcaactaagactgattgcgcacccactgtgtgggagaggctgacatggacttggtttccatcaagggcctagcaatgaggttgagaaaacaggaaatccaagcatcaaaagataagtaataatatgagatggcatatgaagcaaggtttagattccagtttcccagtgggagtggtgacaccaaggtgagtgatgggtgtggggtggagtgccctcgtatccacccacctatgcgtcctggttctgtctggaggcaccagggccaggtgacaaaacgtccaggcgaggccgcagtagggcctaaggtcaaaaagagcaatgctgaatcctacatcctggggccctcctaacacgtagcttaaggctctgggctcatgacccacattgtaaggatgagtggggtaaagcctatccacatctgggctgtgaattccagaagcgggggaccgaggcagctgtgcatgaagaccgcaaggaaggaggaagggagccgaggaggcccaagagcggcgggcgacctgacancaccctgccctcccagccagaggggcaggggggaaccccgcgcgcggcgccggtgcagcccgggcttccggggcggcgcacgcggccggggggcggggcgggggccgaagcaccgcctacgtcgggctgcgtgacaatggggccggcggcagaacgcagctgcggcggctgcgggtctcgtgggggcggagcggtcgccgctgccgccgcagctcgggtcgggatttgaaagattagaaacttcgggtggagagggcggcggcgttgaatgtgtggcggaagcgctgggggtcacggctccgcgcgccgccggacagccggcggcgtctccacagcatgaattacccgggccgcgggtccccacggagccccgagcataacggccgaggcggcggcggcggcgcctgggagctgggctcagacgcgaggccagcgttcggcggcggcgtctgctgcttcgagcacctgcccggcggggacccggacgacggcgacgtgcccctggccctgctgcgcggggaacccgggctgcatttggcgccgggcaccgacgaccacaaccaccacctcgcgctggacccctgcctcagtgacgagaactatgactttagctccgccgagtcgggctcctcgctgcgctactacagcgagggtgagagcggcggcggcggcggcggcagctccttgtcgctgcatccgccgcagcagcctccgctggtcccgacgaactcggggggcggcggcgcgacaggagggtcccccggggaaaggaaacgtacccggcttggcggcccggcggcccggcaccgctatgaggtagtgacggagctgggcccggaggaggtacgctggttctacaaggaggacaagaagacctggaagcccttcatcggctacgactcgctccgcatcgagctcgccttccggaccctgctgcagaccacgggtgcccggccccagggcggggaccgggacggcgaccatgtgtgctcccccacgggcccagcctccagttccggagaagatgacgatgaggaccgcgcctgcggcttctgccagagtacgacggggcacgagccggagatggtggagcttgtgaacatcgagcctgtgtgcgtgcggggcggcctctacgaggtggatgtgacccaaggagagtgctacccggtgtactggaaccaggctgataaaataccagtaatgcgtggacagtggtttattgacggcacttggcagcctctagaagaggaagaaagtaatttaattgagcaagaacatctcaattgttttaggggccagcagatgcaggaaaatttcgatattgaagtgtcaaaatccatagatggaaaagatgctgttcatagtttcaagttgagtcgaaaccatgtggactggcacagtgtgggatgaagtatatctttatagtgatgcaacaacatctaaaattgcaagaacagttacccaaaaactggggattttctaaaggtaattgttaaatattactagagcttatcaaaattttgggaatctgactttctctcatattcaaaatagacaattcatattctgtttttagtatgttttaagtatattaaatttagtgacagattcctttttaaatgaaacttttattaagttgattgagttgacatgtgttcatcaaggaataattattatatatttagaatgatttgacaaaattaataaatatcttttatacttctaaaagcacaaaagctgttaaacctaaaatgtggcagttgaaatatagtgtcaaggaagatgaggactgaaagttttccattgtatttagtgatctggaggtcactggtgacttagatggattgatggggcagaaaccagatcngcatgggttgaagcgtaantagaaggtgaagcaatggaagcaatgagaatagacaactcctttttttttttcttcttttatttttaagatggggtctcactctgtctcccaggctggagtacagtggtgtgatcatagcacatcataacctggaactaattcctgggctcaagcaatcctccaaactcagcctcctcagtaactaggattacagggatgcatcactatgcccagctaattttttttatttttttgtagaaacggagtctccttgtgttgtccaggctggtctcaaatttttgggcacaagccatcctctcgccttggtctcccaaagctctggggttacaggcttgaaatacagtgcctggcctgacaactgtttagagaagtttgactaaatgaaagaaaagagagaatgatacctgggaaagatgtgagagcattatcaaaaaataaatgtaaaaagaattttaaagtttgataaaatttttatatcctattttaaaattttaatttcatcaataagtgtgctttgaatatctttttatgtttattagttatatttattttgaattaccttccataactttaacttattttgctatttgaatggttgtctttactttttaattagtaagctctctctgtatacttaagtaattatgtgttatattttgcatatttttttccagtttgccatttcttttttcctgatattttcttattataatatagaagctttaaatttttatatattcagtttgtccttctttccttccatttctttctctttatggtttctggctttggtgttgtgtccagttcactttatatcacagctgatcaatatataccttcttacagtttttatttcctcccccacagccagtgaaattttttcataatattccttttacttcttttttttcttttaacatattgtggaaatgctatttctcagattaaatagtaaacttagaattataatttttctacgcatcaagtagtgggtaccagacttcatagaggttatgtaggaggaagccacattaggaggacaagccatcacagactacccatattgtatttgttgtgcatggcattgggcagaaaatggaccaaggaagaattatcaaaaatacagctatgatgagagaagctgcaagaaaaatagaagaaaggcatttttccaaccatgcaacacatgttgaatttctgcctgttgagtggcggtcaaaacttactcttgatggagacactgttgattccattactcctgacaaagtacgaggtttaagggatatgctgaacagcagtgcaatggacataatgtattatactagtccactttatagagatgaactagttaaaggccttcagcaagagctgaatcgattgtattcccttttctgttctcggaatccagactttgaagaaaaagggggtaaagtctcaatagtatcacattccttgggatgtgtaattacttatgacataatgactggctggaatccagttcggctgtatgaacagttgctgcaaaaggaagaagagttgcctgatgaacgatggatgagctatgaagaacgacatcttcttgatgaactctatataacaaaacgacggctgaaggaaatagaagaacggcttcacggattgaaagcatcatctatgacacaaacacctgccttaaaatttaaggttgagaatttcttctgtatgggatccccattagcagttttcttggcgttgcgtggcatccgcccaggaaatactggaagtcaagaccatattttgcctagagagatttgtaaccggttactaaatatttttcatcctacagatccagtggcttatagattagaaccattaatactgaaacactacagcaacatttcacctgtccagatccactggtacaatacttcaaatcctttaccttatgaacatatgaagccaagctttctcaacccagctaaagaacctacctcagtttcagagaatgaaggcatttcaaccataccaagccctgtgacctcaccagttttgtcccgccgacactatggagaatctataacaaatataggcaaagcaagcatattaggggctgctagcattggaaagggacttggaggaatgttgttctcaagatttggacgttcatctacaacacagtcatctgaaacatcaaaagactcaatggaagatgagaagaagccagttgcctcaccttctgctaccaccgtagggacacagacccttccacatagcagttctggcttcctcgattctgcatatttcagacttcaagaatcgttctttaatctcccacaacttctttttccggaaaatgtaatgcagaataaagataatgccctcgtggagttggatcacaggattgattttgaactcagagaaggccttgtggagagccgctattggtcagctgtcacgtcgcatactgcctattggtcatccttggatgttgccctttttcttttaaccttcatgtataaacatgagcacgatgatgatgcaaaacccaatttagatccaatctgaactcttgaaggacatgaatggcctaaaactgattttttttttttccgttaaaatgtgtgtgtcaagatacggagatttcagggttaaagtatatttcagttttctttagggcaacatatatttgaatttaaaagcactttatttaaaaaaaaaaagaagttttcagttctgaagaagtcatttacagtttgcatcattttaattatgagtctgacaaaaccttctccagagaatcaagcaagacctggatgtgaagaaggtttgggtaaactgcatgtaaaggctacaaatcacaatctgattcctcccaaatataaaggcatatggaacataatgtattaaccaaagtatgttataaatcaaaaatggtcaaggttcagcatattctatatgaagatcacaaggtggtatcgttttagatttctatgaaggctttcatttgtacatccctttgaaaaaatataacagatttaaaatgttttgaatttaacttgtttagaaaaactaatgcttaaaacaatatttgaactactgtatttataatttattacctctaattgctttatttcagtgtatgagacattactgttttaatgtttgctttgaacataatttaagaaccagatttattttctatagtgataaacccttttttctcagaactccatctttgtactcttcagatgaatatatagacactgtggcatacattttttttcattaaaaacttatggcttcataaaaaaaaagttcaattttttaaataaactttttattatgttacatgtacttcagagaaagctaaagtttctctaaacttgacacggagtactccataatgggtacatttcattagctttattagaaaactagtaaatgcttttgaataggtagtatgacagctattttaaatgtataaacatttgtgtgccaaacaacatatatgaagggatgtgatgccactaactagtgcacattgtttctcaatgtgccattgagacacaaggcacagtaagtcaggattctgaggcattggaagggttttcttcagctgtaattgtttccacagtgcttttcatctgaggggctcaaagtttaagagtgcattcaataacccatgtactagcttcttgaggtaagtaaataaatcttgttctcatgttacatgttaatacaccaaggcaccaaaacatttaaagtgccatgaattagattacatcaggaaatcagaaaagcttggattgagctagtcaccgtggttcacgcctgtaatcccaacacttcgggaggccaagatgggaggatctcttgagcccaggatttcaagaccagcttgggcaacatagtgagaccctcttctctgcaaaaactgacaaaaattagccacttgtagtggtgtacacctgtagtcccagctactcaagaggctgaggtgggaggatcacccgagcccagaagttcaaagctgcagtgagctctgatcacaccaatgcactccagcctgggtgacagagccagaccctgtctctaaaaaacaaaaaagaaaagcttgggttgaagccaggccatattcttttatatgctgttcaatgacttgattcacatgtgaccttttagtagtttgcaaacaataataacagaagttgcaattcataattcagagaaatgaccatgaagccggtgtttccctgcttgatttctatgttcttggattctcacacaaaagaggagttacctagaggggatcagtagccatccctgttgcacacaaccctcacttctgagtggtttccactaggttccacttaaggtgctgtcttttcttaacttgcaaggaattgcttagcttcccaataatcattgtcaaactgggagcaaagttggtcagctgtatctctcacctcctcctttcttcataagatagtagaatctgtggcttacttgtaggttttacttagtgcttcagtactgttggctgttttggccttttgctgaatttgcacaacaacataaagcacttctttttaatgtttaaaaaaaattccaaggctccatgaccaagtatgtgactcactaagaaacccttgctataaaaggcttttgatgaaatcttagcaaagctaaattatctctaacttagagattcctatgaactcaggtcattttcatagcctgtttattttgtaggtctaatttagttctcaggaaaattaaactcatgctatatgactgtatcgttaaaggtacttgagcgtatgttgctgtaggtggtatgacactcaaatgcataagaacttgaagggatttattcttaaccactagaatatgaagagccctttttacctgagaagagtgaaattatgtcagaccttttaatttgatatcactgagtaaaaggtatgttcctatagccataggaatatgtctgcttcctttttttcatgttgagaaaacagtcaaatttaaccatttggagtttatttgaattcttggaaagagcaatattcaaaaccttttcaaaaataagatattctggactactggatggatgttttgttttcagttcatttttcatcagtagagatggtgatttcggttttgtagtatccttgtttctatgtctgtgcatgttaacattggatgtatttgtatatacttaattaatatacagactgtgtgtcattctggcttgattagaagctaagtcagttactgagtaacattttgcaactttattccagcaagtactaaatcggccaaaaaaagttttgtttttgataccattaaaattttattctctattttgtgtacatgctatgatgattctcccaagtactgattagatcactgaactttagttagcttcccaagaattattaaccgttagaataagacttagattaaatcttgctttatttttactttaaaattagtcttgctaaggccttatgttagttcatactttcttttcaacagtaatcttgtttataatcc

SEQ ID NO: 434559 - DNA, 362 bp, Homo sapiens
tcgttctttaatctcccacaacttctttttccggaaaatgtaatgcagaataaagataatgccctcggtatggtatatgtcaggaatagcattcagaatactataaaaatgatctacttagagttcttctgcttattgaaaaattggatcagttcttctatgagatcccagcttcagtgttaccattacagactattttatgtgtattttcatcccatattttctagtcttaaatggtagtggttctgaaacctgaaaattgactagccacttaatgtgctaaagtatatttgtgtatacttctacaaagaaggaacctgaagaaaagcataaggtcattttcttccttctttattgtccta

SEQ ID NO: 434560 - DNA, 4827 bp, Homo sapiens
gccattccctgtagcaggattaatcatttataaaataaagtccctatccattacttgcttcacataactttttttatgtgaaatagtgttttattgaattaagttccatatctgagttttttagataacatattgattttaaaatctgagtgttataattcttcaaacaaataaagtttgtcttggagaccttcaaattagcttttcctttttgcaatagctgttcatagtttcaagttgagtcgaaaccatgtggactggcacagtgtgggatgaagtatatctttatagtgatgcaacaacatctaaaattgcaagaacagttacccaaaaactggggattttctaaaggcatcaagtagtgggtaccagacttcatagaggttatgtaggaggaagccacattaggaggacaagccatcacagactacccatattgtatttgttgtgcatggcattgggcagaaaatggaccaaggaagaattatcaaaaatacagctatgatgagagaagctgcaagaaaaatagaagaaaggcatttttccaaccatgcaacacatgttgaatttctgcctgttgagtggcggtcaaaacttactcttgatggagacactgttgattccattactcctgacaaagtacgaggtttaagggatatgctgaacagcagtgcaatggacataatgtattatactagtccactttatagagatgaactagttaaaggccttcagcaagagctgaatcgattgtattcccttttctgttctcggaatccagactttgaagaaaaagggggtaaagtctcaatagtatcacattccttgggatgtgtaattacttatgacataatgactggctggaatccagttcggctgtatgaacagttgctgcaaaaggaagaagagttgcctgatgaacgatggatgagctatgaagaacgacatcttcttgatgaactctatataacaaaacgacggctgaaggaaatagaagaacggcttcacggattgaaagcatcatctatgacacaaacacctgccttaaaatttaaggttgagaatttcttctgtatgggatccccattagcagttttcttggcgttgcgtggcatccgcccaggaaatactggaagtcaagaccatattttgcctagagagatttgtaaccggttactaaatatttttcatcctacagatccagtggcttatagattagaaccattaatactgaaacactacagcaacatttcacctgtccagatccactggtacaatacttcaaatcctttaccttatgaacatatgaagccaagctttctcaacccagctaaagaacctacctcagtttcagagaatgaaggcatttcaaccataccaagccctgtgacctcaccagttttgtcccgccgacactatggagaatctataacaaatataggcaaagcaagcatattaggggctgctagcattggaaagggacttggaggaatgttgttctcaagatttggacgttcatctacaacacagtcatctgaaacatcaaaagactcaatggaagatgagaagaagccagttgcctcaccttctgctaccaccgtagggacacagacccttccacatagcagttctggcttcctcgattctgcattggagttggatcacaggattgattttgaactcagagaaggccttgtggagagccgctattggtcagctgtcacgtcgcatactgcctattggtcatccttggatgttgccctttttcttttaaccttcatgtataaacatgagcacgatgatgatgcaaaacccaatttagatccaatctgaactcttgaaggacatgaatggcctaaaactgattttttttttttccgttaaaatgtgtgtgtcaagatacggagatttcagggttaaagtatatttcagttttctttagggcaacatatatttgaatttaaaagcactttatttaaaaaaaaaaagaagttttcagttctgaagaagtcatttacagtttgcatcattttaattatgagtctgacaaaaccttctccagagaatcaagcaagacctggatgtgaagaaggtttgggtaaactgcatgtaaaggctacaaatcacaatctgattcctcccaaatataaaggcatatggaacataatgtattaaccaaagtatgttataaatcaaaaatggtcaaggttcagcatattctatatgaagatcacaaggtggtatcgttttagatttctatgaaggctttcatttgtacatccctttgaaaaaatataacagatttaaaatgttttgaatttaacttgtttagaaaaactaatgcttaaaacaatatttgaactactgtatttataatttattacctctaattgctttatttcagtgtatgagacattactgttttaatgtttgctttgaacataatttaagaaccagatttattttctatagtgataaacccttttttctcagaactccatctttgtactcttcagatgaatatatagacactgtggcatacattttttttcattaaaaacttatggcttcataaaaaaaaagttcaattttttaaataaactttttattatgttacatgtacttcagagaaagctaaagtttctctaaacttgacacggagtactccataatgggtacatttcattagctttattagaaaactagtaaatgcttttgaataggtagtatgacagctattttaaatgtataaacatttgtgtgccaaacaacatatatgaagggatgtgatgccactaactagtgcacattgtttctcaatgtgccattgagacacaaggcacagtaagtcaggattctgaggcattggaagggttttcttcagctgtaattgtttccacagtgcttttcatctgaggggctcaaagtttaagagtgcattcaataacccatgtactagcttcttgaggtaagtaaataaatcttgttctcatgttacatgttaatacaccaaggcaccaaaacatttaaagtgccatgaattagattacatcaggaaatcagaaaagcttggattgagctagtcaccgtggttcacgcctgtaatcccaacacttcgggaggccaagatgggaggatctcttgagcccaggatttcaagaccagcttgggcaacatagtgagaccctcttctctgcaaaaactgacaaaaattagccacttgtagtggtgtacacctgtagtcccagctactcaagaggctgaggtgggaggatcacccgagcccagaagttcaaagctgcagtgagctctgatcacaccaatgcactccagcctgggtgacagagccagaccctgtctctaaaaaacaaaaaagaaaagcttgggttgaagccaggccatattcttttatatgctgttcaatgacttgattcacatgtgaccttttagtagtttgcaaacaataataacagaagttgcaattcataattcagagaaatgaccatgaagccggtgtttccctgcttgatttctatgttcttggattctcacacaaaagaggagttacctagaggggatcagtagccatccctgttgcacacaaccctcacttctgagtggtttccactaggttccacttaaggtgctgtcttttcttaacttgcaaggaattgcttagcttcccaataatcattgtcaaactgggagcaaagttggtcagctgtatctctcacctcctcctttcttcataagatagtagaatctgtggcttacttgtaggttttacttagtgcttcagtactgttggctgttttggccttttgctgaatttgcacaacaacataaagcacttctttttaatgtttaaaaaaaattccaaggctccatgaccaagtatgtgactcactaagaaacccttgctataaaaggcttttgatgaaatcttagcaaagctaaattatctctaacttagagattcctatgaactcaggtcattttcatagcctgtttattttgtaggtctaatttagttctcaggaaaattaaactcatgctatatgactgtatcgttaaaggtacttgagcgtatgttgctgtaggtggtatgacactcaaatgcataagaacttgaagggatttattcttaaccactagaatatgaagagccctttttacctgagaagagtgaaattatgtcagaccttttaatttgatatcactgagtaaaaggtatgttcctatagccataggaatatgtctgcttcctttttttcatgttgagaaaacagtcaaatttaaccatttggagtttatttgaattcttggaaagagcaatattcaaaaccttttcaaaaataagatattctggactactggatggatgttttgttttcagttcatttttcatcagtagagatggtgatttcggttttgtagtatccttgtttctatgtctgtgcatgttaacattggatgtatttgtatatacttaattaatatacagactgtgtgtcattctggcttgattagaagctaagtcagttactgagtaacattttgcaactttattccagcaagtactaaatcggccaaaaaaagttttgtttttgataccattaaaattttattctctattttgtgtacatgctatgatgattctcccaagtactgattagatcactgaactttagttagcttcccaagaattattaaccgttagaataagacttagattaaatcttgctttatttttactttaaaattagtcttgctaaggccttatgttagttcatactttcttttcaacagtaatcttgtttataatcc

SEQ ID NO: 434561 - DNA, 1229 bp, Homo sapiens
gcctggaattgagtattattaactatatatcttttaaaatgtttgattattttgaatcctcaattatctctgctgtgaaaccactgattttggtattcattggagattgacttataagaacaggagtcagctatatgtttcaagcattttattaggcaaataaacagacatttactgcacaacaggacgtgttatcccaagtttatagatgataaaatcaaggcctttgaaacattcatagtgcaatactgtaatgcaattctgacactacccacccagagttcccgcagactccctaagttaagggcatagtacccaacaaaattgcccttgcttcagatgccagcaacaagttggaggccctaggccacctgcacttctgataactggctataagttcaggagtccccacaactacctcaggtttgataattcattaaaatgactcaactcaggaaagtgctctacttatcattaccgttttattattcagggtacaaatcagggccagccaaatgaagggacccgtagggtgaggtctgggagggtcctgaacacagagcattgtgccctgtctccatgggatcagggcacatcaccctcctggcacactgatctattcaccaaccaggaaactccactgagctttggtatccagagattttagcagggcttcattatttaggtttgattgcaggattgaattcaatatccagatcctctttcatccccagaggtcaggaagttgacccaatatcaggtgactcaaaaccctgtctctaatcacatggtggagcctggcatcctaagttattagcattagctatctgaggcccaccatgagtcacctcattagtataaattgtcaaggtccaccgtaaataacagagatattcctgtcacttgggaaattacaagggttttattcttcattatacaacagagggtcatacatctaatgaggactagagtcaggatttaatccagttctgtctgaattcaaagccccagctctatccactattccatttttacaattaagggccttagataagtggtttgtttaaggtcacacagctagtaacttaacaatagagcctggtcccggtacagactaccaatgtgtgctccttccataatgcagttacttccatgatgcatgttggggtgcatttgacttgtttctgtaaattttgcaattgtattatagaacacagcgtcctagctaa

SEQ ID NO: 434562 - DNA, 2861 bp, Homo sapiens
gggctcgcacctggctcccgccagccgtgggattaggcttcgccggctacgattgcggcccccatcttctgacttttcctcgtgtgacccatcttttcaaattcccttacctgaggaaggagcccgattacaaggatatttacctgctcctaccctgatctagggacgaggatgggaagaccgcctgtggccatgagccctccccggtgctcctggggctaaggctggggctgcagccatggggctgggtcagccccaggcctggttgctgggtctgcccacagctgtggtctatggctccctggctctcttcaccaccatcctgcacaatgtcttcctgctctactatgtggacacctttgtctcagtgtacaagatcaacaaaatggccttctgggtcggagagacagtgtttctcctctggaacagcctcaatgaccctctcttcggttggctcagtgaccggcagttcctcagctcccagccccggtcaggcgccgggctctcctcaagggctgtggtgctggcccgggtgcaggccctgggctggcatgggccgctgctggcgctgtcgttcctggcgttctgggtgccctgggccccagctggcctgcagttcttgctgtgcctgtgcctctatgatggcttcctgacgctcgtggacctgcaccaccatgccttgctggccgactggccctctcagcccacgaccgacccacctcaacttctactggtccctcttcagcgcggccggctccctctctgtctttgcatcctatgccttttggaacaaggaggatttctcctccttccgcgctttctgcgtgacactggctgtcagctctgggctgggctttctgggggccacacagctgctgaggcggcgggttgaggcggcccgaaaggacccagggtgctcaggcctggttgtggatagcggcctgtgtggagaggagctgcttgtgggcagtgaggaggcggacagcatcaccttgggccggtatctccggcagctggcacgccatcggaacttcctgtggttcgtgagcatggacctggtgcaggtcttccactgccacttcaacagcaacttcttccctctcttcctggagcatctgttgtccgaccatatctccctttccacgggctccatcctgttgggcctctcctatgtcgctccccatctcaacaacctctacttcctgtccctgtgccggcgctggggcgtctacgcggtggtgcgggggctcttcctgctcaagctgggacttagcctgctcatgttgttggccggcccggaccacctcagcctgctgtgcctcttcattgccagcaaccgcgtcttcactgagggcacctgtaagctgctgaccttggtggtcactgacctggtagacgaggacctggtgctgaaccaccgcaagcaggcagcctcggcactcctctttggcatggttgccttggtgaccaagccaggccagacctttgccccgctgctgggcacctggctgctctgtttctacacaggtcatgacctcttccagcagtccctcataacccctgtggggagtgcccatccctggccagagcccccagctccagcccctgcacaggccccgacgctccgccagggctgcttctacctgctggtgctggtgcccatcacctgtgctctgctgcagctcttcacctggtcccagttcacgctgcatgggagacgcctgcacatggtcaaggcccagcgccagaacctgtcacaggcccaaaccctggatgttaagatggtgtgagagctgtggcaaggtcaccccactgaggatgctgctggcagcctggggaaggagccagtttttttttggttttttttttaaggatttcatagttttttttttttttttttggagatgttgcccaaaaaaatggatctgttgcagtggtgcaatctgggctcactgaaaccaccacccaggttcaagcaattatcctgcctcagcctcccgagtaggtgggattataggagcgtgccatcatgcccggctactttttgtatttttagtagagacagggtttcatcatgttggccaggctagtctcaaacccctgaccttaggtggtcagcccgcctcggcctcccagagtgctgggattacaggcgtgagccactgtggccaacctaatttttgtattatttagtagagacagggtttcaccacattggccaggctggtctcgaactcctgacctcaagtgatctgcctgccttggtctcccaaagtgctgggaatacaggcatgagccaccgcactcggccaggagctagttttaccagcatcctgctccactgccttcctctagtgcagcctggaagacatggcagcgggtagctcctggggctgagccagaagcatcactgcagtgaaagtctctgcttacctgtctggctcagcttgggcaagggctgggccatatgtgctcagggacgtgcttctcttgtaaggcaggaggatagaagaggaccaagaagggagggggctgccctgtggtgcacacaggcctgccatggggcgtgggagcccatcccgctgcctgactggagctggccgctgtggtggactcaggaaccacttttaatactgcaactgctcccttttgcccagtcagggaaagctgactgtaagtcccacctcccactccgtccacccttctagtggtttctctgagaggtttctctgcttcggctgtgcttgaagtggcatgcctcctctgctgcagggctcccccacccccacacggcctctaaagatgtttatttccttatagactgattaaagtcagccattctttttcctcaagtctgtgct

SEQ ID NO: 434563 - DNA, 2997 bp, Homo sapiens
gggctcgcacctggctcccgccagccgtgggattaggcttcgccggctacgattgcggcccccatcttctgacttttcctcgtgtgacccatcttttcaaattcccttacctgaggaaggagcccgattacaaggatatttacctgctcctaccctgatctagaagaggaagctaaggcctgggttgggtaactgcctgacgttttactgctctctgtttcctcgagtcactcccagattagtggtgtctagctcagcactgtttctgttatacttcattcataattcccagcgctgttggacgaggatgggaagaccgcctgtggccatgagccctccccggtgctcctggggctaaggctggggctgcagccatggggctgggtcagccccaggcctggttgctgggtctgcccacagctgtggtctatggctccctggctctcttcaccaccatcctgcacaatgtcttcctgctctactatgtggacacctttgtctcagtgtacaagatcaacaaaatggccttctgggtcggagagacagtgtttctcctctggaacagcctcaatgaccctctcttcggttggctcagtgaccggcagttcctcagctcccagccccggtcaggcgccgggctctcctcaagggctgtggtgctggcccgggtgcaggccctgggctggcatgggccgctgctggcgctgtcgttcctggcgttctgggtgccctgggccccagctggcctgcagttcttgctgtgcctgtgcctctatgatggcttcctgacgctcgtggacctgcaccaccatgccttgctggccgactggccctctcagcccacgaccgacccacctcaacttctactggtccctcttcagcgcggccggctccctctctgtctttgcatcctatgccttttggaacaaggaggatttctcctccttccgcgctttctgcgtgacactggctgtcagctctgggctgggctttctgggggccacacagctgctgaggcggcgggttgaggcggcccgaaaggacccagggtgctcaggcctggttgtggatagcggcctgtgtggagaggagctgcttgtgggcagtgaggaggcggacagcatcaccttgggccggtatctccggcagctggcacgccatcggaacttcctgtggttcgtgagcatggacctggtgcaggtcttccactgccacttcaacagcaacttcttccctctcttcctggagcatctgttgtccgaccatatctccctttccacgggctccatcctgttgggcctctcctatgtcgctccccatctcaacaacctctacttcctgtccctgtgccggcgctggggcgtctacgcggtggtgcgggggctcttcctgctcaagctgggacttagcctgctcatgttgttggccggcccggaccacctcagcctgctgtgcctcttcattgccagcaaccgcgtcttcactgagggcacctgtaagctgctgaccttggtggtcactgacctggtagacgaggacctggtgctgaaccaccgcaagcaggcagcctcggcactcctctttggcatggttgccttggtgaccaagccaggccagacctttgccccgctgctgggcacctggctgctctgtttctacacaggtcatgacctcttccagcagtccctcataacccctgtggggagtgcccatccctggccagagcccccagctccagcccctgcacaggccccgacgctccgccagggctgcttctacctgctggtgctggtgcccatcacctgtgctctgctgcagctcttcacctggtcccagttcacgctgcatgggagacgcctgcacatggtcaaggcccagcgccagaacctgtcacaggcccaaaccctggatgttaagatggtgtgagagctgtggcaaggtcaccccactgaggatgctgctggcagcctggggaaggagccagtttttttttggttttttttttaaggatttcatagttttttttttttttttttggagatgttgcccaaaaaaatggatctgttgcagtggtgcaatctgggctcactgaaaccaccacccaggttcaagcaattatcctgcctcagcctcccgagtaggtgggattataggagcgtgccatcatgcccggctactttttgtatttttagtagagacagggtttcatcatgttggccaggctagtctcaaacccctgaccttaggtggtcagcccgcctcggcctcccagagtgctgggattacaggcgtgagccactgtggccaacctaatttttgtattatttagtagagacagggtttcaccacattggccaggctggtctcgaactcctgacctcaagtgatctgcctgccttggtctcccaaagtgctgggaatacaggcatgagccaccgcactcggccaggagctagttttaccagcatcctgctccactgccttcctctagtgcagcctggaagacatggcagcgggtagctcctggggctgagccagaagcatcactgcagtgaaagtctctgcttacctgtctggctcagcttgggcaagggctgggccatatgtgctcagggacgtgcttctcttgtaaggcaggaggatagaagaggaccaagaagggagggggctgccctgtggtgcacacaggcctgccatggggcgtgggagcccatcccgctgcctgactggagctggccgctgtggtggactcaggaaccacttttaatactgcaactgctcccttttgcccagtcagggaaagctgactgtaagtcccacctcccactccgtccacccttctagtggtttctctgagaggtttctctgcttcggctgtgcttgaagtggcatgcctcctctgctgcagggctcccccacccccacacggcctctaaagatgtttatttccttatagactgattaaagtcagccattctttttcctcaagtctgtgct

SEQ ID NO: 434564 - DNA, 2951 bp, Homo sapiens
gggctcgcacctggctcccgccagccgtgggattaggcttcgccggctacgattgcggcccccatcttctgacttttcctcgtgtgacccatcttttcaaattcccttacctgaggaaggagcccgattacaaggatatttacctgctcctaccctgatctaggctctctgtttcctcgagtcactcccagattagtggtgtctagctcagcactgtttctgttatacttcattcataattcccagcgctgttggacgaggatgggaagaccgcctgtggccatgagccctccccggtgctcctggggctaaggctggggctgcagccatggggctgggtcagccccaggcctggttgctgggtctgcccacagctgtggtctatggctccctggctctcttcaccaccatcctgcacaatgtcttcctgctctactatgtggacacctttgtctcagtgtacaagatcaacaaaatggccttctgggtcggagagacagtgtttctcctctggaacagcctcaatgaccctctcttcggttggctcagtgaccggcagttcctcagctcccagccccggtcaggcgccgggctctcctcaagggctgtggtgctggcccgggtgcaggccctgggctggcatgggccgctgctggcgctgtcgttcctggcgttctgggtgccctgggccccagctggcctgcagttcttgctgtgcctgtgcctctatgatggcttcctgacgctcgtggacctgcaccaccatgccttgctggccgactggccctctcagcccacgaccgacccacctcaacttctactggtccctcttcagcgcggccggctccctctctgtctttgcatcctatgccttttggaacaaggaggatttctcctccttccgcgctttctgcgtgacactggctgtcagctctgggctgggctttctgggggccacacagctgctgaggcggcgggttgaggcggcccgaaaggacccagggtgctcaggcctggttgtggatagcggcctgtgtggagaggagctgcttgtgggcagtgaggaggcggacagcatcaccttgggccggtatctccggcagctggcacgccatcggaacttcctgtggttcgtgagcatggacctggtgcaggtcttccactgccacttcaacagcaacttcttccctctcttcctggagcatctgttgtccgaccatatctccctttccacgggctccatcctgttgggcctctcctatgtcgctccccatctcaacaacctctacttcctgtccctgtgccggcgctggggcgtctacgcggtggtgcgggggctcttcctgctcaagctgggacttagcctgctcatgttgttggccggcccggaccacctcagcctgctgtgcctcttcattgccagcaaccgcgtcttcactgagggcacctgtaagctgctgaccttggtggtcactgacctggtagacgaggacctggtgctgaaccaccgcaagcaggcagcctcggcactcctctttggcatggttgccttggtgaccaagccaggccagacctttgccccgctgctgggcacctggctgctctgtttctacacaggtcatgacctcttccagcagtccctcataacccctgtggggagtgcccatccctggccagagcccccagctccagcccctgcacaggccccgacgctccgccagggctgcttctacctgctggtgctggtgcccatcacctgtgctctgctgcagctcttcacctggtcccagttcacgctgcatgggagacgcctgcacatggtcaaggcccagcgccagaacctgtcacaggcccaaaccctggatgttaagatggtgtgagagctgtggcaaggtcaccccactgaggatgctgctggcagcctggggaaggagccagtttttttttggttttttttttaaggatttcatagttttttttttttttttttggagatgttgcccaaaaaaatggatctgttgcagtggtgcaatctgggctcactgaaaccaccacccaggttcaagcaattatcctgcctcagcctcccgagtaggtgggattataggagcgtgccatcatgcccggctactttttgtatttttagtagagacagggtttcatcatgttggccaggctagtctcaaacccctgaccttaggtggtcagcccgcctcggcctcccagagtgctgggattacaggcgtgagccactgtggccaacctaatttttgtattatttagtagagacagggtttcaccacattggccaggctggtctcgaactcctgacctcaagtgatctgcctgccttggtctcccaaagtgctgggaatacaggcatgagccaccgcactcggccaggagctagttttaccagcatcctgctccactgccttcctctagtgcagcctggaagacatggcagcgggtagctcctggggctgagccagaagcatcactgcagtgaaagtctctgcttacctgtctggctcagcttgggcaagggctgggccatatgtgctcagggacgtgcttctcttgtaaggcaggaggatagaagaggaccaagaagggagggggctgccctgtggtgcacacaggcctgccatggggcgtgggagcccatcccgctgcctgactggagctggccgctgtggtggactcaggaaccacttttaatactgcaactgctcccttttgcccagtcagggaaagctgactgtaagtcccacctcccactccgtccacccttctagtggtttctctgagaggtttctctgcttcggctgtgcttgaagtggcatgcctcctctgctgcagggctcccccacccccacacggcctctaaagatgtttatttccttatagactgattaaagtcagccattctttttcctcaagtctgtgct

SEQ ID NO: 434565 - DNA, 2679 bp, Homo sapiens
taaaaagaaaaagcttttaattgctccagtactattttgccgtggcttctaactttttagcaaagttagatagcaccaggaatgtggttttaggttgtgttctggcatgttctgtgtttagggacatggggaaaaaggcctgctctcgctcttgctgctctgaggatggggagttgggggggatgtgtgttcccctgttggcttctggccttgtcagctctcctcccactggaagcctcctcaccatccctgtcgggttgcaggtcttccactgccacttcaacagcaacttcttccctctcttcctggagcatctgttgtccgaccatatctccctttccacgggctccatcctgttgggtgagtgtggaccttgggtgcttcatgcaagctggaaggagagagacctgtatttttagtagagatggggtttcaccgtattagccaggatggtctccatttcccgacccagtgatccacctgcctctgcctcccaaagtactgggattacaggtgtgagccactgcgcccagccagggacaatctttttaagacaccaagtgctgccgggtgcagtgggcatggggggcagggtgtggtgggtgttgaggggggcggaggctgtgctggtgtgggtcctcttggagatggtggcaccctgagggggtgcagtggctggttaacacagaggaatatcatctgatgggcctgggtgtgagtcttgactctgtgctcatttggtgggcagcctcaggtgggttagttcatctttttgggcctctctttctcatccgtaaagtggggatgataatagtactcaccttaaggggctgtgaagatgaactaagacagtgaagctcttagcacagagcccagtgcatcgctagtgtacaggaatgcagtcggctgtgaagctgatggcgctcactggcactgcagcagtgcccttgacaaggtggctccccgtcttcctccccaggcctctcctatgtcgctccccatctcaacaacctctacttcctgtccctgtgccggcgctggggcgtctacgcggtggtgcgggggctcttcctgctcaagctgggacttagcctgctcatgttgttggccggcccggaccacctcagcctgctgtgcctcttcattgccagcaaccgcgtcttcactgagggcacctgtaagctgctgaccttggtggtcactgacctggtagacgaggacctggtgctgaaccaccgcaagcaggcagcctcggcactcctctttggcatggttgccttggtgaccaagccaggccagacctttgccccgctgctgggcacctggctgctctgtttctacacaggtcatgacctcttccagcagtccctcataacccctgtggggagtgcccatccctggccagagcccccagctccagcccctgcacaggccccgacgctccgccagggctgcttctacctgctggtgctggtgcccatcacctgtgctctgctgcagctcttcacctggtcccagttcacgctgcatgggagacgcctgcacatggtcaaggcccagcgccagaacctgtcacaggcccaaaccctggatgttaagatggtgtgagagctgtggcaaggtcaccccactgaggatgctgctggcagcctggggaaggagccagtttttttttggttttttttttaaggatttcatagttttttttttttttttttggagatgttgcccaaaaaaatggatctgttgcagtggtgcaatctgggctcactgaaaccaccacccaggttcaagcaattatcctgcctcagcctcccgagtaggtgggattataggagcgtgccatcatgcccggctactttttgtatttttagtagagacagggtttcatcatgttggccaggctagtctcaaacccctgaccttaggtggtcagcccgcctcggcctcccagagtgctgggattacaggcgtgagccactgtggccaacctaatttttgtattatttagtagagacagggtttcaccacattggccaggctggtctcgaactcctgacctcaagtgatctgcctgccttggtctcccaaagtgctgggaatacaggcatgagccaccgcactcggccaggagctagttttaccagcatcctgctccactgccttcctctagtgcagcctggaagacatggcagcgggtagctcctggggctgagccagaagcatcactgcagtgaaagtctctgcttacctgtctggctcagcttgggcaagggctgggccatatgtgctcagggacgtgcttctcttgtaaggcaggaggatagaagaggaccaagaagggagggggctgccctgtggtgcacacaggcctgccatggggcgtgggagcccatcccgctgcctgactggagctggccgctgtggtggactcaggaaccacttttaatactgcaactgctcccttttgcccagtcagggaaagctgactgtaagtcccacctcccactccgtccacccttctagtggtttctctgagaggtttctctgcttcggctgtgcttgaagtggcatgcctcctctgctgcagggctcccccacccccacacggcctctaaagatgtttatttccttatagactgattaaagtcagccattctttttcctcaagtctgtgct

SEQ ID NO: 434566 - DNA, 999 bp, Homo sapiens
gggctcgcacctggctcccgccagccgtgggattaggcttcgccggctacgattgcggcccccatcttctgacttttcctcgtgtgacccatcttttcaaattcccttacctgaggaaggagcccgattacaaggatatttacctgctcctaccctgatctagggacgaggatgggaagaccgcctgtggccatgagccctccccggtgctcctggggctaaggctggggctgcagccatggggctgggtcagccccaggcctggttgctgggtctgcccacagctgtggtctatggctccctggctctcttcaccaccatcctgcacaatgtcttcctgctctactatgtggacacctttgtctcagtgtacaagatcaacaaaatggccttctgggtcggagaggctggagtgcaatggcgcaatctcagctcactgcaacctccgccttcgtggttcaagtgattctcctgtctcaacctcatgagtagatgggattacaagcacccgccaccacgcccggctaatttttgtatttttagtagagacggggtttcgccatgttggccaggctggtctcaaactcctgacctcaggtgatccacctgcctcggcctcccaaagtgctggtgtgagccaccagcgcctggccagagtgggttttagcagaggaactgacaccagcaaaggtttgcagacagtgtttctcctctggaacagcctcaatgaccctctcttcggttggctcagtgaccggcagttcctcagctcccagccccggggaagagatctaccctggcttggcttggttggcccctctggactgtggactgcaaacaccctctgctgcttctggaagattcctttgccccatccctgcttgagcccgtcatcacccccaaccttgagaagtgggcatcccataccctttggccatcagcccaacaggctaataagggggtggaaattggggcagaggaggagagtgtacccactgg

SEQ ID NO: 434567 - DNA, 2841 bp, Homo sapiens
acattcttccgtttctggcacttcccttcccgtcttccttatcaataccaacagctctctgtttcctcgagtcactcccagattagtggtgtctagctcagcactgtttctgttatacttcattcataattcccagcgctgttggacgaggatgggaagaccgcctgtggccatgagccctccccggtgctcctggggctaaggctggggctgcagccatggggctgggtcagccccaggcctggttgctgggtctgcccacagctgtggtctatggctccctggctctcttcaccaccatcctgcacaatgtcttcctgctctactatgtggacacctttgtctcagtgtacaagatcaacaaaatggccttctgggtcggagagacagtgtttctcctctggaacagcctcaatgaccctctcttcggttggctcagtgaccggcagttcctcagctcccagccccggtcaggcgccgggctctcctcaagggctgtggtgctggcccgggtgcaggccctgggctggcatgggccgctgctggcgctgtcgttcctggcgttctgggtgccctgggccccagctggcctgcagttcttgctgtgcctgtgcctctatgatggcttcctgacgctcgtggacctgcaccaccatgccttgctggccgactggccctctcagcccacgaccgacccacctcaacttctactggtccctcttcagcgcggccggctccctctctgtctttgcatcctatgccttttggaacaaggaggatttctcctccttccgcgctttctgcgtgacactggctgtcagctctgggctgggctttctgggggccacacagctgctgaggcggcgggttgaggcggcccgaaaggacccagggtgctcaggcctggttgtggatagcggcctgtgtggagaggagctgcttgtgggcagtgaggaggcggacagcatcaccttgggccggtatctccggcagctggcacgccatcggaacttcctgtggttcgtgagcatggacctggtgcaggtcttccactgccacttcaacagcaacttcttccctctcttcctggagcatctgttgtccgaccatatctccctttccacgggctccatcctgttgggcctctcctatgtcgctccccatctcaacaacctctacttcctgtccctgtgccggcgctggggcgtctacgcggtggtgcgggggctcttcctgctcaagctgggacttagcctgctcatgttgttggccggcccggaccacctcagcctgctgtgcctcttcattgccagcaaccgcgtcttcactgagggcacctgtaagctgctgaccttggtggtcactgacctggtagacgaggacctggtgctgaaccaccgcaagcaggcagcctcggcactcctctttggcatggttgccttggtgaccaagccaggccagacctttgccccgctgctgggcacctggctgctctgtttctacacaggtcatgacctcttccagcagtccctcataacccctgtggggagtgcccatccctggccagagcccccagctccagcccctgcacaggccccgacgctccgccagggctgcttctacctgctggtgctggtgcccatcacctgtgctctgctgcagctcttcacctggtcccagttcacgctgcatgggagacgcctgcacatggtcaaggcccagcgccagaacctgtcacaggcccaaaccctggatgttaagatggtgtgagagctgtggcaaggtcaccccactgaggatgctgctggcagcctggggaaggagccagtttttttttggttttttttttaaggatttcatagttttttttttttttttttggagatgttgcccaaaaaaatggatctgttgcagtggtgcaatctgggctcactgaaaccaccacccaggttcaagcaattatcctgcctcagcctcccgagtaggtgggattataggagcgtgccatcatgcccggctactttttgtatttttagtagagacagggtttcatcatgttggccaggctagtctcaaacccctgaccttaggtggtcagcccgcctcggcctcccagagtgctgggattacaggcgtgagccactgtggccaacctaatttttgtattatttagtagagacagggtttcaccacattggccaggctggtctcgaactcctgacctcaagtgatctgcctgccttggtctcccaaagtgctgggaatacaggcatgagccaccgcactcggccaggagctagttttaccagcatcctgctccactgccttcctctagtgcagcctggaagacatggcagcgggtagctcctggggctgagccagaagcatcactgcagtgaaagtctctgcttacctgtctggctcagcttgggcaagggctgggccatatgtgctcagggacgtgcttctcttgtaaggcaggaggatagaagaggaccaagaagggagggggctgccctgtggtgcacacaggcctgccatggggcgtgggagcccatcccgctgcctgactggagctggccgctgtggtggactcaggaaccacttttaatactgcaactgctcccttttgcccagtcagggaaagctgactgtaagtcccacctcccactccgtccacccttctagtggtttctctgagaggtttctctgcttcggctgtgcttgaagtggcatgcctcctctgctgcagggctcccccacccccacacggcctctaaagatgtttatttccttatagactgattaaagtcagccattctttttcctcaagtctgtgct

SEQ ID NO: 434568 - DNA, 3480 bp, Homo sapiens
gggctcgcacctggctcccgccagccgtgggattaggcttcgccggctacgattgcggcccccatcttctgacttttcctcgtgtgacccatcttttcaaattcccttacctgaggaaggagcccgattacaaggatatttacctgctcctaccctgatctagggacgaggatgggaagaccgcctgtggccatgagccctccccggtgctcctggggctaaggctggggctgcagccatggggctgggtcagccccaggcctggttgctgggtctgcccacagctgtggtctatggctccctggctctcttcaccaccatcctgcacaatgtcttcctgctctactatgtggacacctttgtctcagtgtacaagatcaacaaaatggccttctgggtcggagagacagtgtttctcctctggaacagcctcaatgaccctctcttcggttggctcagtgaccggcagttcctcagctcccagccccggtcaggcgccgggctctcctcaagggctgtggtgctggcccgggtgcaggccctgggctggcatgggccgctgctggcgctgtcgttcctggcgttctgggtgccctgggccccagctggcctgcagttcttgctgtgcctgtgcctctatgatggcttcctgacgctcgtggacctgcaccaccatgccttgctggccgactggccctctcagcccacgaccgacccacctcaacttctactggtccctcttcagcgcggccggctccctctctgtctttgcatcctatgccttttggaacaaggaggatttctcctccttccgcgctttctgcgtgacactggctgtcagctctgggctgggctttctgggggccacacagctgctgaggcggcgggttgaggcggcccgaaaggacccagggtgctcaggcctggttgtggatagcggcctgtgtggagaggagctgcttgtgggcagtgaggaggcggacagcatcaccttgggccggtatctccggcagctggcacgccatcggaacttcctgtggttcgtgagcatggacctggtgcaggtcttccactgccacttcaacagcaacttcttccctctcttcctggagcatctgttgtccgaccatatctccctttccacgggctccatcctgttgggtgagtgtggaccttgggtgcttcatgcaagctggaaggagagagacctgtatttttagtagagatggggtttcaccgtattagccaggatggtctccatttcccgacccagtgatccacctgcctctgcctcccaaagtactgggattacaggtgtgagccactgcgcccagccagggacaatctttttaagacaccaagtgctgccgggtgcagtgggcatggggggcagggtgtggtgggtgttgaggggggcggaggctgtgctggtgtgggtcctcttggagatggtggcaccctgagggggtgcagtggctggttaacacagaggaatatcatctgatgggcctgggtgtgagtcttgactctgtgctcatttggtgggcagcctcaggtgggttagttcatctttttgggcctctctttctcatccgtaaagtggggatgataatagtactcaccttaaggggctgtgaagatgaactaagacagtgaagctcttagcacagagcccagtgcatcgctagtgtacaggaatgcagtcggctgtgaagctgatggcgctcactggcactgcagcagtgcccttgacaaggtggctccccgtcttcctccccaggcctctcctatgtcgctccccatctcaacaacctctacttcctgtccctgtgccggcgctggggcgtctacgcggtggtgcgggggctcttcctgctcaagctgggacttagcctgctcatgttgttggccggcccggaccacctcagcctgctgtgcctcttcattgccagcaaccgcgtcttcactgagggcacctgtaagctgctgaccttggtggtcactgacctggtagacgaggacctggtgctgaaccaccgcaagcaggcagcctcggcactcctctttggcatggttgccttggtgaccaagccaggccagacctttgccccgctgctgggcacctggctgctctgtttctacacaggtcatgacctcttccagcagtccctcataacccctgtggggagtgcccatccctggccagagcccccagctccagcccctgcacaggccccgacgctccgccagggctgcttctacctgctggtgctggtgcccatcacctgtgctctgctgcagctcttcacctggtcccagttcacgctgcatgggagacgcctgcacatggtcaaggcccagcgccagaacctgtcacaggcccaaaccctggatgttaagatggtgtgagagctgtggcaaggtcaccccactgaggatgctgctggcagcctggggaaggagccagtttttttttggttttttttttaaggatttcatagttttttttttttttttttggagatgttgcccaaaaaaatggatctgttgcagtggtgcaatctgggctcactgaaaccaccacccaggttcaagcaattatcctgcctcagcctcccgagtaggtgggattataggagcgtgccatcatgcccggctactttttgtatttttagtagagacagggtttcatcatgttggccaggctagtctcaaacccctgaccttaggtggtcagcccgcctcggcctcccagagtgctgggattacaggcgtgagccactgtggccaacctaatttttgtattatttagtagagacagggtttcaccacattggccaggctggtctcgaactcctgacctcaagtgatctgcctgccttggtctcccaaagtgctgggaatacaggcatgagccaccgcactcggccaggagctagttttaccagcatcctgctccactgccttcctctagtgcagcctggaagacatggcagcgggtagctcctggggctgagccagaagcatcactgcagtgaaagtctctgcttacctgtctggctcagcttgggcaagggctgggccatatgtgctcagggacgtgcttctcttgtaaggcaggaggatagaagaggaccaagaagggagggggctgccctgtggtgcacacaggcctgccatggggcgtgggagcccatcccgctgcctgactggagctggccgctgtggtggactcaggaaccacttttaatactgcaactgctcccttttgcccagtcagggaaagctgactgtaagtcccacctcccactccgtccacccttctagtggtttctctgagaggtttctctgcttcggctgtgcttgaagtggcatgcctcctctgctgcagggctcccccacccccacacggcctctaaagatgtttatttccttatagactgattaaagtcagccattctttttcctcaagtctgtgct

SEQ ID NO: 434569 - DNA, 1293 bp, Homo sapiens
gggctcgcacctggctcccgccagccgtgggattaggcttcgccggctacgattgcggcccccatcttctgacttttcctcgtgtgacccatcttttcaaattcccttacctgaggaaggagcccgattacaaggatatttacctgctcctaccctgatctagggacgaggatgggaagaccgcctgtggccatgagccctccccggtgctcctggggctaaggctggggctgcagccatggggctgggtcagccccaggcctggttgctgggtctgcccacagctgtggtctatggctccctggctctcttcaccaccatcctgcacaatgtcttcctgctctactatgtggacacctttgtctcagtgtacaagatcaacaaaatggccttctgggtcggagagacagtgtttctcctctggaacagcctcaatgaccctctcttcggttggctcagtgaccggcagttcctcagctcccagccccggtcaggcgccgggctctcctcaagggctgtggtgctggcccgggtgcaggccctgggctggcatgggccgctgctggcgctgtcgttcctggcgttctgggtgccctgggccccagctggcctgcagttcttgctgtgcctgtgcctctatgatggcttcctgacgctcgtggacctgcaccaccatgccttgctggccgactggccctctcagcccacgaccgacccacctcaacttctactggtccctcttcagcgcggccggctccctctctgtctttgcatcctatgccttttggaacaaggaggatttctcctccttccgcgctttctgcgtgacactggctgtcagctctgggctgggctttctgggggccacacagctgctgaggcggcgggttgaggcggcccgaaaggacccagggtgctcaggcctggttgtggatagcggcctgtgtggagaggagctgcttgtgggcagtgaggaggcggacagcatcaccttgggccggtatctccggcagctggcacgccatcggaacttcctgtggttcgtgagcatggacctggtgcaggtgcagtggctcacgcctgtaatcccagcacttcgggacgccaaggtggaaagaccgcttgagcccaggagttcgaggctgcaatgagttatgattgcaccactgcactccagcctgggcggcagagaaaggctccatctctaaaaaaagaagagctaagtgctgtacctaaaacatgcagtatataaactggctgaacttagaaataaactgttttcatgttatgaaa

SEQ ID NO: 434570 - DNA, 372 bp, Homo sapiens
tgttatacttcattcataattcccagcgctgttgtaagtacaaactctctcctgttggaaatgagtttttaaatgattcagaggtctggggttaagaacagagctggctctgatccctgttgctcactggttccttcttccccagggacgaggatgggaagaccgcctgtggccatgagccctccccggtgctcctggggctaaggctggggctgcagccatggggctgggtcagccccaggcctggttgctgggtctgcccacagctgtggtctatggctccctggctctcttcaccaccatcctgcacaatgtcttcctgctctactatgtggacacctttgtctcagtgtacaagatcaacaaaatggc

SEQ ID NO: 434571 - DNA, 4437 bp, Homo sapiens
gcggccgcagtcatgggtagattacaggattcccatctgtaagatcagtactgtgggggtggagggccaagcgaaaccaataaaataggtctgttggccgagtttcctcaacttaacggggatcggttaaattgaacacaaatcgttggatccgtcgcgtttcgcgtaaccaggctgacgctgaaaaccctggacctacgtgggcaggccctggggtgcggacatctattttgcccttcttagccgaggtactttagctgggatatgaagagtgaagaggcaaaccgcagccaacacccagctaccgcgagcagtgggactaaaatgcgcaaccgcagtggacatctaggcctcagctccgcttctggtggcttacgtcattactcagcgacagccttgaggaaggtcccttctcgctcgccatctctgcgactttaatgcgcttgcgcacgtgctgtctaccagttcctgagagggacgcgtgccgcggagccaggcttactacgtgacccggacaccaggcatacgctaggggcagtcagctgtgccttctctttcggagttgttccgtgctcccacgtgcttccccttctccactggctgggatcccccgggctcggggcgcagtaataatttttcaccatgcatcggaaaaaggtggataaccgaatccggattctcattgagaatggagtagctgagcggcaaagatctctctttgttgtagttggggatcgaggaaaagatcaggtggtaatacttcatcacatgttatccaaagcaactgtgaaggctcggccttcagtgctgtggtgttataagaaagagctggggtttagcagtcaccggaagaaaagaatgcgacagctgcagaagaaaataaagaatggaacactgaacataaagcaggacgacccctttgaactcttcatagcagccacaaacattcgctactgctactacaacgagacccacaagatcctgggcaataccttcggcatgtgtgtgctgcaggattttgaagccttaactccaaacttgctggccaggactgtagaaacagtggaaggtggtgggctagtggtcatcctcctacggaccatgaactcactcaagcaattgtacacagtgactatggatgtgcattccaggtacagaactgaggcccatcaggatgtggtgggaagatttaatgaaaggtttattctgtctctggcctcttgtaagaagtgtctcgtcattgatgaccagctcaacatcctgcccatctcctcccacgttgccaccatggaggccctgcctccccagactccggatgagagtcttggtccttctgatctggagctgagggagttgaaggagagcttgcaggacacccagcctgtgggtgtgttggtggactgctgtaagactctagaccaggccaaagctgtcttgaaatttatcgagggcatctctgaaaagaccctgaggagtactgttgcactcacagctgctcgaggacggggaaaatctgcagccctgggattggcgattgctggggcggtggcatttgggtactccaatatctttgttacctccccaagccctgataacctccatactctgtttgaatttgtatttaaaggatttgatgctctgcaatatcaggaacatctggattatgagattatccagtctctaaatcctgaatttaacaaagcagtgatcagagtgaatgtatttcgagaacacaggcagactattcagtatatacatcctgcagatgctgtgaagctgggccaggctgaactagttgtgattgatgaagctgccgccatccccctccccttggtgaagagcctacttggcccctaccttgttttcatggcatccaccatcaatggctatgagggcactggccggtcactgtccctcaagctaattcagcagctccgtcaacagagcgcccagagccaggtcagcaccactgctgagaataagaccacgacgacagccagattggcatcagcgcggacactgcatgaggtttccctccaggagtcaatccgatacgcccctggggatgcagtggagaagtggctgaatgacttgctgtgcctggattgcctcaacatcactcggatagtctcaggctgccccttgcctgaagcttgtgaactgtactatgttaatagagataccctcttttgctaccacaaggcctctgaagttttcctccaacggcttatggccctctacgtggcttctcactacaagaactctcccaatgatctccagatgctctccgatgcacctgctcaccatctcttctgccttctgcctcctgtgccccccacccagaatgcccttccagaagtgcttgctgttatccaggtgtgccttgaaggggagatttctcgccagtccatcttgaacagtctgtctcgaggcaagaaggcttcaggggacctgattccatggacagtgtcagaacagttccaagatccagactttggtggtctgtctggtggaagggtcgttcgcattgctgttcacccagattatcaagggatgggctatggcagccgtgctctgcagctgctgcagatgtactatgaaggcaggtttccttgtctggaggaaaaggtccttgagacaccacaggaaattcacaccgtaagcagcgaggctgtcagcttgttggaagaggtcatcactccccggaaggacctgcctcctttactcctcaaattgaatgagaggcctgccgaacgcctggattacctgggtgtttcctatggcttgacccccaggctcctcaagttctggaaacgagctggatttgttcctgtttatctgagacagaccccgaatgacctgaccggagagcactcgtgcatcatgctgaagacgctcactgatgaggatgaggctgaccagggaggctggcttgcagccttctggaaagatttccgacggcggttcctagccttgctctcctaccagttcagtaccttctctccttccctggctctgaacatcattcagaacaggaacatggggaagccagcccagcctgccctgagccgggaggagctggaagcactcttcctcccctatgacctgaagcggctggagatgtattcacggaatatggtggactatcacctcatcatggacatgatcccggccatctctcgcatctatttcctgaaccagctgggggacctggccctgtctgcggctcagtcggctcttctcttggggattggcctgcagcataagtctgtggaccagctggaaaaggagattgagctgccctcgggccagttgatgggacttttcaaccggatcatccgcaaagttgtgaagctatttaatgaagttcaggaaaaggccattgaggagcagatggtggcagcgaaggatgtggtcatggagcccacgatgaagaccctcagtgacgacctagatgaagcagcaaaggaatttcaggagaaacacaagaaggaagtagggaagctgaagagcatggacctctctgaatacataatccgtggggacgatgaagagtggaatgaagttttgaacaaagctgggccgaacgcctcgatcatcagcctgaaaagtgacaagaaaaggaagttagaggccaaacaagaacccaaacagagcaagaagttgaagaacagagagacaaagaacaaaaaagatatgaaactgaagcggaagaaatagtgaagagaaactcgggcatctgtgtttgatcatgggaagatactctcactaactgaaccctctctggctggactgttaaaagcaacgagaggccccggcacacctggaagctggccgcgaattcggcctctgggcctgtgtgtctgtgagctcaacctggctaaaggcagagtcactcccaaatgggtctctttagaacttgatggctgggcactgccatctctagaattgccacgagtctctctcttcctgcccagtccagggccctcctttcctataagttcatattttgctttgagccagctttttagtctcattcccacacatgtggaagccacgttgcctctcgaccgcctgaggcccttaagtacatcgctttctggtggtgcccaggaggctgctgctgggccgctgggtctctctttgtggacttgtacctggagcaggaggaactccagtccgtcccggcatccatggcagcccgcggttaggtgcgccagggtttgctgatgttgtcttgtgctgttccactcttggctccagcagacccactgtcccagaaaagcctgatcctgtagtttatgtagaatgccacatctgcgtcctcaagacctgtttcatccatttgggaaaagatgttgggaaaggccactttgctcgcaggggtgaggggaaggatagagaatctatttttaataaataacattctagaaagat

SEQ ID NO: 434572 - DNA, 3918 bp, Homo sapiens
gtatttgcaggacgacccttcgaactcttcatagcagccacaaacattcgctactgctactacaacgagacccacaaggttctgcagttgtatttctttctcttttagtaataatttttcaccatgcatcggaaaaaggtggataaccgaatccggattctcattgagaatggagtagctgagcggcaaagatctctctttgttgtagttggggatcgaggaaaagatcaggtggtaatacttcatcacatgttatccaaagcaactgtgaaggctcggccttcagtgctgtggtgttataagaaagagctggggtttagcagtcaccggaagaaaagaatgcgacagctgcagaagaaaataaagaatggaacactgaacataaagcaggacgacccctttgaactcttcatagcagccacaaacattcgctactgctactacaacgagacccacaagatcctgggcaataccttcggcatgtgtgtgctgcaggattttgaagccttaactccaaacttgctggccaggactgtagaaacagtggaaggtggtgggctagtggtcatcctcctacggaccatgaactcactcaagcaattgtacacagtgactatggatgtgcattccaggtacagaactgaggcccatcaggatgtggtgggaagatttaatgaaaggtttattctgtctctggcctcttgtaagaagtgtctcgtcattgatgaccagctcaacatcctgcccatctcctcccacgttgccaccatggaggccctgcctccccagactccggatgagagtcttggtccttctgatctggagctgagggagttgaaggagagcttgcaggacacccagcctgtgggtgtgttggtggactgctgtaagactctagaccaggccaaagctgtcttgaaatttatcgagggcatctctgaaaagaccctgaggagtactgttgcactcacagctgctcgaggacggggaaaatctgcagccctgggattggcgattgctggggcggtggcatttgggtactccaatatctttgttacctccccaagccctgataacctccatactctgtttgaatttgtatttaaaggatttgatgctctgcaatatcaggaacatctggattatgagattatccagtctctaaatcctgaatttaacaaagcagtgatcagagtgaatgtatttcgagaacacaggcagactattcagtatatacatcctgcagatgctgtgaagctgggccaggctgaactagttgtgattgatgaagctgccgccatccccctccccttggtgaagagcctacttggcccctaccttgttttcatggcatccaccatcaatggctatgagggcactggccggtcactgtccctcaagctaattcagcagctccgtcaacagagcgcccagagccaggtcagcaccactgctgagaataagaccacgacgacagccagattggcatcagcgcggacactgcatgaggtttccctccaggagtcaatccgatacgcccctggggatgcagtggagaagtggctgaatgacttgctgtgcctggattgcctcaacatcactcggatagtctcaggctgccccttgcctgaagcttgtgaactgtactatgttaatagagataccctcttttgctaccacaaggcctctgaagttttcctccaacggcttatggccctctacgtggcttctcactacaagaactctcccaatgatctccagatgctctccgatgcacctgctcaccatctcttctgccttctgcctcctgtgccccccacccagaatgcccttccagaagtgcttgctgttatccaggtgtgccttgaaggggagatttctcgccagtccatcttgaacagtctgtctcgaggcaagaaggcttcaggggacctgattccatggacagtgtcagaacagttccaagatccagactttggtggtctgtctggtggaagggtcgttcgcattgctgttcacccagattatcaagggatgggctatggcagccgtgctctgcagctgctgcagatgtactatgaaggcaggtttccttgtctggaggaaaaggtccttgagacaccacaggaaattcacaccgtaagcagcgaggctgtcagcttgttggaagaggtcatcactccccggaaggacctgcctcctttactcctcaaattgaatgagaggcctgccgaacgcctggattacctgggtgtttcctatggcttgacccccaggctcctcaagttctggaaacgagctggatttgttcctgtttatctgagacagaccccgaatgacctgaccggagagcactcgtgcatcatgctgaagacgctcactgatgaggatgaggctgaccagggaggctggcttgcagccttctggaaagatttccgacggcggttcctagccttgctctcctaccagttcagtaccttctctccttccctggctctgaacatcattcagaacaggaacatggggaagccagcccagcctgccctgagccgggaggagctggaagcactcttcctcccctatgacctgaagcggctggagatgtattcacggaatatggtggactatcacctcatcatggacatgatcccggccatctctcgcatctatttcctgaaccagctgggggacctggccctgtctgcggctcagtcggctcttctcttggggattggcctgcagcataagtctgtggaccagctggaaaaggagattgagctgccctcgggccagttgatgggacttttcaaccggatcatccgcaaagttgtgaagctatttaatgaagttcaggaaaaggccattgaggagcagatggtggcagcgaaggatgtggtcatggagcccacgatgaagaccctcagtgacgacctagatgaagcagcaaaggaatttcaggagaaacacaagaaggaagtagggaagctgaagagcatggacctctctgaatacataatccgtggggacgatgaagagtggaatgaagttttgaacaaagctgggccgaacgcctcgatcatcagcctgaaaagtgacaagaaaaggaagttagaggccaaacaagaacccaaacagagcaagaagttgaagaacagagagacaaagaacaaaaaagatatgaaactgaagcggaagaaatagtgaagagaaactcgggcatctgtgtttgatcatgggaagatactctcactaactgaaccctctctggctggactgttaaaagcaacgagaggccccggcacacctggaagctggccgcgaattcggcctctgggcctgtgtgtctgtgagctcaacctggctaaaggcagagtcactcccaaatgggtctctttagaacttgatggctgggcactgccatctctagaattgccacgagtctctctcttcctgcccagtccagggccctcctttcctataagttcatattttgctttgagccagctttttagtctcattcccacacatgtggaagccacgttgcctctcgaccgcctgaggcccttaagtacatcgctttctggtggtgcccaggaggctgctgctgggccgctgggtctctctttgtggacttgtacctggagcaggaggaactccagtccgtcccggcatccatggcagcccgcggttaggtgcgccagggtttgctgatgttgtcttgtgctgttccactcttggctccagcagacccactgtcccagaaaagcctgatcctgtagtttatgtagaatgccacatctgcgtcctcaagacctgtttcatccatttgggaaaagatgttgggaaaggccactttgctcgcaggggtgaggggaaggatagagaatctatttttaataaataacattctagaaagat

SEQ ID NO: 434573 - DNA, 4366 bp, Homo sapiens
gcggccgcagtcatgggtagattacaggattcccatctgtaagatcagtactgtgggggtggagggccaagcgaaaccaataaaataggtctgttggccgagtttcctcaacttaacggggatcggttaaattgaacacaaatcgttggatccgtcgcgtttcgcgtaaccaggctgacgctgaaaaccctggacctacgtgggcaggccctggggtgcggacatctattttgcccttcttagccgaggtactttagctgggatatgaagagtgaagaggcaaaccgcagccaacacccagctaccgcgagcagtgggactaaaatgcgcaaccgcagtggacatctaggcctcagctccgcttctggtggcttacgtcattactcagcgacagccttgaggaaggtcccttctcgctcgccatctctgcgactttaatgcgcttgcgcacgtgctgtctaccagttcctgagagggacgcgtgccgcggagccaggcttactacgtgacccggacaccaggcatacgctaggggcagtcagctgtgccttctctttcggagttgttccgtgctcccacgtgcttccccttctccactggctgggatcccccgggctcggggcgcagtaataatttttcaccatgcatcggaaaaaggtggataaccgaatccggattctcattgagaatggagtagctgagcggcaaagatctctctttgttgtagttggggatcgaggaaaagatcaggtggtaatacttcatcacatgttatccaaagcaactgtgaaggctcggccttcagtgctgtggtgttataagaaagagctggggtttagcagtcaccggaagaaaagaatgcgacagctgcagaagaaaataaagaatggaacactgaacataaagcaggacgacccctttgaactcttcatagcagccacaaacattcgctactgctactacaacgagacccacaagatcctgggcaataccttcggcatgtgtgtgctgcaggattttgaagccttaactccaaacttgctggccaggactgtagaaacagtggaaggtggtgggctagtggtcatcctcctacggaccatgaactcactcaagcaattgtacacagtgactatggatgtgcattccaggtacagaactgaggcccatcaggatgtggtgggaagatttaatgaaaggtttattctgtctctggcctcttgtaagaagtgtctcgtcattgatgaccagctcaacatcctgcccatctcctcccacgttgccaccatggaggccctgcctccccagactccggatgagagtcttggtccttctgatctggagctgagggagttgaaggagagcttgcaggacacccagcctgtgggtgtgttggtggactgctgtaagactctagaccaggccaaagctgtcttgaaatttatcgagggcatctctgaaaagaccctgaggagtactgttgcactcacagctgctcgaggacggggaaaatctgcagccctgggattggcgattgctggggcggtggcatttgggtactccaatatctttgttacctccccaagccctgataacctccatactctgtttgaatttgtatttaaaggatttgatgctctgcaatatcaggaacatctggattatgagattatccagtctctaaatcctgaatttaacaaagcagtgatcagagtgaatgtatttcgagaacacaggcagactattcagtatatacatcctgcagatgctgtgaagctgggccaggctgaactagttgtgattgatgaagctgccgccatccccctccccttggtgaagagcctacttggcccctaccttgttttcatggcatccaccatcaatggctatgagggcactggccggtcactgtccctcaagctaattcagcagctccgtcaacagagcgcccagagccaggtcagcaccactgctgagaataagaccacgacgacagccagattggcatcagcgcggacactgcatgaggtttccctccaggagtcaatccgatacgcccctggggatgcagtggagaagtggctgaatgacttgctgtgcctggattgcctcaacatcactcggatagtctcaggctgccccttgcctgaagcttgtgaactgtactatgttaatagagataccctcttttgctaccacaaggcctctgaagttttcctccaacggcttatggccctctacgtggcttctcactacaagaactctcccaatgatctccagatgctctccgatgcacctgctcaccatctcttctgccttctgcctcctgtgccccccacccagaatgcccttccagaagtgcttgctgttatccaggtgtgccttgaaggggagatttctcgccagtccatcttgaacagtctgtctcgaggcaagaaggcttcaggggacctgattccatggacagtgtcagaacagttccaagatccagactttggtggtctgtctggtggaagggtcgttcgcattgctgttcacccagattatcaagggatgggctatggcagccgtgctctgcagctgctgcagatgtactatgaaggcaggtttccttgtctggaggaaaaggtccttgagacaccacaggaaattcacaccgtaagcagcgaggctgtcagcttgttggaagaggtcatcactccccggaaggacctgcctcctttactcctcaaattgaatgagaggcctgccgaacgcctggattacctgggtgtttcctatggcttgacccccaggctcctcaagttctggaaacgagctggatttgttcctgtttatctgagacagaccccgaatgacctgaccggagagcactcgtgcatcatgctgaagacgctcactgatgaggatgaggctgaccagggaggctggcttgcagccttctggaaagatttccgacggcggttcctagccttgctctcctaccagttcagtaccttctctccttccctggctctgaacatcattcagaacaggaacatggggaagccagcccagcctgccctgagccgggaggagctggaagcactcttcctcccctatgacctgaagcggctggagatgtattcacggaatatggtggactatcacctcatcatggacatgatcccggccatctctcgcatctatttcctgaaccagctgggggacctggccctgtctgcggctcagtcggctcttctcttggggattggcctgcagcataagtctgtggaccagctggaaaaggagattgagctgccctcgggccagttgatgggacttttcaaccggatcatccgcaaagttgtgaagctatttaatgaagttcaggaaaaggccattgaggagcagatggtggcagcgaaggatgtggtcatggagcccacgatgaagaccctcagtgacgacctagatgaagcagcaaaggaatttcaggagaaacacaagaaggaagtagggaagctgaagagcatggacctctctgaatacataatccgtggggacgatgaagagtggaatgaagttttgaacaaagctgggccgaacgcctcgatcatcagcctgaaaagtgacaagaaaaggaagttagaggccaaacaagaacccaaacagagcaagaagttgaagaacagagagacaaagaacaaaaaagatatgaaactgaagcggaagaaatagtgaagagaaactcgggcatctgtgtttgatcatgggaagatactctcactaactgaaccctctctggctggactgttaaaagcaacgagaggccccggcacacctggaagctggccgcgaattcggcctctgggcctgtgtgtctgtgagctcaaaattgccacgagtctctctcttcctgcccagtccagggccctcctttcctataagttcatattttgctttgagccagctttttagtctcattcccacacatgtggaagccacgttgcctctcgaccgcctgaggcccttaagtacatcgctttctggtggtgcccaggaggctgctgctgggccgctgggtctctctttgtggacttgtacctggagcaggaggaactccagtccgtcccggcatccatggcagcccgcggttaggtgcgccagggtttgctgatgttgtcttgtgctgttccactcttggctccagcagacccactgtcccagaaaagcctgatcctgtagtttatgtagaatgccacatctgcgtcctcaagacctgtttcatccatttgggaaaagatgttgggaaaggccactttgctcgcaggggtgaggggaaggatagagaatctatttttaataaataacattctagaaagat

SEQ ID NO: 434574 - DNA, 4795 bp, Homo sapiens
gcggccgcagtcatgggtagattacaggattcccatctgtaagatcagtactgtgggggtggagggccaagcgaaaccaataaaataggtctgttggccgagtttcctcaacttaacggggatcggttaaattgaacacaaatcgttggatccgtcgcgtttcgcgtaaccaggctgacgctgaaaaccctggacctacgtgggcaggccctggggtgcggacatctattttgcccttcttagccgaggtactttagctgggatatgaagagtgaagaggcaaaccgcagccaacacccagctaccgcgagcagtgggactaaaatgcgcaaccgcagtggacatctaggcctcagctccgcttctggtggcttacgtcattactcagcgacagccttgaggaaggtcccttctcgctcgccatctctgcgactttaatgcgcttgcgcacgtgctgtctaccagttcctgagagggacgcgtgccgcggagccaggcttactacgtgacccggacaccaggcatacgctaggggcagtcagctgtgccttctctttcggagttgttccgtgctcccacgtgcttccccttctccactggctgggatcccccgggctcggggcgcagtaataatttttcaccatgcatcggaaaaaggtggataaccgaatccggattctcattgagaatggagtagctgagcggcaaagatctctctttgttgtagttggggatcgaggaaaagatcaggtggtaatacttcatcacatgttatccaaagcaactgtgaaggctcggccttcagtgctgtggtgttataagaaagagctggggtttagcagtcaccggaagaaaagaatgcgacagctgcagaagaaaataaagaatggaacactgaacataaagcaggacgacccctttgaactcttcatagcagccacaaacattcgctactgctactacaacgagacccacaagatcctgggcaataccttcggcatgtgtgtgctgcaggattttgaagccttaactccaaacttgctggccaggactgtagaaacagtggaaggtggtgggctagtggtcatcctcctacggaccatgaactcactcaagcaattgtacacagtgactatggatgtgcattccaggtacagaactgaggcccatcaggatgtggtgggaagatttaatgaaaggtttattctgtctctggcctcttgtaagaagtgtctcgtcattgatgaccagctcaacatcctgcccatctcctcccacgttgccaccatggaggccctgcctccccagactccggatgagagtcttggtccttctgatctggagctgagggagttgaaggagagcttgcaggacacccagcctgtgggtgtgttggtggactgctgtaagactctagaccaggccaaagctgtcttgaaatttatcgagggcatctctgaaaagaccctgaggagtactgttgcactcacagctgctcgaggacggggaaaatctgcagccctgggattggcgattgctggggcggtggcatttgggtactccaatatctttgttacctccccaagccctgataacctccatactctgtttgaatttgtatttaaaggatttgatgctctgcaatatcaggaacatctggattatgagattatccagtctctaaatcctgaatttaacaaagcagtgatcagagtgaatgtatttcgagaacacaggcagactattcagtatatacatcctgcagatgctgtgaagctgggccaggctgaactagttgtgattgatgaagctgccgccatccccctccccttggtgaagagcctacttggcccctaccttgttttcatggcatccaccatcaatggctatgagggcactggccggtcactgtccctcaagctaattcagcagctccgtcaacagagcgcccagagccaggtcagcaccactgctgagaataagaccacgacgacagccagattggcatcagcgcggacactgcatgaggtttccctccaggagtcaatccgatacgcccctggggatgcagtggagaagtggctgaatgacttgctgtgcctggattgcctcaacatcactcggatagtctcaggctgccccttgcctgaagcttgtgaactgtactatgttaatagagataccctcttttgctaccacaaggcctctgaagttttcctccaacggcttatggccctctacgtggcttctcactacaagaactctcccaatgatctccagatgctctccgatgcacctgctcaccatctcttctgccttctgcctcctgtgccccccacccagaatgcccttccagaagtgcttgctgttatccaggtgtgccttgaaggggagatttctcgccagtccatcttgaacagtctgtctcgaggcaagaaggcttcaggggacctgattccatggacagtgtcagaacagttccaagatccagactttggtggtctgtctggtggaagggtcgttcgcattgctgttcacccagattatcaagggatgggctatggcagccgtgctctgcagctgctgcagatgtactatgaaggcaggtttccttgtctggaggaaaaggtccttgagacaccacaggaaattcacaccgtaagcagcgaggctgtcagcttgttggaagaggtcatcactccccggaaggacctgcctcctttactcctcaaattgaatgagaggcctgccgaacgcctggattacctgggtgtttcctatggcttgacccccaggctcctcaagttctggaaacgagctggatttgttcctgtttatctgagacagaccccgaatgacctgaccggagagcactcgtgcatcatgctgaagacgctcactgatgaggatgaggctgaccagggaggctggcttgcagccttctggaaagatttccgacggcggttcctagccttgctctcctaccagttcagtaccttctctccttccctggctctgaacatcattcagaacaggaacatggggaagccagcccagcctgccctgagccgggaggagctggaagcactcttcctcccctatgacctgaagcggctggagatgtattcacggaatatggtggactatcacctcatcatggacatgatcccggccatctctcgcatctatttcctgaaccagctgggggacctggccctgtctgcggctcagtcggctcttctcttggggattggcctgcagcataagtctgtggaccagctggaaaaggagattgagctgccctcgggccagttgatgggacttttcaaccggatcatccgcaaagttgtgaagctatttaatgaagttcaggaaaaggccattgaggagcagatggtggcagcgaaggatgtggtcatggagcccacgatgaagaccctcagtgacgacctagatgaagcagcaaaggaatttcaggagaaacacaagaaggaagtagggaagctgaagagcatggacctctctgaatacataatccgtggggacgatgaagagtggaatgaagttttgaacaaagctgggccgaacgcctcgatcatcagcctgaaaagtgacaagaaaaggaagttagaggccaaacaagaacccaaacagagcaagaagttgaagaacagagagacaaagaacaaaaaagatatgaaactgaagcggaagaaatagtgaagagaaactcgggcatctgtgtttgatcatgggaagatactctcactaactgaaccctctctggctggactgttaaaagcaacgagaggccccggcacacctggaagctggccgcgaattcggcctctgggcctgtgtgtctgtgagctcaacctggctaaaggcagagtcactcccaaatgggtctctttagaacttgatggctgggcactgccatctctagaattgccacgagtctctctcttcctgcccagtccagggccctcctttcctataagttcatattttgctttgagccagctttttagtctcattcccacacatgtggaagccacgttgcctctcgaccgcctgaggcccttaagtacatcgctttctggtggtgcccaggaggctgctgctgggccgctgggtctctctttgtggacttgtacctggagcaggaggaactccagtccgtcccggcatccatggcagcccgcggttaggtgcgccagggtttgctgatgttgtcttgtgctgttccactcttggctccagcagacccactgtcccagaaaagcctgatcctgtagtttatgtagaatgccacatctgcgtcctcaagacctgtttcatccatttgggaaaagatgttgggaaaggccactttgctcgcaggggtgaggggaaggatagagaatctatttttaataaataacattctagaaagatggaaaaacacaacaacaaaaaaaaaaaaaaaaaaactgtgttgtggggcgcgcccgcgggcccccggaaaaagatttttaaaaccccttgggtgtgggggcgccgggggccccaatgagtggtgatgacgtgcacacagtggcgccagtacagcgggttcgccataaaggaaaaactccgcggggagaacgaaacaaaggggtggggggttttctccccaaatagtaaaaaaagccggcggggagggacacaacgaagagcgcgtgtcttgtgaacaacacaccagaaggggaggccgcagaacgccaaaacgggggtacaatacacaggggggccaaggaacgccagatataaatcc

SEQ ID NO: 434575 - DNA, 4676 bp, Homo sapiens
gcggccgcagtcatgggtagattacaggattcccatctgtaagatcagtactgtgggggtggagggccaagcgaaaccaataaaataggtctgttggccgagtttcctcaacttaacggggatcggttaaattgaacacaaatcgttggatccgtcgcgtttcgcgtaaccaggctgacgctgaaaaccctggacctacgtgggcaggccctggggtgcggacatctattttgcccttcttagccgaggtactttagctgggatatgaagagtgaagaggcaaaccgcagccaacacccagctaccgcgagcagtgggactaaaatgcgcaaccgcagtggacatctaggcctcagctccgcttctggtggcttacgtcattactcagcgacagccttgaggaaggtcccttctcgctcgccatctctgcgactttaatgcgcttgcgcacgtgctgtctaccagttcctgagagggacgcgtgccgcggagccaggcttactacgtgacccggacaccaggcatacgctaggggcagtcagctgtgccttctctttcggagttgttccgtgctcccacgtgcttccccttctccactggctgggatcccccgggctcggggcgcagtaataatttttcaccatgcatcggaaaaaggtggataaccgaatccggattctcattgagaatggagtagctgagcggcaaagatctctctttgttgtagttggggatcgaggaaaagatcaggtggtaatacttcatcacatgttatccaaagcaactgtgaaggctcggccttcagtgctgtggtgttataagaaagagctggggtttagcagtcaccggaagaaaagaatgcgacagctgcagaagaaaataaagaatggaacactgaacataaagcaggacgacccctttgaactcttcatagcagccacaaacattcgctactgctactacaacgagacccacaagatcctgggcaataccttcggcatgtgtgtgctgcaggattttgaagccttaactccaaacttgctggccaggactgtagaaacagtggaaggtggtgggctagtggtcatcctcctacggaccatgaactcactcaagcaattgtacacagtgactatggatgtgcattccaggtacagaactgaggcccatcaggatgtggtgggaagatttaatgaaaggtttattctgtctctggcctcttgtaagaagtgtctcgtcattgatgaccagctcaacatcctgcccatctcctcccacgttgccaccatggaggccctgcctccccagactccggatgagagtcttggtccttctgatctggagctgagggagttgaaggagagcttgcaggacacccagcctgtgggtgtgttggtggactgctgtaagactctagaccaggccaaagctgtcttgaaatttatcgagggcatctctgaaaagaccctgaggagtactgttgcactcacagctgctcgaggacggggaaaatctgcagccctgggattggcgattgctggggcggtggcatttgggtactccaatatctttgttacctccccaagccctgataacctccatactctgtttgaatttgtatttaaaggatttgatgctctgcaatatcaggaacatctggattatgagattatccagtctctaaatcctgaatttaacaaagcagtgatcagagtgaatgtatttcgagaacacaggcagactattcagtatatacatcctgcagatgctgtgaagctgggccaggctgaactagttgtgattgatgaagctgccgccatccccctccccttggtgaagagcctacttggcccctaccttgttttcatggcatccaccatcaatggctatgagggcactggccggtcactgtccctcaagctaattcagcagctccgtcaacagagcgcccagagccaggtcagcaccactgctgagaataagaccacgacgacagccagattggcatcagcgcggacactgcatgaggtttccctccaggagtcaatccgatacgcccctggggatgcagtggagaagtggctgaatgacttgctgtgcctggattgcctcaacatcactcggatagtctcaggctgccccttgcctgaagcttgtgaactgtactatgttaatagagataccctcttttgctaccacaaggcctctgaagttttcctccaacggcttatggccctctacgtggcttctcactacaagaactctcccaatgatctccagatgctctccgatgcacctgctcaccatctcttctgccttctgcctcctgtgccccccacccagaatgcccttccagaagtgcttgctgttatccaggtgtgccttgaaggggagatttctcgccagtccatcttgaacagtctgtctcgaggcaagaaggcttcaggggacctgattccatggacagtgtcagaacagttccaagatccagactttggtggtctgtctggtggaagggtcgttcgcattgctgttcacccagattatcaagggatgggctatggcagccgtgctctgcagctgctgcagatgtactatgaaggcaggtttccttgtctggaggaaaaggtccttgagacaccacaggaaattcacaccgtaagcagcgaggctgtcagcttgttggaagaggtcatcactccccggaaggacctgcctcctttactcctcaaattgaatgagaggcctgccgaacgcctggattacctgggtgtttcctatggcttgacccccaggctcctcaagttctggaaacgagctggatttgttcctgtttatctgagacagaccccgaatgacctgaccggagagcactcgtgcatcatgctgaagacgctcactgatgaggatgaggctgaccagggaggctggcttgcagccttctggaaagatttccgacggcggttcctagccttgctctcctaccagttcagtaccttctctccttccctggctctgaacatcattcagaacaggaacatggggaagccagcccagcctgccctgagccgggaggagctggaagcactcttcctcccctatgacctgaagcggctggagatgtattcacggaatatggtggactatcacctcatcatggacatgatcccggccatctctcgcatctatttcctgaaccagctgggggacctggccctgtctgcggctcagtcggctcttctcttggggattggcctgcagcataagtctgtggaccagctggaaaaggagattgagctgccctcgggccagttgatgggacttttcaaccggatcatccgcaaagttgtgaagctatttaatgaagttcaggaaaaggccattgaggagcagatggtggcagcgaaggatgtggtcatggagcccacgatgaagaccctcagtgacgacctagatgaagcagcaaaggaatttcaggagaaacacaagaaggaagtagggaagctgaagagcatggacctctctgaatacataatccgtggggacgatgaagagtggaatgaagttttgaacaaagctgggccgaacgcctcgatcatcagcctgaaaagtgacaagaaaaggaagttagaggccaaacaagaacccaaacagagcaagaagttgaagaacagagagacaaagaacaaaaaagatatgaaactgaagcggaagaaatagtgaagagaaactcgggcatctgtgtttgatcatgggaagatactctcactaactgaaccctctctggctggactgttaaaagcaacgagaggccccggcacacctggaagctggccgcgaattcggcctctgggcctgtgtgtctgtgagctcaacctggctaaaggcagagtcactcccaaatgggtctctttagaacttgatggctgggcactgccatctctagaattgccacgagtctctctcttcctgcccagtccagggccctcctttcctataagttcatattttgctttgagccagctttttagtctcattcccacacatgtggaagccacgttgcctctcgaccgcctgaggcccttaagtacatcgctttctggtggtgcccaggaggctgctgctgggccgctgggtctctctttgtggacttgtacctggagcaggaggaactccagtccgtcccggcatccatggcagcccgcggttaggtgcgccagggtttgctgatgttgtcttgtgctgttccactcttggctccagcagacccactgtcccagaaaagcctgatcctgtagtttatgtagaatgccacatctgcgtcctcaagacctgtttcatccatttgggaaaagatgttgggaaaggccactttgctcgcaggggtgaggggaaggatagagaatctatttttaataaataacattctagaaagatgatcagctgcctgtgagtgttctgaaatccacgcacctggacgtttcttctggtgggtcttggctgcctggtggaatttggaaggtgttggtatcaaggtcaaaggtgggtgcctgaacctgcctttcaaagagggttttcttagaccgtggccagaagcagagtcacatgctcaaatggtcagagctggatgggactgtgcaagttgtccaggcatatcatcctacaggtaaggaagc

SEQ ID NO: 434576 - DNA, 4315 bp, Homo sapiens
gcggccgcagtcatgggtagattacaggattcccatctgtaagatcagtactgtgggggtggagggccaagcgaaaccaataaaataggtctgttggccgagtttcctcaacttaacggggatcggttaaattgaacacaaatcgttggatccgtcgcgtttcgcgtaaccaggctgacgctgaaaaccctggacctacgtgggcaggccctggggtgcggacatctattttgcccttcttagccgaggtactttagctgggatatgaagagtgaagaggcaaaccgcagccaacacccagctaccgcgagcagtgggactaaaatgcgcaaccgcagtggacatctaggcctcagctccgcttctggtggcttacgtcattactcagcgacagccttgaggaaggtcccttctcgctcgccatctctgcgactttaatgcgcttgcgcacgtgctgtctaccagttcctgagagggacgcgtgccgcggagccaggcttactacgtgacccggacaccaggcatacgctaggggcagtcagctgtgccttctctttcggagttgttccgtgctcccacgtgcttccccttctccactggctgggatcccccgggctcggggcgcagtaataatttttcaccatgcatcggaaaaaggtggataaccgaatccggattctcattgagaatggagtagctgagcggcaaagatctctctttgttgtagttggggatcgaggaaaagatcaggtggtaatacttcatcacatgttatccaaagcaactgtgaaggctcggccttcagtgctgtggtgttataagaaagagctggggtttagcagtcaccggaagaaaagaatgcgacagctgcagaagaaaataaagaatggaacactgaacataaagcaggacgacccctttgaactcttcatagcagccacaaacattcgctactgctactacaacgagacccacaagatcctgggcaataccttcggcatgtgtgtgctgcaggattttgaagccttaactccaaacttgctggccaggactgtagaaacagtggaaggtggtgggctagtggtcatcctcctacggaccatgaactcactcaagcaattgtacacagtgactatggatgtgcattccaggtacagaactgaggcccatcaggatgtggtgggaagatttaatgaaaggtttattctgtctctggcctcttgtaagaagtgtctcgtcattgatgaccagctcaacatcctgcccatctcctcccacgttgccaccatggaggccctgcctccccagactccggatgagagtcttggtccttctgatctggagctgagggagttgaaggagagcttgcaggacacccagcctgtgggtgtgttggtggactgctgtaagactctagaccaggccaaagctgtcttgaaatttatcgagggcatctctgaaaagaccctgaggagtactgttgcactcacagctgctcgaggacggggaaaatctgcagccctgggattggcgattgctggggcggtggcatttgggtactccaatatctttgttacctccccaagccctgataacctccatactctgtttgaatttgtatttaaaggatttgatgctctgcaatatcaggaacatctggattatgagattatccagtctctaaatcctgaatttaacaaagcagtgatcagagtgaatgtatttcgagaacacaggcagactattcagtatatacatcctgcagatgctgtgaagctgggccaggctgaactagttgtgattgatgaagctgccgccatccccctccccttggtgaagagcctacttggcccctaccttgttttcatggcatccaccatcaatggctatgagggcactggccggtcactgtccctcaagctaattcagcagctccgtcaacagagcgcccagagccaggtcagcaccactgctgagaataagaccacgacgacagccagattggcatcagcgcggacactgcatgaggtttccctccaggagtcaatccgatacgcccctggggatgcagtggagaagtggctgaatgacttgctgtgcctggattgcctcaacatcactcggatagtctcaggctgccccttgcctgaagcttgtgaactgtactatgttaatagagataccctcttttgctaccacaaggcctctgaagttttcctccaacggcttatggccctctacgtggcttctcactacaagaactctcccaatgatctccagatgctctccgatgcacctgctcaccatctcttctgccttctgcctcctgtgccccccacccagaatgcccttccagaagtgcttgctgttatccaggtgtgccttgaaggggagatttctcgccagtccatcttgaacagtctgtctcgaggcaagaaggcttcaggggacctgattccatggacagtgtcagaacagttccaagatccagactttggtggtctgtctggtggaagggtcgttcgcattgctgttcacccagattatcaagggatgggctatggcagccgtgctctgcagctgctgcagatgtactatgaaggcaggtttccttgtctggaggaaaaggtccttgagacaccacaggaaattcacaccgtaagcagcgaggctgtcagcttgttggaagaggtcatcactccccggaaggacctgcctcctttactcctcaaattgaatgagaggcctgccgaacgcctggattacctgggtgtttcctatggcttgacccccaggctcctcaagttctggaaacgagctggatttgttcctgtttatctgagacagaccccgaatgacctgaccggagagcactcgtgcatcatgctgaagacgctcactgatgaggatgaggctgaccagggaggctggcttgcagccttctggaaagatttccgacggcggttcctagccttgctctcctaccagttcagtaccttctctccttccctggctctgaacatcattcagaacaggaacatggggaagccagcccagcctgccctgagccgggaggagctggaagcactcttcctcccctatgacctgaagcggctggagatgtattcacggaatatggtggactatcacctcatcatggacatgatcccggccatctctcgcatctatttcctgaaccagctgggggacctggccctgtctgcggctcagtcggctcttctcttggggattggcctgcagcataagtctgtggaccagctggaaaaggagattgagctgccctcgggccagttgatgggacttttcaaccggatcatccgcaaagttgtgaagctatttaatgaagttcaggaaaaggccattgaggagcagatggtggcagcgaaggatgtggtcatggagcccacgatgaagaccctcagtgacgacctagatgaagcagcaaaggaatttcaggagaaacacaagaaggaagtagggaagctgaagagcatggacctctctgaatacataatccgtggggacgatgaagagtggaatgaagttttgaacaaagctgggccgaacgcctcgatcatcagcctgaaaagtgacaagaaaaggaagttagaggccaaacaagaacccaaacagagcaagaagttgaagaacagagagacaaagaacaaaaaagatatgaaactgaagcggaagaaatagtgaagagaaactcgggcatctgtgtttgatcatgggaagatactctcactaactgaaccctctctggctggactgttaaaagcaacgagaggccccggcacacctggaagctggccgcgaattcggcctctgggcctgtgtgtctgtgagctcaacctggctaaaggcagagtcactcccaaatgggtctctttagaacttgatggctgggcactgccatctctagaattgccacgagtctctctcttcctgcccagtccagggccctcctttcctataagttcatattttgctttgagccagctttttagtctcattcccacacatgtggaagccacgttgcctctcgaccgcctgaggcccttaagtacatcgctttctggtggtgcccaggaggctgctgctgggccgctgggtctctctttgtggacttgtacctggagcaggaggaactccagtccgtcccggcatccatggcagcccgcggttaggtgcgccagggtttgctgatgttgtcttgtgctgttccactcttggctccatgtacactgcccaagccgaatgtccagcacatgcgccgtactagtgacctagt

SEQ ID NO: 434577 - DNA, 1903 bp, Homo sapiens
gagaggagcacatatttccctcccgcacgtcccgagcaagaggcaggcccagaagagccagcagctcttctctgtgtctgtgacacttttgaggagattgcaggacagtgatctttgcagctgttgtgtgtgaactgaggtgatatgaggaaggtgaaggcgagggctgtttgagaagggcgcctacccccagcctggaaagaaggagaggcctgcggaagcactaagcctttcttctctgagtgtttacccttcatcaatgatgggttattcaaaaaaagggggttcttggtgccagttaaacctctgtgttgcccagaatgacctgaccggagagcactcgtgcatcatgctgaagacgctcactgatgaggatgaggctgaccagggaggctggcttgcagccttctggaaagatttccgacggcggttcctagccttgctctcctaccagttcagtaccttctctccttccctggctctgaacatcattcagaacaggaacatggggaagccagcccagcctgccctgagccgggaggagctggaagcactcttcctcccctatgacctgaagcggctggagatgtattcacggaatatggtggactatcacctcatcatggacatgatcccggccatctctcgcatctatttcctgaaccagctgggggacctggccctgtctgcggctcagtcggctcttctcttggggattggcctgcagcataagtctgtggaccagctggaaaaggagattgagctgccctcgggccagttgatgggacttttcaaccggatcatccgcaaagttgtgaagctatttaatgaagttcaggaaaaggccattgaggagcagatggtggcagcgaaggatgtggtcatggagcccacgatgaagaccctcagtgacgacctagatgaagcagcaaaggaatttcaggagaaacacaagaaggaagtagggaagctgaagagcatggacctctctgaatacataatccgtggggacgatgaagagtggaatgaagttttgaacaaagctgggccgaacgcctcgatcatcagcctgaaaagtgacaagaaaaggaagttagaggccaaacaagaacccaaacagagcaagaagttgaagaacagagagacaaagaacaaaaaagatatgaaactgaagcggaagaaatagtgaagagaaactcgggcatctgtgtttgatcatgggaagatactctcactaactgaaccctctctggctggactgttaaaagcaacgagaggccccggcacacctggaagctggccgcgaattcggcctctgggcctgtgtgtctgtgagctcaacctggctaaaggcagagtcactcccaaatgggtctctttagaacttgatggctgggcactgccatctctagaattgccacgagtctctctcttcctgcccagtccagggccctcctttcctataagttcatattttgctttgagccagctttttagtctcattcccacacatgtggaagccacgttgcctctcgaccgcctgaggcccttaagtacatcgctttctggtggtgcccaggaggctgctgctgggccgctgggtctctctttgtggacttgtacctggagcaggaggaactccagtccgtcccggcatccatggcagcccgcggttaggtgcgccagggtttgctgatgttgtcttgtgctgttccactcttggctccagcagacccactgtcccagaaaagcctgatcctgtagtttatgtagaatgccacatctgcgtcctcaagacctgtttcatccatttgggaaaagatgttgggaaaggccactttgctcgcaggggtgaggggaaggatagagaatctatttttaataaataacattctagaaagat

SEQ ID NO: 434578 - DNA, 1581 bp, Homo sapiens
actgaggagtaggggtttgggggagacaatgaggtgattgggggctgccggggatgcctccagacctctaactctgcgtgatggcaccccacagatttccgacggcggttcctagccttgctctcctaccagttcagtaccttctctccttccctggctctgaacatcattcagaacaggaacatggggaagccagcccagcctgccctgagccgggaggagctggaagcactcttcctcccctatgacctgaagcggctggagatgtattcacggaatatggtggactatcacctcatcatggacatgatcccggccatctctcgcatctatttcctgaaccagctgggggacctggccctgtctgcggctcagtcggctcttctcttggggattggcctgcagcataagtctgtggaccagctggaaaaggagattgagctgccctcgggccagttgatgggacttttcaaccggatcatccgcaaagttgtgaagctatttaatgaagttcaggaaaaggccattgaggagcagatggtggcagcgaaggatgtggtcatggagcccacgatgaagaccctcagtgacgacctagatgaagcagcaaaggaatttcaggagaaacacaagaaggaagtagggaagctgaagagcatggacctctctgaatacataatccgtggggacgatgaagagtggaatgaagttttgaacaaagctgggccgaacgcctcgatcatcagcctgaaaagtgacaagaaaaggaagttagaggccaaacaagaacccaaacagagcaagaagttgaagaacagagagacaaagaacaaaaaagatatgaaactgaagcggaagaaatagtgaagagaaactcgggcatctgtgtttgatcatgggaagatactctcactaactgaaccctctctggctggactgttaaaagcaacgagaggccccggcacacctggaagctggccgcgaattcggcctctgggcctgtgtgtctgtgagctcaacctggctaaaggcagagtcactcccaaatgggtctctttagaacttgatggctgggcactgccatctctagaattgccacgagtctctctcttcctgcccagtccagggccctcctttcctataagttcatattttgctttgagccagctttttagtctcattcccacacatgtggaagccacgttgcctctcgaccgcctgaggcccttaagtacatcgctttctggtggtgcccaggaggctgctgctgggccgctgggtctctctttgtggacttgtacctggagcaggaggaactccagtccgtcccggcatccatggcagcccgcggttaggtgcgccagggtttgctgatgttgtcttgtgctgttccactcttggctccagcagacccactgtcccagaaaagcctgatcctgtagtttatgtagaatgccacatctgcgtcctcaagacctgtttcatccatttgggaaaagatgttgggaaaggccactttgctcgcaggggtgaggggaaggatagagaatctatttttaataaataacattctagaaagat

SEQ ID NO: 434579 - DNA, 3716 bp, Homo sapiens
gcggccgcagtcatgggtagattacaggattcccatctgtaagatcagtactgtgggggtggagggccaagcgaaaccaataaaataggtctgttggccgagtttcctcaacttaacggggatcggttaaattgaacacaaatcgttggatccgtcgcgtttcgcgtaaccaggctgacgctgaaaaccctggacctacgtgggcaggccctggggtgcggacatctattttgcccttcttagccgaggtactttagctgggatatgaagagtgaagaggcaaaccgcagccaacacccagctaccgcgagcagtgggactaaaatgcgcaaccgcagtggacatctaggcctcagctccgcttctggtggcttacgtcattactcagcgacagccttgaggaaggtcccttctcgctcgccatctctgcgactttaatgcgcttgcgcacgtgctgtctaccagttcctgagagggacgcgtgccgcggagccaggcttactacgtgacccggacaccaggcatacgctaggggcagtcagctgtgccttctctttcggagttgttccgtgctcccacgtgcttccccttctccactggctgggatcccccgggctcggggcgcagtaataatttttcaccatgcatcggaaaaaggtggataaccgaatccggattctcattgagaatggagtagctgagcggcaaagatctctctttgttgtagttggggatcgaggaaaagatcaggtggtaatacttcatcacatgttatccaaagcaactgtgaaggctcggccttcagtgctgtggtgttataagaaagagctggggtttagcagtcaccggaagaaaagaatgcgacagctgcagaagaaaataaagaatggaacactgaacataaagcaggacgacccctttgaactcttcatagcagccacaaacattcgctactgctactacaacgagacccacaagatcctgggcaataccttcggcatgtgtgtgctgcaggattttgaagccttaactccaaacttgctggccaggactgtagaaacagtggaaggtggtgggctagtggtcatcctcctacggaccatgaactcactcaagcaattgtacacagtgactatggatgtgcattccaggtacagaactgaggcccatcaggatgtggtgggaagatttaatgaaaggtttattctgtctctggcctcttgtaagaagtgtctcgtcattgatgaccagctcaacatcctgcccatctcctcccacgttgccaccatggaggccctgcctccccagactccggatgagagtcttggtccttctgatctggagctgagggagttgaaggagagcttgcaggacacccagcctgtgggtgtgttggtggactgctgtaagactctagaccaggccaaagctgtcttgaaatttatcgagggcatctctgaaaagaccctgaggagtactgttgcactcacagctgctcgaggacggggaaaatctgcagccctgggattggcgattgctggggcggtggcatttgggtactccaatatctttgttacctccccaagccctgataacctccatactctgtttgaatttgtatttaaaggatttgatgctctgcaatatcaggaacatctggattatgagattatccagtctctaaatcctgaatttaacaaagcagtgatcagagtgaatgtatttcgagaacacaggcagactattcagtatatacatcctgcagatgctgtgaagctgggccaggctgaactagttgtgattgatgaagctgccgccatccccctccccttggtgaagagcctacttggcccctaccttgttttcatggcatccaccatcaatggctatgagggcactggccggtcactgtccctcaagctaattcagcagctccgtcaacagagcgcccagagccaggtcagcaccactgctgagaataagaccacgacgacagccagattggcatcagcgcggacactgcatgaggtttccctccaggagtcaatccgatacgcccctggggatgcagtggagaagtggctgaatgacttgctgtgcctggattgcctcaacatcactcggatagtctcaggctgccccttgcctgaagcttgtgaactgtactatgttaatagagataccctcttttgctaccacaaggcctctgaagttttcctccaacggcttatggccctctacgtggcttctcactacaagaactctcccaatgatctccagatgctctccgatgcacctgctcaccatctcttctgccttctgcctcctgtgccccccacccagaatgcccttccagaagtgcttgctgttatccaggtgtgccttgaaggggagatttctcgccagtccatcttgaacagtctgtctcgaggcaagaaggcttcaggggacctgattccatggacagtgtcagaacagttccaagatccagactttggtggtctgtctggtggaagggtcgttcgcattgctgttcacccagattatcaagggatgggctatggcagccgtgctctgcagctgctgcagatgtactatgaaggcaggtttccttgtctggaggaaaaggtccttgagacaccacaggaaattcacaccgtaagcagcgaggctgtcagcttgttggaagaggtcatcactccccggaaggacctgcctcctttactcctcaaattgaatgagaggcctgccgaacgcctggattacctgggtgtttcctatggcttgacccccaggctcctcaagttctggaaacgagctggatttgttcctgtttatctgagacagaccccgaatgacctgaccggagagcactcgtgcatcatgctgaagacgctcactgatgaggatgaggctgaccagggaggctggcttgcagccttctggaaagatttccgacggcggttcctagccttgctctcctaccagttcagtaccttctctccttccctggctctgaacatcattcagaacaggaacatggggaagccagcccagcctgccctgagccgggaggagctggaagcactcttcctcccctatgacctgaagcggctggagatgtattcacggaatatggtggactatcacctcatcatggacatgatcccggccatctctcgcatctatttcctgaaccagctgggggacctggccctgtctgcggctcagtcggctcttctcttggggattggcctgcagcataagtctgtggaccagctggaaaaggagattgagctgccctcgggccagttgatgggacttttcaaccggatcatccgcaaagttgtgaagctatttaatgaagttcaggaaaaggccattgaggagcagatggtggcagcgaaggatgtggtcatggagcccacgatgaagaccctcagtgacgacctagatgaagcagcaaaggaatttcaggagaaacacaagaaggaagtagggaagctgaagagcatggacctctctgaatacataatccgtggggacgatgaagagtggaatgaagttttgaacaaagctgggccgaacgcctcgatcatcagcctgaaaagctgtttcatccatttgggaaaagatgttgggaaaggccactttgctcgcaggggtgaggggaaggatagagaatctatttttaataaataacattctagaaagat

SEQ ID NO: 434580 - DNA, 888 bp, Homo sapiens
  misc_feature (44)..(44): n is a, c, g, or t
  misc_feature (61)..(61): n is a, c, g, or t
  misc_feature (80)..(80): n is a, c, g, or t
  misc_feature (87)..(87): n is a, c, g, or t
  misc_feature (94)..(94): n is a, c, g, or t
  misc_feature (98)..(98): n is a, c, g, or t
  misc_feature (105)..(105): n is a, c, g, or t
  misc_feature (107)..(107): n is a, c, g, or t
  misc_feature (114)..(114): n is a, c, g, or t
  misc_feature (137)..(137): n is a, c, g, or t
  misc_feature (139)..(139): n is a, c, g, or t
  misc_feature (164)..(164): n is a, c, g, or t
  misc_feature (214)..(214): n is a, c, g, or t
  misc_feature (242)..(242): n is a, c, g, or t
  misc_feature (250)..(250): n is a, c, g, or t
  misc_feature (255)..(255): n is a, c, g, or t
  misc_feature (262)..(262): n is a, c, g, or t
  misc_feature (271)..(271): n is a, c, g, or t
ttagaggcccaaatcaagaaaccccaaaacagagccaagcaagnttgcaagcaacagcagngcacaaaagcaacaaaaanaagaatntgcaaanctgnaagccgnanagcaaantagctgcaagcacaaaacttcgngncaatctgctgcttgtgcatccatgnggcaagcataactcttcaacttaatctgcaaccccctctactgggcgtgncactgcttaaaaagccaaacgcagcagnccccccgncaacnaccctgncagagcctnccccgccgcaatttcgcccctcctggcgccctgctgctgctctgctgcagctcaacctggctaaaggcagagtcactcccaaatgggtctctttagaacttgatggctgggcactgccatctctagaattgccacgagtctctctcttcctgcccagtccagggccctcctttcctataagttcatattttgctttgagccagctttttagtctcattcccacacatgtggaagccacgttgcctctcgaccgcctgaggcccttaagtacatcgctttctggtggtgcccaggaggctgctgctgggccgctgggtctctctttgtggacttgtacctggagcaggaggaactccagtccgtcccggcatccatggcagcccgcggttaggtgcgccagggtttgctgatgttgtcttgtgctgttccactcttggctccagcagacccactgtcccagaaaagcctgatcctgtagtttatgtagaatgccacatctgcgtcctcaagacctgtttcatccatttgggaaaagatgttgggaaaggccactttgctcgcaggggtgaggggaaggatagagaatctatttttaataaataacattctagaaagat

SEQ ID NO: 434581 - DNA, 340 bp, Homo sapiens
gaaggttctctagaagcaatgcaggggagtcactgtggcttagactgagagcagctctcttccctcggcctcttccccttcacgtttgctcctagatgggctatggcagccgtgctctgcagctgctgcagatgtactatgaaggcaggtttccttgtctggaggaaaaggtccttgagacaccacaggaaattcacaccgtaagcagcgaggtaagcatctttcgacagacctcctgtgtcctggttcttgggaggataattctctgggtttttaggggcatcaacaaaaaccagtccagagctttggacccctctctcattttcttctgctgctttct

SEQ ID NO: 434582 - DNA, 3394 bp, Homo sapiens
gcggccgcagtcatgggtagattacaggattcccatctgtaagatcagtactgtgggggtggagggccaagcgaaaccaataaaataggtctgttggccgagtttcctcaacttaacggggatcggttaaattgaacacaaatcgttggatccgtcgcgtttcgcgtaaccaggctgacgctgaaaaccctggacctacgtgggcaggccctggggtgcggacatctattttgcccttcttagccgaggtactttagctgggatatgaagagtgaagaggcaaaccgcagccaacacccagctaccgcgagcagtgggactaaaatgcgcaaccgcagtggacatctaggcctcagctccgcttctggtggcttacgtcattactcagcgacagccttgaggaaggtcccttctcgctcgccatctctgcgactttaatgcgcttgcgcacgtgctgtctaccagttcctgagagggacgcgtgccgcggagccaggcttactacgtgacccggacaccaggcatacgctaggggcagtcagctgtgccttctctttcggagttgttccgtgctcccacgtgcttccccttctccactggctgggatcccccgggctcggggcgcagtaataatttttcaccatgcatcggaaaaaggtggataaccgaatccggattctcattgagaatggagtagctgagcggcaaagatctctctttgttgtagttggggatcgaggaaaagatcaggtggtaatacttcatcacatgttatccaaagcaactgtgaaggctcggccttcagtgctgtggtgttataagaaagagctggggtttagcagtcaccggaagaaaagaatgcgacagctgcagaagaaaataaagaatggaacactgaacataaagcaggacgacccctttgaactcttcatagcagccacaaacattcgctactgctactacaacgagacccacaagatcctgggcaataccttcggcatgtgtgtgctgcaggattttgaagccttaactccaaacttgctggccaggactgtagaaacagtggaaggtggtgggctagtggtcatcctcctacggaccatgaactcactcaagcaattgtacacagtgactatggatgtgcattccaggtacagaactgaggcccatcaggatgtggtgggaagatttaatgaaaggtttattctgtctctggcctcttgtaagaagtgtctcgtcattgatgaccagctcaacatcctgcccatctcctcccacgttgccaccatggaggccctgcctccccagactccggatgagagtcttggtccttctgatctggagctgagggagttgaaggagagcttgcaggacacccagcctgtgggtgtgttggtggactgctgtaagactctagaccaggccaaagctgtcttgaaatttatcgagggcatctctgaaaagaccctgaggagtactgttgcactcacagctgctcgaggacggggaaaatctgcagccctgggattggcgattgctggggcggtggcatttgggtactccaatatctttgttacctccccaagccctgataacctccatactctgtttgaatttgtatttaaaggatttgatgctctgcaatatcaggaacatctggattatgagattatccagtctctaaatcctgaatttaacaaagcagtgatcagagtgaatgtatttcgagaacacaggcagactattcagtatatacatcctgcagatgctgtgaagctgggccaggctgaactagttgtgattgatgaagctgccgccatccccctccccttggtgaagagcctacttggcccctaccttgttttcatggcatccaccatcaatggctatgagggcactggccggtcactgtccctcaagctaattcagcagctccgtcaacagagcgcccagagccaggtcagcaccactgctgagaataagaccacgacgacagccagattggcatcagcgcggacactgcatgaggtttccctccaggagtcaatccgatacgcccctggggatgcagtggagaagtggctgaatgacttgctgtgcctggattgcctcaacatcactcggatagtctcaggctgccccttgcctgaagcttgtgaactgtactatgttaatagagataccctcttttgctaccacaaggcctctgaagttttcctccaacggcttatggccctctacgtggcttctcactacaagaactctcccaatgatctccagatgctctccgatgcacctgctcaccatctcttctgccttctgcctcctgtgccccccacccagaatgcccttccagaagtgcttgctgttatccaggtgtgccttgaaggggagatttctcgccagtccatcttgaacagtctgtctcgaggcaagaaggcttcaggggacctgattccatggacagtgtcagaacagttccaagatccagactttggtggtctgtctggtggaagggtcgttcgcattgctgttcacccagattatcaagggatgggctatggcagccgtgctctgcagctgctgcagatgtactatgaaggcaggtttccttgtctggaggaaaaggtccttgagacaccacaggaaattcacaccgtaagcagcgaggctgtcagcttgttggaagaggtcatcactccccggaaggacctgcctcctttactcctcaaattgaatgagaggcctgccgaacgcctggattacctgggtgtttcctatggcttgacccccaggctcctcaagttctggaaacgagctggatttgttcctgtttatctgagacagaccccgaatgacctgaccggagagcactcgtgcatcatgctgaagacgctcactgatgaggatgaggctgaccagggaggctggcttgcagccttctggaaagatttccgacggcggttcctagccttgctctcctaccagttcagtaccttctctccttccctggctctgaacatcattcagaacaggaacatggggaagccagcccagcctgccctgagccgggaggagctggaagcactcttcctcccctatgacctgaagcggctggagcaggaggaactccagtccgtcccggcatccatggcagcccgcggttaggtgcgccagggtttgctgatgttgtcttgtgctgttccactcttggctccagcagacccactgtcccagaaaagcctgatcctgtagtttatgtagaatgccacatctgcgtcctcaagacctgtttcatccatttgggaaaagatgttgggaaaggccactttgctcgcaggggtgaggggaaggatagagaatctatttttaataaataacattctagaaagat

SEQ ID NO: 434583 - DNA, 3879 bp, Homo sapiens
  misc_feature (3877)..(3878): n is a, c, g, or t
actgacagacttcagaatttattagggtttgtaatttccaggttccaaagcgcagcaagggaaagggcctggctgggtagtacgttacacccggaagtaaagagacgcatacaccgttgggtgcactttatagtctggctggcaaacaagcgacaccgacgcgcagagttaagtgctgggacttcccaagcctggaaagcagaccgtgtctctgcaactacgcggctgccacgagcgctgagcggccgggcatttggcctcgaggaggaggcactgtaagggcggcgcaagagggcggaacgcgggacgccaggcaccctagctcccgacggacgcagttttcagttgcacgggcgagctccgggccggctgcggagcgactccccgccgccaagtgggcggcgtggctgtcgggaaagaagggctggggcctgccgttcttcctcccgagtatcccctccagctggacgaccccacgctgcagcacgggcttccggcttctctcctcagtggccaattcgagggcacagcgggctccggaggcgcggcggcaagcctatcccgcctcccaaccacagcctccagcacccgagagaacggccgcccacagcacacgttctccggacaggagggcgaaggcccaagacctggagagatggtcagctctcaaaaaaggcacaaacaattgaaggatggataccatggcatatgttaaaagcgtgttgaaaggaaaataagaaagccaggaatctcaggatgaatcagtctagatcgagatcagatggtggcagtgaagaaaccttacctcaagaccataatcatcatgaaaatgagagaagatggcagcaagagcgtctccacagagaagaggcctattatcagtttattaatgaactcaatgatgaagattatcggcttatgagagaccataatcttttaggcacccctggagaaataacatcagaagaactgcaacagcggttagatggcgtcaaggaacaactagcatctcagcctgacttgagagatggaacgaattacagagactcagaagtccctagagaaagttcacatgaagattctcttctagaatggttgaacacctttcggcgcacaggaaatgcaactcgaagtggacaaaatgggaaccaaacttggagagctgtgagtcgaacaaacccgaacaatggagagtttcggtttagtttggaaatccacgtaaatcatgaaaatagaggatttgaaattcatggagaagattatacagacattccactttcagatagtaacagagatcatactgcaaataggcaacaaaggtcaactagtcctgtggctaggcgaacaagaagccaaacctcagtgaatttcaatggtagtagttccaacattccaaggactaggcttgcttcaagggggcaaaatccagctgaaggatctttctcaacattgggaaggttaagaaatggaattgggggagcagctggcattcctcgagctaacgcttcacgcactaatttcagtagtcacacaaaccaatcaggtggtagtgaactcaggcaaagggaggggcaacggtttggagcagcacatgtttgggaaaatggggctagaagtaatgttacagtgaggaatacaaaccaaagattagagccaataagattacgatctacttccaatagtcgaagccgttcaccaattcagagacagagtggcactgtttatcataattcccaaagggaaagtagaccagtacagcaaaccactagaagatctgttaggaggagaggtagaactcgagtctttttagagcaagatagagaacgagaacgcagaggtactgcatataccccattctctaattcaaggcttgtgtcaagaataacagtagaagaaggagaagaatccagcagatcctcaactgctgtacgacgacatccaacaatcacactggaccttcaagtgagaaggatccgtcctggagaaaatagagatcgggatagtattgcaaatagaactcgatccagagtagggctagcagaaaatacagtcactattgaaagcaatagtgggggctttcgccgaaccatttctcgtttagagcggtcaggtattcgaacctatgttagtaccataacagttcctcttcgtaggatttctgagaatgagcttgttgagccatcatcagtggctcttcggtcaattttaaggcagatcatgactgggtttggagaactgagttctctaatggaggccgattctgagtcagaacttcaaagaaatggccagcatttaccagacatgcactcagaactgagtaacttaggtacagataacaacaggagccagcacagggaaggttcctctcaagacaggcaggcccaaggagacagcactgaaatgcatggtgaaaacgagaccacccagcctcatactcgaaacagtgacagtaggggtggcaggcagttgcgaaatccaaacaatttagttgaaactggaacactacccattcttcgccttgctcacttttttttactaaatgaaagtgatgatgatgatcgaatacgtggtttaaccaaagagcagattgacaatctttccaccaggcactatgagcataacagtattgatagtgaactaggtaaaatctgtagtgtttgtattagtgactatgtaactggaaacaagctcaggcaattaccttgcatgcatgaatttcacattcattgtattgaccgatggctctcagagaattgcacttgtccgatctgtcggcagcctgttttagggtctaacatagcaaacaatgggtaaggtgatgggatctactcaaatactgttttttagtagaactgaatgttcaagcattgttttgctgagttatttgtgattagctaaccaggatgaaaaataacagattatatatagtttgaactatttttcgtgtgcttttttaaacttgttaaaaagaaatttatataaaatttaaaatacaaatgttaaattatccagaaatacagaatagttaatattgctagaaccaaataacctctaaaatgtttttattttggtaattttgtcatgctaagcacttttgtatctgcacaattcagtaggttaagaatcaatcttctttttcttaatagtacagcagactttagcttcaagtttcataggcttagtacttatatctagacatttgtgtctaaataagcttttcattaactttttattttaaggacagtatcttttcatgaaagagtatttggctgaatgtttgctatatatatgttacttgaaatgttaaatttaatatgcagcataccataggtgtatatataggtatataattttaaggttaaaatattcagtctacaagtttggttcttatttaagcttttgggctaatactgcatatggcacaatgtttaatattggcaagttcatctcagagaaaggggattcagatataattttaaagtagagataatttactgaagcgtctctgacaatctaacttattagacagcaagcaatatataatactgaaaaagtattcagaaatggaaaatttacatcatataggttatttaacttgtgttcagcctttttgtaacttttttgaaagtgcaaacaattctttggattattaaataaggtatacagtatgcatggtttctcaaatttagttttaaaatctaaaagtctataaagaatcagatgcataggcaatatgttaagttcacttggaggctaaaaatctccagtgaaaacaaaacgaaaacctttaagagaatgtagagtttatataaacacaaagtatgcattgaagatctgtttctaccaataaacattaaaacaaagactgtaaaaaaanna

SEQ ID NO: 434584 - DNA, 3416 bp, Homo sapiens
  misc_feature (3414)..(3415): n is a, c, g, or t
gggggaaagaaaccagtagcgggacggagggcgggggtggcaagaaagtcaaggtttagaagtaagccggagacgcctaaccctggtaacatccgaatgggaacgggataggaaggaaggcctttgagagaggaggcgtaaacccaggaacagtgacagtgtaggacgaaaggcctaagtttgttgcggaagatggtcagctctcaaaaaaggcacaaacaattgaaggatggataccatggcatatgttaaaagcgtgttgaaaggaaaataagaaagccaggaatctcaggatgaatcagtctagatcgagatcagatggtggcagtgaagaaaccttacctcaagaccataatcatcatgaaaatgagagaagatggcagcaagagcgtctccacagagaagaggcctattatcagtttattaatgaactcaatgatgaagattatcggcttatgagagaccataatcttttaggcacccctggagaaataacatcagaagaactgcaacagcggttagatggcgtcaaggaacaactagcatctcagcctgacttgagagatggaacgaattacagagactcagaagtccctagagaaagttcacatgaagattctcttctagaatggttgaacacctttcggcgcacaggaaatgcaactcgaagtggacaaaatgggaaccaaacttggagagctgtgagtcgaacaaacccgaacaatggagagtttcggtttagtttggaaatccacgtaaatcatgaaaatagaggatttgaaattcatggagaagattatacagacattccactttcagatagtaacagagatcatactgcaaataggcaacaaaggtcaactagtcctgtggctaggcgaacaagaagccaaacctcagtgaatttcaatggtagtagttccaacattccaaggactaggcttgcttcaagggggcaaaatccagctgaaggatctttctcaacattgggaaggttaagaaatggaattgggggagcagctggcattcctcgagctaacgcttcacgcactaatttcagtagtcacacaaaccaatcaggtggtagtgaactcaggcaaagggaggggcaacggtttggagcagcacatgtttgggaaaatggggctagaagtaatgttacagtgaggaatacaaaccaaagattagagccaataagattacgatctacttccaatagtcgaagccgttcaccaattcagagacagagtggcactgtttatcataattcccaaagggaaagtagaccagtacagcaaaccactagaagatctgttaggaggagaggtagaactcgagtctttttagagcaagatagagaacgagaacgcagaggtactgcatataccccattctctaattcaaggcttgtgtcaagaataacagtagaagaaggagaagaatccagcagatcctcaactgctgtacgacgacatccaacaatcacactggaccttcaagtgagaaggatccgtcctggagaaaatagagatcgggatagtattgcaaatagaactcgatccagagtagggctagcagaaaatacagtcactattgaaagcaatagtgggggctttcgccgaaccatttctcgtttagagcggtcaggtattcgaacctatgttagtaccataacagttcctcttcgtaggatttctgagaatgagcttgttgagccatcatcagtggctcttcggtcaattttaaggcagatcatgactgggtttggagaactgagttctctaatggaggccgattctgagtcagaacttcaaagaaatggccagcatttaccagacatgcactcagaactgagtaacttaggtacagataacaacaggagccagcacagggaaggttcctctcaagacaggcaggcccaaggagacagcactgaaatgcatggtgaaaacgagaccacccagcctcatactcgaaacagtgacagtaggggtggcaggcagttgcgaaatccaaacaatttagttgaaactggaacactacccattcttcgccttgctcacttttttttactaaatgaaagtgatgatgatgatcgaatacgtggtttaaccaaagagcagattgacaatctttccaccaggcactatgagcataacagtattgatagtgaactaggtaaaatctgtagtgtttgtattagtgactatgtaactggaaacaagctcaggcaattaccttgcatgcatgaatttcacattcattgtattgaccgatggctctcagagaattgcacttgtccgatctgtcggcagcctgttttagggtctaacatagcaaacaatgggtaaggtgatgggatctactcaaatactgttttttagtagaactgaatgttcaagcattgttttgctgagttatttgtgattagctaaccaggatgaaaaataacagattatatatagtttgaactatttttcgtgtgcttttttaaacttgttaaaaagaaatttatataaaatttaaaatacaaatgttaaattatccagaaatacagaatagttaatattgctagaaccaaataacctctaaaatgtttttattttggtaattttgtcatgctaagcacttttgtatctgcacaattcagtaggttaagaatcaatcttctttttcttaatagtacagcagactttagcttcaagtttcataggcttagtacttatatctagacatttgtgtctaaataagcttttcattaactttttattttaaggacagtatcttttcatgaaagagtatttggctgaatgtttgctatatatatgttacttgaaatgttaaatttaatatgcagcataccataggtgtatatataggtatataattttaaggttaaaatattcagtctacaagtttggttcttatttaagcttttgggctaatactgcatatggcacaatgtttaatattggcaagttcatctcagagaaaggggattcagatataattttaaagtagagataatttactgaagcgtctctgacaatctaacttattagacagcaagcaatatataatactgaaaaagtattcagaaatggaaaatttacatcatataggttatttaacttgtgttcagcctttttgtaacttttttgaaagtgcaaacaattctttggattattaaataaggtatacagtatgcatggtttctcaaatttagttttaaaatctaaaagtctataaagaatcagatgcataggcaatatgttaagttcacttggaggctaaaaatctccagtgaaaacaaaacgaaaacctttaagagaatgtagagtttatataaacacaaagtatgcattgaagatctgtttctaccaataaacattaaaacaaagactgtaaaaaaanna

SEQ ID NO: 434585 - DNA, 1019 bp, Homo sapiens
gggggaaagaaaccagtagcgggacggagggcgggggtggcaagaaagtcaaggtttagaagtaagccggagacgcctaaccctggtaacatccgaatgggaacgggataggaaggaaggcctttgagagaggaggcgtaaacccaggaacagtgacagtgtaggacgaaaggcctaagtttgttgcggaagatggtcagctctcaaaaaaggcacaaacaattgaaggatggataccatggcatatgttaaaagcgtgttgaaaggaaaataagaaagccaggaatctcaggatgaatcagtctagatcgagatcagatggtggcagtgaagaaaccttacctcaagaccataatcatcatgaaaatgagagaagatggcagcaagagcgtctccacagagaagaggcctattatcagtttattaatgaactcaatgatgaagattatcggcttatgagagaccataatcttttaggcacccctggtaagagatgggtaaaagaggaaacacccttttttcatcatttagatggaaggatttcaagataaggagaattggtattctttttccttgcttctctttatgaaaatatagtatattgtttttgtgagtttaagaactttttagtataataaagtagaaaatcactggcttctgtattttataaggtgaaaataggggacatggagcactattatacaaatgccaaactaagaaacaggttaatgtacataatggtgttaagtatttacatatatggtcctatttgtaatttttatacaaataaaatatgacttaaaacccaatttgaactcatttggggtattataatttatttattcagctgaattaatagctccccccaaagcccaatgtgttccataaagtttttacaaatgaactaatggaaatttgtatgtttatatattgtgtgtttgtatattgatgacccatataatgaagtatttgggataaaattcaagtaaatatttgaagttttctctataaatgctccc

SEQ ID NO: 434586 - DNA, 4100 bp, Homo sapiens
  misc_feature (4098)..(4099): n is a, c, g, or t
actgacagacttcagaatttattagggtttgtaatttccaggttccaaagcgcagcaagggaaagggcctggctgggtagtacgttacacccggaagtaaagagacgcatacaccgttgggtgcactttatagtctggctggcaaacaagcgacaccgacgcgcagagttaagtgctgggacttcccaagcctggaaagcagaccgtgtctctgcaactacgcggctgccacgagcgctgagcggccgggcatttggcctcgaggaggaggcactgtaagggcggcgcaagagggcggaacgcgggacgccaggcaccctagctcccgacggacgcagttttcagttgcacgggcgagctccgggccggctgcggagcgactccccgccgccaagtgggcggcgtggctgtcgggaaagaagggctggggcctgccgttcttcctcccgagtatcccctccagctggacgaccccacgctgcagcacgggcttccggcttctctcctcagtggccaattcgagggcacagcgggctccggaggcgcggcggcaagcctatcccgcctcccaaccacagcctccagcacccgagagaacggccgcccacagcacacgttctccggacaggagggcgaaggcccaagacctggagaggtgggctcgagggaaagatctgggtcccaccactacttcctggagacgccggggaaagcaggccatccttcgagccacccatctcttctccgattggttaactgccttcttattgcgctccgctggctggtgattggttgggatgcaccgtctatcacctgcttccttgtgagaatctaggtctctaagggaagcgttacttgaggctcggttgggaagagatggtcagctctcaaaaaaggcacaaacaattgaaggatggataccatggcatatgttaaaagcgtgttgaaaggaaaataagaaagccaggaatctcaggatgaatcagtctagatcgagatcagatggtggcagtgaagaaaccttacctcaagaccataatcatcatgaaaatgagagaagatggcagcaagagcgtctccacagagaagaggcctattatcagtttattaatgaactcaatgatgaagattatcggcttatgagagaccataatcttttaggcacccctggagaaataacatcagaagaactgcaacagcggttagatggcgtcaaggaacaactagcatctcagcctgacttgagagatggaacgaattacagagactcagaagtccctagagaaagttcacatgaagattctcttctagaatggttgaacacctttcggcgcacaggaaatgcaactcgaagtggacaaaatgggaaccaaacttggagagctgtgagtcgaacaaacccgaacaatggagagtttcggtttagtttggaaatccacgtaaatcatgaaaatagaggatttgaaattcatggagaagattatacagacattccactttcagatagtaacagagatcatactgcaaataggcaacaaaggtcaactagtcctgtggctaggcgaacaagaagccaaacctcagtgaatttcaatggtagtagttccaacattccaaggactaggcttgcttcaagggggcaaaatccagctgaaggatctttctcaacattgggaaggttaagaaatggaattgggggagcagctggcattcctcgagctaacgcttcacgcactaatttcagtagtcacacaaaccaatcaggtggtagtgaactcaggcaaagggaggggcaacggtttggagcagcacatgtttgggaaaatggggctagaagtaatgttacagtgaggaatacaaaccaaagattagagccaataagattacgatctacttccaatagtcgaagccgttcaccaattcagagacagagtggcactgtttatcataattcccaaagggaaagtagaccagtacagcaaaccactagaagatctgttaggaggagaggtagaactcgagtctttttagagcaagatagagaacgagaacgcagaggtactgcatataccccattctctaattcaaggcttgtgtcaagaataacagtagaagaaggagaagaatccagcagatcctcaactgctgtacgacgacatccaacaatcacactggaccttcaagtgagaaggatccgtcctggagaaaatagagatcgggatagtattgcaaatagaactcgatccagagtagggctagcagaaaatacagtcactattgaaagcaatagtgggggctttcgccgaaccatttctcgtttagagcggtcaggtattcgaacctatgttagtaccataacagttcctcttcgtaggatttctgagaatgagcttgttgagccatcatcagtggctcttcggtcaattttaaggcagatcatgactgggtttggagaactgagttctctaatggaggccgattctgagtcagaacttcaaagaaatggccagcatttaccagacatgcactcagaactgagtaacttaggtacagataacaacaggagccagcacagggaaggttcctctcaagacaggcaggcccaaggagacagcactgaaatgcatggtgaaaacgagaccacccagcctcatactcgaaacagtgacagtaggggtggcaggcagttgcgaaatccaaacaatttagttgaaactggaacactacccattcttcgccttgctcacttttttttactaaatgaaagtgatgatgatgatcgaatacgtggtttaaccaaagagcagattgacaatctttccaccaggcactatgagcataacagtattgatagtgaactaggtaaaatctgtagtgtttgtattagtgactatgtaactggaaacaagctcaggcaattaccttgcatgcatgaatttcacattcattgtattgaccgatggctctcagagaattgcacttgtccgatctgtcggcagcctgttttagggtctaacatagcaaacaatgggtaaggtgatgggatctactcaaatactgttttttagtagaactgaatgttcaagcattgttttgctgagttatttgtgattagctaaccaggatgaaaaataacagattatatatagtttgaactatttttcgtgtgcttttttaaacttgttaaaaagaaatttatataaaatttaaaatacaaatgttaaattatccagaaatacagaatagttaatattgctagaaccaaataacctctaaaatgtttttattttggtaattttgtcatgctaagcacttttgtatctgcacaattcagtaggttaagaatcaatcttctttttcttaatagtacagcagactttagcttcaagtttcataggcttagtacttatatctagacatttgtgtctaaataagcttttcattaactttttattttaaggacagtatcttttcatgaaagagtatttggctgaatgtttgctatatatatgttacttgaaatgttaaatttaatatgcagcataccataggtgtatatataggtatataattttaaggttaaaatattcagtctacaagtttggttcttatttaagcttttgggctaatactgcatatggcacaatgtttaatattggcaagttcatctcagagaaaggggattcagatataattttaaagtagagataatttactgaagcgtctctgacaatctaacttattagacagcaagcaatatataatactgaaaaagtattcagaaatggaaaatttacatcatataggttatttaacttgtgttcagcctttttgtaacttttttgaaagtgcaaacaattctttggattattaaataaggtatacagtatgcatggtttctcaaatttagttttaaaatctaaaagtctataaagaatcagatgcataggcaatatgttaagttcacttggaggctaaaaatctccagtgaaaacaaaacgaaaacctttaagagaatgtagagtttatataaacacaaagtatgcattgaagatctgtttctaccaataaacattaaaacaaagactgtaaaaaaanna

SEQ ID NO: 434587 - DNA, 4047 bp, Homo sapiens
  misc_feature (4045)..(4046): n is a, c, g, or t
actgacagacttcagaatttattagggtttgtaatttccaggttccaaagcgcagcaagggaaagggcctggctgggtagtacgttacacccggaagtaaagagacgcatacaccgttgggtgcactttatagtctggctggcaaacaagcgacaccgacgcgcagagttaagtgctgggacttcccaagcctggaaagcagaccgtgtctctgcaactacgcggctgccacgagcgctgagcggccgggcatttggcctcgaggaggaggcactgtaagggcggcgcaagagggcggaacgcgggacgccaggcaccctagctcccgacggacgcagttttcagttgcacgggcgagctccgggccggctgcggagcgactccccgccgccaagtgggcggcgtggctgtcgggaaagaagggctggggcctgccgttcttcctcccgagtatcccctccagctggacgaccccacgctgcagcacgggcttccggcttctctcctcagtggccaattcgagggcacagcgggctccggaggcgcggcggcaagcctatcccgcctcccaaccacagcctccagcacccgagagaacggccgcccacagcacacgttctccggacaggagggcgaaggcccaagacctggagaggtgggctcgagggaaagatctgggtcccaccactacttcctggagacgccggggaaagcaggccatccttcgagccacccatctcttctccgattggttaactgccttcttattgcgctccgctggctggtgattggttgggatgcaccgtctatcacctgcttccttatggtcagctctcaaaaaaggcacaaacaattgaaggatggataccatggcatatgttaaaagcgtgttgaaaggaaaataagaaagccaggaatctcaggatgaatcagtctagatcgagatcagatggtggcagtgaagaaaccttacctcaagaccataatcatcatgaaaatgagagaagatggcagcaagagcgtctccacagagaagaggcctattatcagtttattaatgaactcaatgatgaagattatcggcttatgagagaccataatcttttaggcacccctggagaaataacatcagaagaactgcaacagcggttagatggcgtcaaggaacaactagcatctcagcctgacttgagagatggaacgaattacagagactcagaagtccctagagaaagttcacatgaagattctcttctagaatggttgaacacctttcggcgcacaggaaatgcaactcgaagtggacaaaatgggaaccaaacttggagagctgtgagtcgaacaaacccgaacaatggagagtttcggtttagtttggaaatccacgtaaatcatgaaaatagaggatttgaaattcatggagaagattatacagacattccactttcagatagtaacagagatcatactgcaaataggcaacaaaggtcaactagtcctgtggctaggcgaacaagaagccaaacctcagtgaatttcaatggtagtagttccaacattccaaggactaggcttgcttcaagggggcaaaatccagctgaaggatctttctcaacattgggaaggttaagaaatggaattgggggagcagctggcattcctcgagctaacgcttcacgcactaatttcagtagtcacacaaaccaatcaggtggtagtgaactcaggcaaagggaggggcaacggtttggagcagcacatgtttgggaaaatggggctagaagtaatgttacagtgaggaatacaaaccaaagattagagccaataagattacgatctacttccaatagtcgaagccgttcaccaattcagagacagagtggcactgtttatcataattcccaaagggaaagtagaccagtacagcaaaccactagaagatctgttaggaggagaggtagaactcgagtctttttagagcaagatagagaacgagaacgcagaggtactgcatataccccattctctaattcaaggcttgtgtcaagaataacagtagaagaaggagaagaatccagcagatcctcaactgctgtacgacgacatccaacaatcacactggaccttcaagtgagaaggatccgtcctggagaaaatagagatcgggatagtattgcaaatagaactcgatccagagtagggctagcagaaaatacagtcactattgaaagcaatagtgggggctttcgccgaaccatttctcgtttagagcggtcaggtattcgaacctatgttagtaccataacagttcctcttcgtaggatttctgagaatgagcttgttgagccatcatcagtggctcttcggtcaattttaaggcagatcatgactgggtttggagaactgagttctctaatggaggccgattctgagtcagaacttcaaagaaatggccagcatttaccagacatgcactcagaactgagtaacttaggtacagataacaacaggagccagcacagggaaggttcctctcaagacaggcaggcccaaggagacagcactgaaatgcatggtgaaaacgagaccacccagcctcatactcgaaacagtgacagtaggggtggcaggcagttgcgaaatccaaacaatttagttgaaactggaacactacccattcttcgccttgctcacttttttttactaaatgaaagtgatgatgatgatcgaatacgtggtttaaccaaagagcagattgacaatctttccaccaggcactatgagcataacagtattgatagtgaactaggtaaaatctgtagtgtttgtattagtgactatgtaactggaaacaagctcaggcaattaccttgcatgcatgaatttcacattcattgtattgaccgatggctctcagagaattgcacttgtccgatctgtcggcagcctgttttagggtctaacatagcaaacaatgggtaaggtgatgggatctactcaaatactgttttttagtagaactgaatgttcaagcattgttttgctgagttatttgtgattagctaaccaggatgaaaaataacagattatatatagtttgaactatttttcgtgtgcttttttaaacttgttaaaaagaaatttatataaaatttaaaatacaaatgttaaattatccagaaatacagaatagttaatattgctagaaccaaataacctctaaaatgtttttattttggtaattttgtcatgctaagcacttttgtatctgcacaattcagtaggttaagaatcaatcttctttttcttaatagtacagcagactttagcttcaagtttcataggcttagtacttatatctagacatttgtgtctaaataagcttttcattaactttttattttaaggacagtatcttttcatgaaagagtatttggctgaatgtttgctatatatatgttacttgaaatgttaaatttaatatgcagcataccataggtgtatatataggtatataattttaaggttaaaatattcagtctacaagtttggttcttatttaagcttttgggctaatactgcatatggcacaatgtttaatattggcaagttcatctcagagaaaggggattcagatataattttaaagtagagataatttactgaagcgtctctgacaatctaacttattagacagcaagcaatatataatactgaaaaagtattcagaaatggaaaatttacatcatataggttatttaacttgtgttcagcctttttgtaacttttttgaaagtgcaaacaattctttggattattaaataaggtatacagtatgcatggtttctcaaatttagttttaaaatctaaaagtctataaagaatcagatgcataggcaatatgttaagttcacttggaggctaaaaatctccagtgaaaacaaaacgaaaacctttaagagaatgtagagtttatataaacacaaagtatgcattgaagatctgtttctaccaataaacattaaaacaaagactgtaaaaaaanna

SEQ ID NO: 434588 - DNA, 1618 bp, Homo sapiens
  misc_feature (1616)..(1617): n is a, c, g, or t
gccagcacagggaaggttcctgttgttatctgtacctaagttactcagttctgagtgcatgtctggtacagataacaacaggagccagcacagggaaggttcctctcaagacaggcaggcccaaggagacagcactgaaatgcatggtgaaaacgagaccacccagcctcatactcgaaacagtgacagtaggggtggcaggcagttgcgaaatccaaacaatttagttgaaactggaacactacccattcttcgccttgctcacttttttttactaaatgaaagtgatgatgatgatcgaatacgtggtttaaccaaagagcagattgacaatctttccaccaggcactatgagcataacagtattgatagtgaactaggtaaaatctgtagtgtttgtattagtgactatgtaactggaaacaagctcaggcaattaccttgcatgcatgaatttcacattcattgtattgaccgatggctctcagagaattgcacttgtccgatctgtcggcagcctgttttagggtctaacatagcaaacaatgggtaaggtgatgggatctactcaaatactgttttttagtagaactgaatgttcaagcattgttttgctgagttatttgtgattagctaaccaggatgaaaaataacagattatatatagtttgaactatttttcgtgtgcttttttaaacttgttaaaaagaaatttatataaaatttaaaatacaaatgttaaattatccagaaatacagaatagttaatattgctagaaccaaataacctctaaaatgtttttattttggtaattttgtcatgctaagcacttttgtatctgcacaattcagtaggttaagaatcaatcttctttttcttaatagtacagcagactttagcttcaagtttcataggcttagtacttatatctagacatttgtgtctaaataagcttttcattaactttttattttaaggacagtatcttttcatgaaagagtatttggctgaatgtttgctatatatatgttacttgaaatgttaaatttaatatgcagcataccataggtgtatatataggtatataattttaaggttaaaatattcagtctacaagtttggttcttatttaagcttttgggctaatactgcatatggcacaatgtttaatattggcaagttcatctcagagaaaggggattcagatataattttaaagtagagataatttactgaagcgtctctgacaatctaacttattagacagcaagcaatatataatactgaaaaagtattcagaaatggaaaatttacatcatataggttatttaacttgtgttcagcctttttgtaacttttttgaaagtgcaaacaattctttggattattaaataaggtatacagtatgcatggtttctcaaatttagttttaaaatctaaaagtctataaagaatcagatgcataggcaatatgttaagttcacttggaggctaaaaatctccagtgaaaacaaaacgaaaacctttaagagaatgtagagtttatataaacacaaagtatgcattgaagatctgtttctaccaataaacattaaaacaaagactgtaaaaaaanna

SEQ ID NO: 434589 - DNA, 1482 bp, Homo sapiens
actgacagacttcagaatttattagggtttgtaatttccaggttccaaagcgcagcaagggaaagggcctggctgggtagtacgttacacccggaagtaaagagacgcatacaccgttgggtgcactttatagtctggctggcaaacaagcgacaccgacgcgcagagttaagtgctgggacttcccaagcctggaaagcagaccgtgtctctgcaactacgcggctgccacgagcgctgagcggccgggcatttggcctcgaggaggaggcactgtaagggcggcgcaagagggcggaacgcgggacgccaggcaccctagctcccgacggacgcagttttcagttgcacgggcgagctccgggccggctgcggagcgactccccgccgccaagtgggcggcgtggctgtcgggaaagaagggctggggcctgccgttcttcctcccgagtatcccctccagctggacgaccccacgctgcagcacgggcttccggcttctctcctcagtggccaattcgagggcacagcgggctccggaggcgcggcggcaagcctatcccgcctcccaaccacagcctccagcacccgagagaacggccgcccacagcacacgttctccggacaggagggcgaaggcccaagacctggagagatggtcagctctcaaaaaaggcacaaacaattgaaggatggataccatggcatatgttaaaagcgtgttgaaaggaaaataagaaagccaggaatctcaggatgaatcagtctagatcgagatcagatggtggcagtgaagaaaccttacctcaagaccataatcatcatgaaaatgagagaagatggcagcaagagcgtctccacagagaagaggcctattatcagtttattaatgaactcaatgatgaagattatcggcttatgagagaccataatcttttaggcacccctggtaagagatgggtaaaagaggaaacacccttttttcatcatttagatggaaggatttcaagataaggagaattggtattctttttccttgcttctctttatgaaaatatagtatattgtttttgtgagtttaagaactttttagtataataaagtagaaaatcactggcttctgtattttataaggtgaaaataggggacatggagcactattatacaaatgccaaactaagaaacaggttaatgtacataatggtgttaagtatttacatatatggtcctatttgtaatttttatacaaataaaatatgacttaaaacccaatttgaactcatttggggtattataatttatttattcagctgaattaatagctccccccaaagcccaatgtgttccataaagtttttacaaatgaactaatggaaatttgtatgtttatatattgtgtgtttgtatattgatgacccatataatgaagtatttgggataaaattcaagtaaatatttgaagttttctctataaatgctccc

SEQ ID NO: 434590 - DNA, 1512 bp, Homo sapiens
  misc_feature (1502)..(1504): n is a, c, g, or t
  misc_feature (1508)..(1511): n is a, c, g, or t
actgacagacttcagaatttattagggtttgtaatttccaggttccaaagcgcagcaagggaaagggcctggctgggtagtacgttacacccggaagtaaagagacgcatacaccgttgggtgcactttatagtctggctggcaaacaagcgacaccgacgcgcagagttaagtgctgggacttcccaagcctggaaagcagaccgtgtctctgcaactacgcggctgccacgagcgctgagcggccgggcatttggcctcgaggaggaggcactgtaagggcggcgcaagagggcggaacgcgggacgccaggcaccctagctcccgacggacgcagttttcagttgcacgggcgagctccgggccggctgcggagcgactccccgccgccaagtgggcggcgtggctgtcgggaaagaagggctggggcctgccgttcttcctcccgagtatcccctccagctggacgaccccacgctgcagcacgggcttccggcttctctcctcagtggccaattcgagggcacagcgggctccggaggcgcggcggcaagcctatcccgcctcccaaccacagcctccagcacccgagagaacggccgcccacagcacacgttctccggacaggagggcgaaggcccaagacctggagagatggtcagctctcaaaaaaggcacaaacaattgaaggatggataccatggcatatgttaaaagcgtgttgaaaggaaaataagaaagccaggaatctcaggatgaatcagtctagatcgagatcagatggtggcagtgaagaaaccttacctcaagaccataatcatcatgaaaatgagagaagatggcagcaagagcgtctccacagagaagaggcctattatcagtttattaatgaactcaatgatgaagattatcggcttatgagagaccataatcttttaggcacccctggagaaataacatcagaagaactgcaacagcggttagatggcgtcaaggaacaactagcatctcagcctgacttgagagatggaacgaattacagagactcagaagtccctagagaaagttcacatgaagattctcttctagaatggttgaacacctttcggcgcacaggaaatgcaactcgaagtggacaaaatgggaaccaaacttggagagctgctttgccagatacaagctgaagtgctaccagaaaaccagttgttaagtctatctggaaaaatagactgtgaagcacctcatcttcatttcaatagcttcgctggaacctggagcctaaggggtaaaatgtattatctttctcttcacaaacagttttttttcttttatggaacatagaatatgacaacatttgttttgtcaactgattacattttaaaacattgtacttgttcatattgtacttggctttgaaataccctgaagcatctatggaattgtaatttattgtaatgcaataagcatttatgtaattaaaaaaagcattcttaaatatgannnaaannnna

SEQ ID NO: 434591 - DNA, 3861 bp, Homo sapiens
  misc_feature (3859)..(3860): n is a, c, g, or t
actgacagacttcagaatttattagggtttgtaatttccaggttccaaagcgcagcaagggaaagggcctggctgggtagtacgttacacccggaagtaaagagacgcatacaccgttgggtgcactttatagtctggctggcaaacaagcgacaccgacgcgcagagttaagtgctgggacttcccaagcctggaaagcagaccgtgtctctgcaactacgcggctgccacgagcgctgagcggccgggcatttggcctcgaggaggaggcactgtaagggcggcgcaagagggcggaacgcgggacgccaggcaccctagctcccgacggacgcagttttcagttgcacgggcgagctccgggccggctgcggagcgactccccgccgccaagtgggcggcgtggctgtcgggaaagaagggctggggcctgccgttcttcctcccgagtatcccctccagctggacgaccccacgctgcagcacgggcttccggcttctctcctcagtggccaattcgagggcacagcgggctccggaggcgcggcggcaagcctatcccgcctcccaaccacagcctccagcacccgagagaacggccgcccacagcacacgttctccggacaggagggcgaaggcccaagacctggagagatggtcagctctcaaaaaaggcacaaacaattgaaggatggataccatggcatatgttaaaagcgtgttgaaaggaaaataagaaagccaggaatctcaggatgaatcagtctagatcgagatcagatggtggcagtgaagaaaccttacctcaagaccataatcatcatgaaaatgagagaagatggcagcaagagcgtctccacagagaagaggcctattatcagtttattaatgaactcaatgatgaagattatcggcttatgagagaccataatcttttaggcacccctgaactgcaacagcggttagatggcgtcaaggaacaactagcatctcagcctgacttgagagatggaacgaattacagagactcagaagtccctagagaaagttcacatgaagattctcttctagaatggttgaacacctttcggcgcacaggaaatgcaactcgaagtggacaaaatgggaaccaaacttggagagctgtgagtcgaacaaacccgaacaatggagagtttcggtttagtttggaaatccacgtaaatcatgaaaatagaggatttgaaattcatggagaagattatacagacattccactttcagatagtaacagagatcatactgcaaataggcaacaaaggtcaactagtcctgtggctaggcgaacaagaagccaaacctcagtgaatttcaatggtagtagttccaacattccaaggactaggcttgcttcaagggggcaaaatccagctgaaggatctttctcaacattgggaaggttaagaaatggaattgggggagcagctggcattcctcgagctaacgcttcacgcactaatttcagtagtcacacaaaccaatcaggtggtagtgaactcaggcaaagggaggggcaacggtttggagcagcacatgtttgggaaaatggggctagaagtaatgttacagtgaggaatacaaaccaaagattagagccaataagattacgatctacttccaatagtcgaagccgttcaccaattcagagacagagtggcactgtttatcataattcccaaagggaaagtagaccagtacagcaaaccactagaagatctgttaggaggagaggtagaactcgagtctttttagagcaagatagagaacgagaacgcagaggtactgcatataccccattctctaattcaaggcttgtgtcaagaataacagtagaagaaggagaagaatccagcagatcctcaactgctgtacgacgacatccaacaatcacactggaccttcaagtgagaaggatccgtcctggagaaaatagagatcgggatagtattgcaaatagaactcgatccagagtagggctagcagaaaatacagtcactattgaaagcaatagtgggggctttcgccgaaccatttctcgtttagagcggtcaggtattcgaacctatgttagtaccataacagttcctcttcgtaggatttctgagaatgagcttgttgagccatcatcagtggctcttcggtcaattttaaggcagatcatgactgggtttggagaactgagttctctaatggaggccgattctgagtcagaacttcaaagaaatggccagcatttaccagacatgcactcagaactgagtaacttaggtacagataacaacaggagccagcacagggaaggttcctctcaagacaggcaggcccaaggagacagcactgaaatgcatggtgaaaacgagaccacccagcctcatactcgaaacagtgacagtaggggtggcaggcagttgcgaaatccaaacaatttagttgaaactggaacactacccattcttcgccttgctcacttttttttactaaatgaaagtgatgatgatgatcgaatacgtggtttaaccaaagagcagattgacaatctttccaccaggcactatgagcataacagtattgatagtgaactaggtaaaatctgtagtgtttgtattagtgactatgtaactggaaacaagctcaggcaattaccttgcatgcatgaatttcacattcattgtattgaccgatggctctcagagaattgcacttgtccgatctgtcggcagcctgttttagggtctaacatagcaaacaatgggtaaggtgatgggatctactcaaatactgttttttagtagaactgaatgttcaagcattgttttgctgagttatttgtgattagctaaccaggatgaaaaataacagattatatatagtttgaactatttttcgtgtgcttttttaaacttgttaaaaagaaatttatataaaatttaaaatacaaatgttaaattatccagaaatacagaatagttaatattgctagaaccaaataacctctaaaatgtttttattttggtaattttgtcatgctaagcacttttgtatctgcacaattcagtaggttaagaatcaatcttctttttcttaatagtacagcagactttagcttcaagtttcataggcttagtacttatatctagacatttgtgtctaaataagcttttcattaactttttattttaaggacagtatcttttcatgaaagagtatttggctgaatgtttgctatatatatgttacttgaaatgttaaatttaatatgcagcataccataggtgtatatataggtatataattttaaggttaaaatattcagtctacaagtttggttcttatttaagcttttgggctaatactgcatatggcacaatgtttaatattggcaagttcatctcagagaaaggggattcagatataattttaaagtagagataatttactgaagcgtctctgacaatctaacttattagacagcaagcaatatataatactgaaaaagtattcagaaatggaaaatttacatcatataggttatttaacttgtgttcagcctttttgtaacttttttgaaagtgcaaacaattctttggattattaaataaggtatacagtatgcatggtttctcaaatttagttttaaaatctaaaagtctataaagaatcagatgcataggcaatatgttaagttcacttggaggctaaaaatctccagtgaaaacaaaacgaaaacctttaagagaatgtagagtttatataaacacaaagtatgcattgaagatctgtttctaccaataaacattaaaacaaagactgtaaaaaaanna

SEQ ID NO: 434592 - DNA, 2868 bp, Homo sapiens
  misc_feature (21)..(21): n is a, c, g, or t
  misc_feature (39)..(39): n is a, c, g, or t
  misc_feature (42)..(42): n is a, c, g, or t
  misc_feature (2866)..(2867): n is a, c, g, or t
caaggtccctgtcgaggctgnatgagccaaaactgtgcnagnactacagcctaggcaactggagcgagactcgtctcaaaaaaacaacttcaggctgggcacggtggctcacacctgtaatctcagcactttgggaaccaaacttggagagctgtgagtcgaacaaacccgaacaatggagagtttcggtttagtttggaaatccacgtaaatcatgaaaatagaggatttgaaattcatggagaagattatacagacattccactttcagatagtaacagagatcatactgcaaataggcaacaaaggtcaactagtcctgtggctaggcgaacaagaagccaaacctcagtgaatttcaatggtagtagttccaacattccaaggactaggcttgcttcaagggggcaaaatccagctgaaggatctttctcaacattgggaaggttaagaaatggaattgggggagcagctggcattcctcgagctaacgcttcacgcactaatttcagtagtcacacaaaccaatcaggtggtagtgaactcaggcaaagggaggggcaacggtttggagcagcacatgtttgggaaaatggggctagaagtaatgttacagtgaggaatacaaaccaaagattagagccaataagattacgatctacttccaatagtcgaagccgttcaccaattcagagacagagtggcactgtttatcataattcccaaagggaaagtagaccagtacagcaaaccactagaagatctgttaggaggagaggtagaactcgagtctttttagagcaagatagagaacgagaacgcagaggtactgcatataccccattctctaattcaaggcttgtgtcaagaataacagtagaagaaggagaagaatccagcagatcctcaactgctgtacgacgacatccaacaatcacactggaccttcaagtgagaaggatccgtcctggagaaaatagagatcgggatagtattgcaaatagaactcgatccagagtagggctagcagaaaatacagtcactattgaaagcaatagtgggggctttcgccgaaccatttctcgtttagagcggtcaggtattcgaacctatgttagtaccataacagttcctcttcgtaggatttctgagaatgagcttgttgagccatcatcagtggctcttcggtcaattttaaggcagatcatgactgggtttggagaactgagttctctaatggaggccgattctgagtcagaacttcaaagaaatggccagcatttaccagacatgcactcagaactgagtaacttaggtacagataacaacaggagccagcacagggaaggttcctctcaagacaggcaggcccaaggagacagcactgaaatgcatggtgaaaacgagaccacccagcctcatactcgaaacagtgacagtaggggtggcaggcagttgcgaaatccaaacaatttagttgaaactggaacactacccattcttcgccttgctcacttttttttactaaatgaaagtgatgatgatgatcgaatacgtggtttaaccaaagagcagattgacaatctttccaccaggcactatgagcataacagtattgatagtgaactaggtaaaatctgtagtgtttgtattagtgactatgtaactggaaacaagctcaggcaattaccttgcatgcatgaatttcacattcattgtattgaccgatggctctcagagaattgcacttgtccgatctgtcggcagcctgttttagggtctaacatagcaaacaatgggtaaggtgatgggatctactcaaatactgttttttagtagaactgaatgttcaagcattgttttgctgagttatttgtgattagctaaccaggatgaaaaataacagattatatatagtttgaactatttttcgtgtgcttttttaaacttgttaaaaagaaatttatataaaatttaaaatacaaatgttaaattatccagaaatacagaatagttaatattgctagaaccaaataacctctaaaatgtttttattttggtaattttgtcatgctaagcacttttgtatctgcacaattcagtaggttaagaatcaatcttctttttcttaatagtacagcagactttagcttcaagtttcataggcttagtacttatatctagacatttgtgtctaaataagcttttcattaactttttattttaaggacagtatcttttcatgaaagagtatttggctgaatgtttgctatatatatgttacttgaaatgttaaatttaatatgcagcataccataggtgtatatataggtatataattttaaggttaaaatattcagtctacaagtttggttcttatttaagcttttgggctaatactgcatatggcacaatgtttaatattggcaagttcatctcagagaaaggggattcagatataattttaaagtagagataatttactgaagcgtctctgacaatctaacttattagacagcaagcaatatataatactgaaaaagtattcagaaatggaaaatttacatcatataggttatttaacttgtgttcagcctttttgtaacttttttgaaagtgcaaacaattctttggattattaaataaggtatacagtatgcatggtttctcaaatttagttttaaaatctaaaagtctataaagaatcagatgcataggcaatatgttaagttcacttggaggctaaaaatctccagtgaaaacaaaacgaaaacctttaagagaatgtagagtttatataaacacaaagtatgcattgaagatctgtttctaccaataaacattaaaacaaagactgtaaaaaaanna

SEQ ID NO: 434593 - DNA, 1063 bp, Homo sapiens
aagcgctcttaaagcggagtgagggtggctgcgtgtttccggaagacgtggcggctctcgcctgggctgtttcccggcttcatttctcccgactcagcttcccaccctgggctttccgaggtgctttcgccgctgtccccaccactgcagccatgatctccttaacggacacgcagaaaattggaatgggattaacaggatttggagtgtttttcctgttctttggaatgattctcttttttgacaaagcactactggctattggaaatgttttatttgtagccggcttggcttttgtaattggtttagaaagaacattcagattcttcttccaaaaacataaaatgaaagctacaggtttttttctgggtggtgtatttgtagtccttattggttggcctttgataggcatgatcttcgaaatttatggattttttctcttgttcaggggcttctttcctgtcgttgttggctttattagaagagtgccagtccttggatccctcctaaatttacctggaattagatcatttgtagataaagttggagaaagcaacaatatggtataacaacaagtgaatttgaagactcatttaaaatattgtgttatttataaagtcatttgaagaatattcagcacaaaattaaattacatgaaatagcttgtaatgttctttacaggagtttaaaacgtatagcctacaaagtaccagcagcaaattagcaaagaagcagtgaaaacaggcttctactcaagtgaactaagaagaagtcagcaagcaaactgagagaggtgaaatccatgttaatgatgcttaagaaactcttgaaggctatttgtgttgtttttccacaatgtgcgaaactcagccatccttagagaactgtggtgcctgtttcttttctttttattttgaaggctcaggagcatccataggcatttgctttttagaagtgtccactgcaatggcaaaaatatttccagttgcactgtatctctggaagtgatgcatgaattcgattggattgtgtcattttaaagtattaaaaccaaggaaacccc

SEQ ID NO: 434594 - DNA, 834 bp, Homo sapiens
  misc_feature (827)..(827): n is a, c, g, or t
aagcgctcttaaagcggagtgagggtggctgcgtgtttccggaagacgtggcggctctcgcctgggctgtttcccggcttcatttctcccgactcagcttcccaccctgggctttccgaggtgctttcgccgctgtccccaccactgcagccatgatctccttaacggacacgcagaaaattggaatgggattaacaggatttggagtgtttttcctgttctttggaatgattctcttttttgacaaagcactactggctattggaaatgaatgaaacctgtcagctttctgtttaaataaaaggttttatttgtagccggcttggcttttgtaattggtttagaaagaacattcagattcttcttccaaaaacataaaatgaaagctacaggtttttttctgggtggtgtatttgtagtccttattggttggcctttgataggcatgatcttcgaaatttatggattttttctcttgttcaggggcttctttcctgtcgttgttggctttattagaagagtgccagtccttggatccctcctaaatttacctggaattagatcatttgtagataaagttggagaaagcaacaatatggtataacaacaagtgaatttgaagactcatttaacaccatggcggtattcaacaggctcttgaaggaaatcgggcaaattagtactgaaaagtgtaggtctcacgggttacggttgccacagccccgcattgagaccgaaccgtccggtctagctcgctgcgggtcctttctttctcctgttgttgtcagcactgtgtttctctctgccgctgcccactatacatgtcnaaagaga

SEQ ID NO: 434595 - DNA, 3266 bp, Homo sapiens
aagcgctcttaaagcggagtgagggtggctgcgtgtttccggaagacgtggcggctctcgcctgggctgtttcccggcttcatttctcccgactcagcttcccaccctgggctttccgaggtgctttcgccgctgtccccaccactgcagccatgatctccttaacggacacgcagaaaattggaatgggattaacaggatttggagtgtttttcctgttctttggaatgattctcttttttgacaaagcactactggctattggaaatgttttatttgtagccggcttggcttttgtaattggtttagaaagaacattcagattcttcttccaaaaacataaaatgaaagctacaggtttttttctgggtggtgtatttgtagtccttattggttggcctttgataggcatgatcttcgaaatttatggattttttctcttgttcaggggcttctttcctgtcgttgttggctttattagaagagtgccagtccttggatccctcctaaatttacctggaattagatcatttgtagataaagttggagaaagcaacaatatggtataacaacaagtgaatttgaagactcatttaaaatattgtgttatttataaagtcatttgaagaatattcagcacaaaattaaattacatgaaatagcttgtaatgttctttacaggagtttaaaacgtatagcctacaaagtaccagcagcaaattagcaaagaagcagtgaaaacaggcttctactcaagtgaactaagaagaagtcagcaagcaaactgagagaggtgaaatccatgttaatgatgcttaagaaactcttgaaggctatttgtgttgtttttccacaatgtgcgaaactcagccatccttagagaactgtggtgcctgtttcttttctttttattttgaaggctcaggagcatccataggcatttgctttttagaagtgtccactgcaatggcaaaaatatttccagttgcactgtatctctggaagtgatgcatgaattcgattggattgtgtcattttaaagtattaaaaccaaggaaaccccaattttgatgtatggattacttttttttgtaaacatggttaaaataaaacttttgtggttcttctgaatcttaatatttcaaagccaggtgaaaatctgaactagatattctttgttggaatatgcaaaggtcattctttactaacttttagttactaaattatagctaagttttgtcagcagcatactccggaaagtctcatacttcttgggagtctgccctcctaagtatctgtctatatcattcattacgtgtaagtatttaacaaaaaagcattcttgaccatgaatgaagtagtttgtttcatagcttgtctcattgaatagtattattgaagatactaaatgatgcaaaccaaatggattttttccatgtcatgatgtaatttttctttcttctttcttttttttaaattttagcagtggcttattatttgtttttcataaattaaaataacttttgataatgtttactttaagacatgtaacatgttaaaaggttaaacttatggctgtttttaaagggctattcatttaatctgagttttcccttattttcagctttttcctagcatataatagtcattaagcatgacatatccttcatatgatcactcatcttgagttaattagaaaatacctgagttcacgtgctaaagtcatttcactgtaataaactgactatggtttcttaagaacatgacactaaaaaaaaagtggtttttttccaccgttgctgattattagacagtaggaaatagctgttttctttagttttacaagatgtgacagctttagtggtagatgtagggaaacatttcaacagccatagtactatttgttttaccactgattgcactgttttgtttttttaacagttgcaaagctttttaatgcataaaagtataattgaaatctgtggtatttatttacaaacatgtctacaaaaatagattacagcttattttatttttagttaaatctcttaatacacagagaactcccaatcttgctcatctaaataaggaaagacttggtgtatagtgtgatggtttagtcttaaggattaagacatttttggtacttgcatttgacttacgatgtatctgtgaaaatgggatgatattgacaaatggagactcctacctcaatagttaatggaataataagaggctactgttgtgtctaatgttcttcaaaaaagtaatatcctcacttggagagtgtcaaatacatactttgaggattgactttatataaggtgccctgtagaaatctgttacacatatttttgacccatattatttacaatgtcttgataattctacctttttagagcaagaatagtatctgctaatgtaagggacatctgtatttaactcctttgtagacatgaatttctatcaaaatgttctttgcactgtaacagagattccttttttcaataatcttaattcaaaagcattattagacttgaaagggtttgataatctcccagtccttagtaaagattgagagaggctggagcagttttcagttttaaatgagtctgcagttaatatcaaatgtgagtttgggactgcctggcaacatttatatttcttattcagaacccttgatgagactatttttaaacatactagtctgctgatagaaagcactatacatcctattgtttctttctttccaaaatcagccttctgtctgtaacaaaaatgtactttatagagatggaggaaaaggtctaatactacatagccttaagtgtttctgtcattgttcaagtgtattttctgtaacagaaacatatttggaatgtttttcttttccccttataaattgtaattcctgaaatactgctgctttaaaaagtcccactgtcagattatattatctaacaattgaatattgtaaatatacttgtcttacctctcaataaaagggtacttttctattaattggtggtcaagtatatctgtgttatgaagttctaaaagctaatttagcattgcaaaataacctcatttttaaaaaattagccttatatgcagtgttctatttatcaaatgatcttcacatctttcatttccaaattgttgaaatgtactaatgaatacaaatagacttcaagtaagcaaaaatgttcttaattttgaaaactgtaaaataaagtcacttaccttgggcaatatgctatttttta

SEQ ID NO: 434596 - DNA, 3465 bp, Homo sapiens
aagcgctcttaaagcggagtgagggtggctgcgtgtttccggaagacgtggcggctctcgcctgggctgtttcccggcttcatttctcccgactcagcttcccaccctgggctttccgaggtgctttcgccgctgtccccaccactgcagccatgatctccttaacggacacgcagaaaattggaatgggattaacaggatttggagtgtttttcctgttctttggaatgattctcttttttgacaaagcactactggctattggaaataaactcctgtagcctatgatgaatatttcagaaccaagaggaatacccttgggtgacatatttatgggcagctttcctctttatgccttgccaactcatctgcttgactaagccttcctcatccagctaaaactaggaaaactactgcagacacagatgccccttggttttatttgtagccggcttggcttttgtaattggtttagaaagaacattcagattcttcttccaaaaacataaaatgaaagctacaggtttttttctgggtggtgtatttgtagtccttattggttggcctttgataggcatgatcttcgaaatttatggattttttctcttgttcaggggcttctttcctgtcgttgttggctttattagaagagtgccagtccttggatccctcctaaatttacctggaattagatcaactacataggcccagaagagatccacagtaatgtttgtagataaagttggagaaagcaacaatatggtataacaacaagtgaatttgaagactcatttaaaatattgtgttatttataaagtcatttgaagaatattcagcacaaaattaaattacatgaaatagcttgtaatgttctttacaggagtttaaaacgtatagcctacaaagtaccagcagcaaattagcaaagaagcagtgaaaacaggcttctactcaagtgaactaagaagaagtcagcaagcaaactgagagaggtgaaatccatgttaatgatgcttaagaaactcttgaaggctatttgtgttgtttttccacaatgtgcgaaactcagccatccttagagaactgtggtgcctgtttcttttctttttattttgaaggctcaggagcatccataggcatttgctttttagaagtgtccactgcaatggcaaaaatatttccagttgcactgtatctctggaagtgatgcatgaattcgattggattgtgtcattttaaagtattaaaaccaaggaaaccccaattttgatgtatggattacttttttttgtaaacatggttaaaataaaacttttgtggttcttctgaatcttaatatttcaaagccaggtgaaaatctgaactagatattctttgttggaatatgcaaaggtcattctttactaacttttagttactaaattatagctaagttttgtcagcagcatactccggaaagtctcatacttcttgggagtctgccctcctaagtatctgtctatatcattcattacgtgtaagtatttaacaaaaaagcattcttgaccatgaatgaagtagtttgtttcatagcttgtctcattgaatagtattattgaagatactaaatgatgcaaaccaaatggattttttccatgtcatgatgtaatttttctttcttctttcttttttttaaattttagcagtggcttattatttgtttttcataaattaaaataacttttgataatgtttactttaagacatgtaacatgttaaaaggttaaacttatggctgtttttaaagggctattcatttaatctgagttttcccttattttcagctttttcctagcatataatagtcattaagcatgacatatccttcatatgatcactcatcttgagttaattagaaaatacctgagttcacgtgctaaagtcatttcactgtaataaactgactatggtttcttaagaacatgacactaaaaaaaaagtggtttttttccaccgttgctgattattagacagtaggaaatagctgttttctttagttttacaagatgtgacagctttagtggtagatgtagggaaacatttcaacagccatagtactatttgttttaccactgattgcactgttttgtttttttaacagttgcaaagctttttaatgcataaaagtataattgaaatctgtggtatttatttacaaacatgtctacaaaaatagattacagcttattttatttttagttaaatctcttaatacacagagaactcccaatcttgctcatctaaataaggaaagacttggtgtatagtgtgatggtttagtcttaaggattaagacatttttggtacttgcatttgacttacgatgtatctgtgaaaatgggatgatattgacaaatggagactcctacctcaatagttaatggaataataagaggctactgttgtgtctaatgttcttcaaaaaagtaatatcctcacttggagagtgtcaaatacatactttgaggattgactttatataaggtgccctgtagaaatctgttacacatatttttgacccatattatttacaatgtcttgataattctacctttttagagcaagaatagtatctgctaatgtaagggacatctgtatttaactcctttgtagacatgaatttctatcaaaatgttctttgcactgtaacagagattccttttttcaataatcttaattcaaaagcattattagacttgaaagggtttgataatctcccagtccttagtaaagattgagagaggctggagcagttttcagttttaaatgagtctgcagttaatatcaaatgtgagtttgggactgcctggcaacatttatatttcttattcagaacccttgatgagactatttttaaacatactagtctgctgatagaaagcactatacatcctattgtttctttctttccaaaatcagccttctgtctgtaacaaaaatgtactttatagagatggaggaaaaggtctaatactacatagccttaagtgtttctgtcattgttcaagtgtattttctgtaacagaaacatatttggaatgtttttcttttccccttataaattgtaattcctgaaatactgctgctttaaaaagtcccactgtcagattatattatctaacaattgaatattgtaaatatacttgtcttacctctcaataaaagggtacttttctattaattggtggtcaagtatatctgtgttatgaagttctaaaagctaatttagcattgcaaaataacctcatttttaaaaaattagccttatatgcagtgttctatttatcaaatgatcttcacatctttcatttccaaattgttgaaatgtactaatgaatacaaatagacttcaagtaagcaaaaatgttcttaattttgaaaactgtaaaataaagtcacttaccttgggcaatatgctatttttta

SEQ ID NO: 434597 - DNA, 3301 bp, Homo sapiens
aagcgctcttaaagcggagtgagggtggctgcgtgtttccggaagacgtggcggctctcgcctgggctgtttcccggcttcatttctcccgactcagcttcccaccctgggctttccgaggtgctttcgccgctgtccccaccactgcagccatgatctccttaacggacacgcagaaaattggaatgggattaacaggatttggagtgtttttcctgttctttggaatgattctcttttttgacaaagcactactggctattggaaatgaatgaaacctgtcagctttctgtttaaataaaaggttttatttgtagccggcttggcttttgtaattggtttagaaagaacattcagattcttcttccaaaaacataaaatgaaagctacaggtttttttctgggtggtgtatttgtagtccttattggttggcctttgataggcatgatcttcgaaatttatggattttttctcttgttcaggggcttctttcctgtcgttgttggctttattagaagagtgccagtccttggatccctcctaaatttacctggaattagatcatttgtagataaagttggagaaagcaacaatatggtataacaacaagtgaatttgaagactcatttaaaatattgtgttatttataaagtcatttgaagaatattcagcacaaaattaaattacatgaaatagcttgtaatgttctttacaggagtttaaaacgtatagcctacaaagtaccagcagcaaattagcaaagaagcagtgaaaacaggcttctactcaagtgaactaagaagaagtcagcaagcaaactgagagaggtgaaatccatgttaatgatgcttaagaaactcttgaaggctatttgtgttgtttttccacaatgtgcgaaactcagccatccttagagaactgtggtgcctgtttcttttctttttattttgaaggctcaggagcatccataggcatttgctttttagaagtgtccactgcaatggcaaaaatatttccagttgcactgtatctctggaagtgatgcatgaattcgattggattgtgtcattttaaagtattaaaaccaaggaaaccccaattttgatgtatggattacttttttttgtaaacatggttaaaataaaacttttgtggttcttctgaatcttaatatttcaaagccaggtgaaaatctgaactagatattctttgttggaatatgcaaaggtcattctttactaacttttagttactaaattatagctaagttttgtcagcagcatactccggaaagtctcatacttcttgggagtctgccctcctaagtatctgtctatatcattcattacgtgtaagtatttaacaaaaaagcattcttgaccatgaatgaagtagtttgtttcatagcttgtctcattgaatagtattattgaagatactaaatgatgcaaaccaaatggattttttccatgtcatgatgtaatttttctttcttctttcttttttttaaattttagcagtggcttattatttgtttttcataaattaaaataacttttgataatgtttactttaagacatgtaacatgttaaaaggttaaacttatggctgtttttaaagggctattcatttaatctgagttttcccttattttcagctttttcctagcatataatagtcattaagcatgacatatccttcatatgatcactcatcttgagttaattagaaaatacctgagttcacgtgctaaagtcatttcactgtaataaactgactatggtttcttaagaacatgacactaaaaaaaaagtggtttttttccaccgttgctgattattagacagtaggaaatagctgttttctttagttttacaagatgtgacagctttagtggtagatgtagggaaacatttcaacagccatagtactatttgttttaccactgattgcactgttttgtttttttaacagttgcaaagctttttaatgcataaaagtataattgaaatctgtggtatttatttacaaacatgtctacaaaaatagattacagcttattttatttttagttaaatctcttaatacacagagaactcccaatcttgctcatctaaataaggaaagacttggtgtatagtgtgatggtttagtcttaaggattaagacatttttggtacttgcatttgacttacgatgtatctgtgaaaatgggatgatattgacaaatggagactcctacctcaatagttaatggaataataagaggctactgttgtgtctaatgttcttcaaaaaagtaatatcctcacttggagagtgtcaaatacatactttgaggattgactttatataaggtgccctgtagaaatctgttacacatatttttgacccatattatttacaatgtcttgataattctacctttttagagcaagaatagtatctgctaatgtaagggacatctgtatttaactcctttgtagacatgaatttctatcaaaatgttctttgcactgtaacagagattccttttttcaataatcttaattcaaaagcattattagacttgaaagggtttgataatctcccagtccttagtaaagattgagagaggctggagcagttttcagttttaaatgagtctgcagttaatatcaaatgtgagtttgggactgcctggcaacatttatatttcttattcagaacccttgatgagactatttttaaacatactagtctgctgatagaaagcactatacatcctattgtttctttctttccaaaatcagccttctgtctgtaacaaaaatgtactttatagagatggaggaaaaggtctaatactacatagccttaagtgtttctgtcattgttcaagtgtattttctgtaacagaaacatatttggaatgtttttcttttccccttataaattgtaattcctgaaatactgctgctttaaaaagtcccactgtcagattatattatctaacaattgaatattgtaaatatacttgtcttacctctcaataaaagggtacttttctattaattggtggtcaagtatatctgtgttatgaagttctaaaagctaatttagcattgcaaaataacctcatttttaaaaaattagccttatatgcagtgttctatttatcaaatgatcttcacatctttcatttccaaattgttgaaatgtactaatgaatacaaatagacttcaagtaagcaaaaatgttcttaattttgaaaactgtaaaataaagtcacttaccttgggcaatatgctatttttta

SEQ ID NO: 434598 - DNA, 3441 bp, Homo sapiens
aagcgctcttaaagcggagtgagggtggctgcgtgtttccggaagacgtggcggctctcgcctgggctgtttcccggcttcatttctcccgactcagcttcccaccctgggctttccgaggtgctttcgccgctgtccccaccactgcagccatgatctccttaacggacacgcagaaaattggaatgggattaacaggatttggagtgtttttcctgttctttggaatgattctcttttttgacaaagcactactggctattggaaatgtgagtttttaaatatatattttaactaaatttataaggaaattttaactacgaatgaattattatctgctattaaatttggggaaaataattcactattactcataagtaattcctgttacattctctatttccatcaggaatgaaacctgtcagctttctgtttaaataaaaggttttatttgtagccggcttggcttttgtaattggtttagaaagaacattcagattcttcttccaaaaacataaaatgaaagctacaggtttttttctgggtggtgtatttgtagtccttattggttggcctttgataggcatgatcttcgaaatttatggattttttctcttgttcaggggcttctttcctgtcgttgttggctttattagaagagtgccagtccttggatccctcctaaatttacctggaattagatcatttgtagataaagttggagaaagcaacaatatggtataacaacaagtgaatttgaagactcatttaaaatattgtgttatttataaagtcatttgaagaatattcagcacaaaattaaattacatgaaatagcttgtaatgttctttacaggagtttaaaacgtatagcctacaaagtaccagcagcaaattagcaaagaagcagtgaaaacaggcttctactcaagtgaactaagaagaagtcagcaagcaaactgagagaggtgaaatccatgttaatgatgcttaagaaactcttgaaggctatttgtgttgtttttccacaatgtgcgaaactcagccatccttagagaactgtggtgcctgtttcttttctttttattttgaaggctcaggagcatccataggcatttgctttttagaagtgtccactgcaatggcaaaaatatttccagttgcactgtatctctggaagtgatgcatgaattcgattggattgtgtcattttaaagtattaaaaccaaggaaaccccaattttgatgtatggattacttttttttgtaaacatggttaaaataaaacttttgtggttcttctgaatcttaatatttcaaagccaggtgaaaatctgaactagatattctttgttggaatatgcaaaggtcattctttactaacttttagttactaaattatagctaagttttgtcagcagcatactccggaaagtctcatacttcttgggagtctgccctcctaagtatctgtctatatcattcattacgtgtaagtatttaacaaaaaagcattcttgaccatgaatgaagtagtttgtttcatagcttgtctcattgaatagtattattgaagatactaaatgatgcaaaccaaatggattttttccatgtcatgatgtaatttttctttcttctttcttttttttaaattttagcagtggcttattatttgtttttcataaattaaaataacttttgataatgtttactttaagacatgtaacatgttaaaaggttaaacttatggctgtttttaaagggctattcatttaatctgagttttcccttattttcagctttttcctagcatataatagtcattaagcatgacatatccttcatatgatcactcatcttgagttaattagaaaatacctgagttcacgtgctaaagtcatttcactgtaataaactgactatggtttcttaagaacatgacactaaaaaaaaagtggtttttttccaccgttgctgattattagacagtaggaaatagctgttttctttagttttacaagatgtgacagctttagtggtagatgtagggaaacatttcaacagccatagtactatttgttttaccactgattgcactgttttgtttttttaacagttgcaaagctttttaatgcataaaagtataattgaaatctgtggtatttatttacaaacatgtctacaaaaatagattacagcttattttatttttagttaaatctcttaatacacagagaactcccaatcttgctcatctaaataaggaaagacttggtgtatagtgtgatggtttagtcttaaggattaagacatttttggtacttgcatttgacttacgatgtatctgtgaaaatgggatgatattgacaaatggagactcctacctcaatagttaatggaataataagaggctactgttgtgtctaatgttcttcaaaaaagtaatatcctcacttggagagtgtcaaatacatactttgaggattgactttatataaggtgccctgtagaaatctgttacacatatttttgacccatattatttacaatgtcttgataattctacctttttagagcaagaatagtatctgctaatgtaagggacatctgtatttaactcctttgtagacatgaatttctatcaaaatgttctttgcactgtaacagagattccttttttcaataatcttaattcaaaagcattattagacttgaaagggtttgataatctcccagtccttagtaaagattgagagaggctggagcagttttcagttttaaatgagtctgcagttaatatcaaatgtgagtttgggactgcctggcaacatttatatttcttattcagaacccttgatgagactatttttaaacatactagtctgctgatagaaagcactatacatcctattgtttctttctttccaaaatcagccttctgtctgtaacaaaaatgtactttatagagatggaggaaaaggtctaatactacatagccttaagtgtttctgtcattgttcaagtgtattttctgtaacagaaacatatttggaatgtttttcttttccccttataaattgtaattcctgaaatactgctgctttaaaaagtcccactgtcagattatattatctaacaattgaatattgtaaatatacttgtcttacctctcaataaaagggtacttttctattaattggtggtcaagtatatctgtgttatgaagttctaaaagctaatttagcattgcaaaataacctcatttttaaaaaattagccttatatgcagtgttctatttatcaaatgatcttcacatctttcatttccaaattgttgaaatgtactaatgaatacaaatagacttcaagtaagcaaaaatgttcttaattttgaaaactgtaaaataaagtcacttaccttgggcaatatgctatttttta

SEQ ID NO: 434599 - DNA, 3206 bp, Homo sapiens
cgcagtgtggtaccccacctgtcattgcgcgcctgtgagtcacacgtccgatcgacgtccaagtccgctggtccacaatccaggtgctcgccatgatctccttaacggacacgcagaaaattggaatgggattaacaggatttggagtgtttttcctgttctttggaatgattctcttttttgacaaagcactactggctattggaaatgttttatttgtagccggcttggcttttgtaattggtttagaaagaacattcagattcttcttccaaaaacataaaatgaaagctacaggtttttttctgggtggtgtatttgtagtccttattggttggcctttgataggcatgatcttcgaaatttatggattttttctcttgttcaggggcttctttcctgtcgttgttggctttattagaagagtgccagtccttggatccctcctaaatttacctggaattagatcatttgtagataaagttggagaaagcaacaatatggtataacaacaagtgaatttgaagactcatttaaaatattgtgttatttataaagtcatttgaagaatattcagcacaaaattaaattacatgaaatagcttgtaatgttctttacaggagtttaaaacgtatagcctacaaagtaccagcagcaaattagcaaagaagcagtgaaaacaggcttctactcaagtgaactaagaagaagtcagcaagcaaactgagagaggtgaaatccatgttaatgatgcttaagaaactcttgaaggctatttgtgttgtttttccacaatgtgcgaaactcagccatccttagagaactgtggtgcctgtttcttttctttttattttgaaggctcaggagcatccataggcatttgctttttagaagtgtccactgcaatggcaaaaatatttccagttgcactgtatctctggaagtgatgcatgaattcgattggattgtgtcattttaaagtattaaaaccaaggaaaccccaattttgatgtatggattacttttttttgtaaacatggttaaaataaaacttttgtggttcttctgaatcttaatatttcaaagccaggtgaaaatctgaactagatattctttgttggaatatgcaaaggtcattctttactaacttttagttactaaattatagctaagttttgtcagcagcatactccggaaagtctcatacttcttgggagtctgccctcctaagtatctgtctatatcattcattacgtgtaagtatttaacaaaaaagcattcttgaccatgaatgaagtagtttgtttcatagcttgtctcattgaatagtattattgaagatactaaatgatgcaaaccaaatggattttttccatgtcatgatgtaatttttctttcttctttcttttttttaaattttagcagtggcttattatttgtttttcataaattaaaataacttttgataatgtttactttaagacatgtaacatgttaaaaggttaaacttatggctgtttttaaagggctattcatttaatctgagttttcccttattttcagctttttcctagcatataatagtcattaagcatgacatatccttcatatgatcactcatcttgagttaattagaaaatacctgagttcacgtgctaaagtcatttcactgtaataaactgactatggtttcttaagaacatgacactaaaaaaaaagtggtttttttccaccgttgctgattattagacagtaggaaatagctgttttctttagttttacaagatgtgacagctttagtggtagatgtagggaaacatttcaacagccatagtactatttgttttaccactgattgcactgttttgtttttttaacagttgcaaagctttttaatgcataaaagtataattgaaatctgtggtatttatttacaaacatgtctacaaaaatagattacagcttattttatttttagttaaatctcttaatacacagagaactcccaatcttgctcatctaaataaggaaagacttggtgtatagtgtgatggtttagtcttaaggattaagacatttttggtacttgcatttgacttacgatgtatctgtgaaaatgggatgatattgacaaatggagactcctacctcaatagttaatggaataataagaggctactgttgtgtctaatgttcttcaaaaaagtaatatcctcacttggagagtgtcaaatacatactttgaggattgactttatataaggtgccctgtagaaatctgttacacatatttttgacccatattatttacaatgtcttgataattctacctttttagagcaagaatagtatctgctaatgtaagggacatctgtatttaactcctttgtagacatgaatttctatcaaaatgttctttgcactgtaacagagattccttttttcaataatcttaattcaaaagcattattagacttgaaagggtttgataatctcccagtccttagtaaagattgagagaggctggagcagttttcagttttaaatgagtctgcagttaatatcaaatgtgagtttgggactgcctggcaacatttatatttcttattcagaacccttgatgagactatttttaaacatactagtctgctgatagaaagcactatacatcctattgtttctttctttccaaaatcagccttctgtctgtaacaaaaatgtactttatagagatggaggaaaaggtctaatactacatagccttaagtgtttctgtcattgttcaagtgtattttctgtaacagaaacatatttggaatgtttttcttttccccttataaattgtaattcctgaaatactgctgctttaaaaagtcccactgtcagattatattatctaacaattgaatattgtaaatatacttgtcttacctctcaataaaagggtacttttctattaattggtggtcaagtatatctgtgttatgaagttctaaaagctaatttagcattgcaaaataacctcatttttaaaaaattagccttatatgcagtgttctatttatcaaatgatcttcacatctttcatttccaaattgttgaaatgtactaatgaatacaaatagacttcaagtaagcaaaaatgttcttaattttgaaaactgtaaaataaagtcacttaccttgggcaatatgctatttttta

SEQ ID NO: 434600 - DNA, 3488 bp, Homo sapiens
aagcgctcttaaagcggagtgagggtggctgcgtgtttccggaagacgtggcggctctcgcctgggctgtttcccggcttcatttctcccgactcagcttcccaccctgggctttccgaggtgctttcgccgctgtccccaccactgcagccatgatctccttaacggacacgcagaaaattggaatgggattaacaggatttggagtgtttttcctgttctttggaatgattctcttttttgacaaagcactactggctattggaaataagaggaatgagacaagtggaacaaagctacaactttaaaatgcataacccactccttggttctgctgcttggttgtacattacagttctgtctggccagttgcccacattaaaagccaaacaaatgtgcttctttttttatatttagctttgactttacgtttaaaatttatgcattgtgtttaattaccttttccgtgttgtattttctttctcttttaggttttatttgtagccggcttggcttttgtaattggtttagaaagaacattcagattcttcttccaaaaacataaaatgaaagctacaggtttttttctgggtggtgtatttgtagtccttattggttggcctttgataggcatgatcttcgaaatttatggattttttctcttgttcaggggcttctttcctgtcgttgttggctttattagaagagtgccagtccttggatccctcctaaatttacctggaattagatcatttgtagataaagttggagaaagcaacaatatggtataacaacaagtgaatttgaagactcatttaaaatattgtgttatttataaagtcatttgaagaatattcagcacaaaattaaattacatgaaatagcttgtaatgttctttacaggagtttaaaacgtatagcctacaaagtaccagcagcaaattagcaaagaagcagtgaaaacaggcttctactcaagtgaactaagaagaagtcagcaagcaaactgagagaggtgaaatccatgttaatgatgcttaagaaactcttgaaggctatttgtgttgtttttccacaatgtgcgaaactcagccatccttagagaactgtggtgcctgtttcttttctttttattttgaaggctcaggagcatccataggcatttgctttttagaagtgtccactgcaatggcaaaaatatttccagttgcactgtatctctggaagtgatgcatgaattcgattggattgtgtcattttaaagtattaaaaccaaggaaaccccaattttgatgtatggattacttttttttgtaaacatggttaaaataaaacttttgtggttcttctgaatcttaatatttcaaagccaggtgaaaatctgaactagatattctttgttggaatatgcaaaggtcattctttactaacttttagttactaaattatagctaagttttgtcagcagcatactccggaaagtctcatacttcttgggagtctgccctcctaagtatctgtctatatcattcattacgtgtaagtatttaacaaaaaagcattcttgaccatgaatgaagtagtttgtttcatagcttgtctcattgaatagtattattgaagatactaaatgatgcaaaccaaatggattttttccatgtcatgatgtaatttttctttcttctttcttttttttaaattttagcagtggcttattatttgtttttcataaattaaaataacttttgataatgtttactttaagacatgtaacatgttaaaaggttaaacttatggctgtttttaaagggctattcatttaatctgagttttcccttattttcagctttttcctagcatataatagtcattaagcatgacatatccttcatatgatcactcatcttgagttaattagaaaatacctgagttcacgtgctaaagtcatttcactgtaataaactgactatggtttcttaagaacatgacactaaaaaaaaagtggtttttttccaccgttgctgattattagacagtaggaaatagctgttttctttagttttacaagatgtgacagctttagtggtagatgtagggaaacatttcaacagccatagtactatttgttttaccactgattgcactgttttgtttttttaacagttgcaaagctttttaatgcataaaagtataattgaaatctgtggtatttatttacaaacatgtctacaaaaatagattacagcttattttatttttagttaaatctcttaatacacagagaactcccaatcttgctcatctaaataaggaaagacttggtgtatagtgtgatggtttagtcttaaggattaagacatttttggtacttgcatttgacttacgatgtatctgtgaaaatgggatgatattgacaaatggagactcctacctcaatagttaatggaataataagaggctactgttgtgtctaatgttcttcaaaaaagtaatatcctcacttggagagtgtcaaatacatactttgaggattgactttatataaggtgccctgtagaaatctgttacacatatttttgacccatattatttacaatgtcttgataattctacctttttagagcaagaatagtatctgctaatgtaagggacatctgtatttaactcctttgtagacatgaatttctatcaaaatgttctttgcactgtaacagagattccttttttcaataatcttaattcaaaagcattattagacttgaaagggtttgataatctcccagtccttagtaaagattgagagaggctggagcagttttcagttttaaatgagtctgcagttaatatcaaatgtgagtttgggactgcctggcaacatttatatttcttattcagaacccttgatgagactatttttaaacatactagtctgctgatagaaagcactatacatcctattgtttctttctttccaaaatcagccttctgtctgtaacaaaaatgtactttatagagatggaggaaaaggtctaatactacatagccttaagtgtttctgtcattgttcaagtgtattttctgtaacagaaacatatttggaatgtttttcttttccccttataaattgtaattcctgaaatactgctgctttaaaaagtcccactgtcagattatattatctaacaattgaatattgtaaatatacttgtcttacctctcaataaaagggtacttttctattaattggtggtcaagtatatctgtgttatgaagttctaaaagctaatttagcattgcaaaataacctcatttttaaaaaattagccttatatgcagtgttctatttatcaaatgatcttcacatctttcatttccaaattgttgaaatgtactaatgaatacaaatagacttcaagtaagcaaaaatgttcttaattttgaaaactgtaaaataaagtcacttaccttgggcaatatgctatttttta

SEQ ID NO: 434601 - DNA, 3212 bp, Homo sapiens
aagcgctcttaaagcggagtgagggtggctgcgtgtttccggaagacgtggcggctctcgcctgggctgtttcccggcttcatttctcccgactcagcttcccaccctgggctttccgaggtgctttcgccgctgtccccaccactgcagccatgatctccttaacggacacgcagaaaattggaatgggattaacaggatttggagtgtttttcctgttctttggaatgattctcttttttgacaaagcactactggctattggaaatgttttatttgtagccggcttggcttttgtaattggtttagaaagaacattcagattcttcttccaaaaacattggcctttgataggcatgatcttcgaaatttatggattttttctcttgttcaggggcttctttcctgtcgttgttggctttattagaagagtgccagtccttggatccctcctaaatttacctggaattagatcatttgtagataaagttggagaaagcaacaatatggtataacaacaagtgaatttgaagactcatttaaaatattgtgttatttataaagtcatttgaagaatattcagcacaaaattaaattacatgaaatagcttgtaatgttctttacaggagtttaaaacgtatagcctacaaagtaccagcagcaaattagcaaagaagcagtgaaaacaggcttctactcaagtgaactaagaagaagtcagcaagcaaactgagagaggtgaaatccatgttaatgatgcttaagaaactcttgaaggctatttgtgttgtttttccacaatgtgcgaaactcagccatccttagagaactgtggtgcctgtttcttttctttttattttgaaggctcaggagcatccataggcatttgctttttagaagtgtccactgcaatggcaaaaatatttccagttgcactgtatctctggaagtgatgcatgaattcgattggattgtgtcattttaaagtattaaaaccaaggaaaccccaattttgatgtatggattacttttttttgtaaacatggttaaaataaaacttttgtggttcttctgaatcttaatatttcaaagccaggtgaaaatctgaactagatattctttgttggaatatgcaaaggtcattctttactaacttttagttactaaattatagctaagttttgtcagcagcatactccggaaagtctcatacttcttgggagtctgccctcctaagtatctgtctatatcattcattacgtgtaagtatttaacaaaaaagcattcttgaccatgaatgaagtagtttgtttcatagcttgtctcattgaatagtattattgaagatactaaatgatgcaaaccaaatggattttttccatgtcatgatgtaatttttctttcttctttcttttttttaaattttagcagtggcttattatttgtttttcataaattaaaataacttttgataatgtttactttaagacatgtaacatgttaaaaggttaaacttatggctgtttttaaagggctattcatttaatctgagttttcccttattttcagctttttcctagcatataatagtcattaagcatgacatatccttcatatgatcactcatcttgagttaattagaaaatacctgagttcacgtgctaaagtcatttcactgtaataaactgactatggtttcttaagaacatgacactaaaaaaaaagtggtttttttccaccgttgctgattattagacagtaggaaatagctgttttctttagttttacaagatgtgacagctttagtggtagatgtagggaaacatttcaacagccatagtactatttgttttaccactgattgcactgttttgtttttttaacagttgcaaagctttttaatgcataaaagtataattgaaatctgtggtatttatttacaaacatgtctacaaaaatagattacagcttattttatttttagttaaatctcttaatacacagagaactcccaatcttgctcatctaaataaggaaagacttggtgtatagtgtgatggtttagtcttaaggattaagacatttttggtacttgcatttgacttacgatgtatctgtgaaaatgggatgatattgacaaatggagactcctacctcaatagttaatggaataataagaggctactgttgtgtctaatgttcttcaaaaaagtaatatcctcacttggagagtgtcaaatacatactttgaggattgactttatataaggtgccctgtagaaatctgttacacatatttttgacccatattatttacaatgtcttgataattctacctttttagagcaagaatagtatctgctaatgtaagggacatctgtatttaactcctttgtagacatgaatttctatcaaaatgttctttgcactgtaacagagattccttttttcaataatcttaattcaaaagcattattagacttgaaagggtttgataatctcccagtccttagtaaagattgagagaggctggagcagttttcagttttaaatgagtctgcagttaatatcaaatgtgagtttgggactgcctggcaacatttatatttcttattcagaacccttgatgagactatttttaaacatactagtctgctgatagaaagcactatacatcctattgtttctttctttccaaaatcagccttctgtctgtaacaaaaatgtactttatagagatggaggaaaaggtctaatactacatagccttaagtgtttctgtcattgttcaagtgtattttctgtaacagaaacatatttggaatgtttttcttttccccttataaattgtaattcctgaaatactgctgctttaaaaagtcccactgtcagattatattatctaacaattgaatattgtaaatatacttgtcttacctctcaataaaagggtacttttctattaattggtggtcaagtatatctgtgttatgaagttctaaaagctaatttagcattgcaaaataacctcatttttaaaaaattagccttatatgcagtgttctatttatcaaatgatcttcacatctttcatttccaaattgttgaaatgtactaatgaatacaaatagacttcaagtaagcaaaaatgttcttaattttgaaaactgtaaaataaagtcacttaccttgggcaatatgctatttttta

SEQ ID NO: 434602 - DNA, 2995 bp, Homo sapiens
aagcgctcttaaagcggagtgagggtggctgcgtgtttccggaagacgtggcggctctcgcctgggctgtttcccggcttcatttctcccgactcagcttcccaccctgggctttccgaggtgctttcgccgctgtccccaccactgcagccatgatctccttaacggacacgcagagggcttctttcctgtcgttgttggctttattagaagagtgccagtccttggatccctcctaaatttacctggaattagatcatttgtagataaagttggagaaagcaacaatatggtataacaacaagtgaatttgaagactcatttaaaatattgtgttatttataaagtcatttgaagaatattcagcacaaaattaaattacatgaaatagcttgtaatgttctttacaggagtttaaaacgtatagcctacaaagtaccagcagcaaattagcaaagaagcagtgaaaacaggcttctactcaagtgaactaagaagaagtcagcaagcaaactgagagaggtgaaatccatgttaatgatgcttaagaaactcttgaaggctatttgtgttgtttttccacaatgtgcgaaactcagccatccttagagaactgtggtgcctgtttcttttctttttattttgaaggctcaggagcatccataggcatttgctttttagaagtgtccactgcaatggcaaaaatatttccagttgcactgtatctctggaagtgatgcatgaattcgattggattgtgtcattttaaagtattaaaaccaaggaaaccccaattttgatgtatggattacttttttttgtaaacatggttaaaataaaacttttgtggttcttctgaatcttaatatttcaaagccaggtgaaaatctgaactagatattctttgttggaatatgcaaaggtcattctttactaacttttagttactaaattatagctaagttttgtcagcagcatactccggaaagtctcatacttcttgggagtctgccctcctaagtatctgtctatatcattcattacgtgtaagtatttaacaaaaaagcattcttgaccatgaatgaagtagtttgtttcatagcttgtctcattgaatagtattattgaagatactaaatgatgcaaaccaaatggattttttccatgtcatgatgtaatttttctttcttctttcttttttttaaattttagcagtggcttattatttgtttttcataaattaaaataacttttgataatgtttactttaagacatgtaacatgttaaaaggttaaacttatggctgtttttaaagggctattcatttaatctgagttttcccttattttcagctttttcctagcatataatagtcattaagcatgacatatccttcatatgatcactcatcttgagttaattagaaaatacctgagttcacgtgctaaagtcatttcactgtaataaactgactatggtttcttaagaacatgacactaaaaaaaaagtggtttttttccaccgttgctgattattagacagtaggaaatagctgttttctttagttttacaagatgtgacagctttagtggtagatgtagggaaacatttcaacagccatagtactatttgttttaccactgattgcactgttttgtttttttaacagttgcaaagctttttaatgcataaaagtataattgaaatctgtggtatttatttacaaacatgtctacaaaaatagattacagcttattttatttttagttaaatctcttaatacacagagaactcccaatcttgctcatctaaataaggaaagacttggtgtatagtgtgatggtttagtcttaaggattaagacatttttggtacttgcatttgacttacgatgtatctgtgaaaatgggatgatattgacaaatggagactcctacctcaatagttaatggaataataagaggctactgttgtgtctaatgttcttcaaaaaagtaatatcctcacttggagagtgtcaaatacatactttgaggattgactttatataaggtgccctgtagaaatctgttacacatatttttgacccatattatttacaatgtcttgataattctacctttttagagcaagaatagtatctgctaatgtaagggacatctgtatttaactcctttgtagacatgaatttctatcaaaatgttctttgcactgtaacagagattccttttttcaataatcttaattcaaaagcattattagacttgaaagggtttgataatctcccagtccttagtaaagattgagagaggctggagcagttttcagttttaaatgagtctgcagttaatatcaaatgtgagtttgggactgcctggcaacatttatatttcttattcagaacccttgatgagactatttttaaacatactagtctgctgatagaaagcactatacatcctattgtttctttctttccaaaatcagccttctgtctgtaacaaaaatgtactttatagagatggaggaaaaggtctaatactacatagccttaagtgtttctgtcattgttcaagtgtattttctgtaacagaaacatatttggaatgtttttcttttccccttataaattgtaattcctgaaatactgctgctttaaaaagtcccactgtcagattatattatctaacaattgaatattgtaaatatacttgtcttacctctcaataaaagggtacttttctattaattggtggtcaagtatatctgtgttatgaagttctaaaagctaatttagcattgcaaaataacctcatttttaaaaaattagccttatatgcagtgttctatttatcaaatgatcttcacatctttcatttccaaattgttgaaatgtactaatgaatacaaatagacttcaagtaagcaaaaatgttcttaattttgaaaactgtaaaataaagtcacttaccttgggcaatatgctatttttta

SEQ ID NO: 434603 - DNA, 3122 bp, Homo sapiens
aagcgctcttaaagcggagtgagggtggctgcgtgtttccggaagacgtggcggctctcgcctgggctgtttcccggcttcatttctcccgactcagcttcccaccctgggctttccgaggtgctttcgccgctgtccccaccactgcagccatgatctccttaacggacacgcagaaaattggaatgggattaacaggatttggagtgtttttcctgttctttggaatgattctcttttttgacaaagcactactggctattggaaatgaatgaaacctgtcagctttctgtttaaataaaaggggcttctttcctgtcgttgttggctttattagaagagtgccagtccttggatccctcctaaatttacctggaattagatcatttgtagataaagttggagaaagcaacaatatggtataacaacaagtgaatttgaagactcatttaaaatattgtgttatttataaagtcatttgaagaatattcagcacaaaattaaattacatgaaatagcttgtaatgttctttacaggagtttaaaacgtatagcctacaaagtaccagcagcaaattagcaaagaagcagtgaaaacaggcttctactcaagtgaactaagaagaagtcagcaagcaaactgagagaggtgaaatccatgttaatgatgcttaagaaactcttgaaggctatttgtgttgtttttccacaatgtgcgaaactcagccatccttagagaactgtggtgcctgtttcttttctttttattttgaaggctcaggagcatccataggcatttgctttttagaagtgtccactgcaatggcaaaaatatttccagttgcactgtatctctggaagtgatgcatgaattcgattggattgtgtcattttaaagtattaaaaccaaggaaaccccaattttgatgtatggattacttttttttgtaaacatggttaaaataaaacttttgtggttcttctgaatcttaatatttcaaagccaggtgaaaatctgaactagatattctttgttggaatatgcaaaggtcattctttactaacttttagttactaaattatagctaagttttgtcagcagcatactccggaaagtctcatacttcttgggagtctgccctcctaagtatctgtctatatcattcattacgtgtaagtatttaacaaaaaagcattcttgaccatgaatgaagtagtttgtttcatagcttgtctcattgaatagtattattgaagatactaaatgatgcaaaccaaatggattttttccatgtcatgatgtaatttttctttcttctttcttttttttaaattttagcagtggcttattatttgtttttcataaattaaaataacttttgataatgtttactttaagacatgtaacatgttaaaaggttaaacttatggctgtttttaaagggctattcatttaatctgagttttcccttattttcagctttttcctagcatataatagtcattaagcatgacatatccttcatatgatcactcatcttgagttaattagaaaatacctgagttcacgtgctaaagtcatttcactgtaataaactgactatggtttcttaagaacatgacactaaaaaaaaagtggtttttttccaccgttgctgattattagacagtaggaaatagctgttttctttagttttacaagatgtgacagctttagtggtagatgtagggaaacatttcaacagccatagtactatttgttttaccactgattgcactgttttgtttttttaacagttgcaaagctttttaatgcataaaagtataattgaaatctgtggtatttatttacaaacatgtctacaaaaatagattacagcttattttatttttagttaaatctcttaatacacagagaactcccaatcttgctcatctaaataaggaaagacttggtgtatagtgtgatggtttagtcttaaggattaagacatttttggtacttgcatttgacttacgatgtatctgtgaaaatgggatgatattgacaaatggagactcctacctcaatagttaatggaataataagaggctactgttgtgtctaatgttcttcaaaaaagtaatatcctcacttggagagtgtcaaatacatactttgaggattgactttatataaggtgccctgtagaaatctgttacacatatttttgacccatattatttacaatgtcttgataattctacctttttagagcaagaatagtatctgctaatgtaagggacatctgtatttaactcctttgtagacatgaatttctatcaaaatgttctttgcactgtaacagagattccttttttcaataatcttaattcaaaagcattattagacttgaaagggtttgataatctcccagtccttagtaaagattgagagaggctggagcagttttcagttttaaatgagtctgcagttaatatcaaatgtgagtttgggactgcctggcaacatttatatttcttattcagaacccttgatgagactatttttaaacatactagtctgctgatagaaagcactatacatcctattgtttctttctttccaaaatcagccttctgtctgtaacaaaaatgtactttatagagatggaggaaaaggtctaatactacatagccttaagtgtttctgtcattgttcaagtgtattttctgtaacagaaacatatttggaatgtttttcttttccccttataaattgtaattcctgaaatactgctgctttaaaaagtcccactgtcagattatattatctaacaattgaatattgtaaatatacttgtcttacctctcaataaaagggtacttttctattaattggtggtcaagtatatctgtgttatgaagttctaaaagctaatttagcattgcaaaataacctcatttttaaaaaattagccttatatgcagtgttctatttatcaaatgatcttcacatctttcatttccaaattgttgaaatgtactaatgaatacaaatagacttcaagtaagcaaaaatgttcttaattttgaaaactgtaaaataaagtcacttaccttgggcaatatgctatttttta

SEQ ID NO: 434604 - DNA, 1486 bp, Homo sapiens
ccgtgttaatgtgaccttgatctgttctcacaaaacgcgggcatcaatctccaaattatctaaactgctttgggaaggcttttcccttattttcagctttttcctagcatataatagtcattaagcatgacatatccttcatatgatcactcatcttgagttaattagaaaatacctgagttcacgtgctaaagtcatttcactgtaataaactgactatggtttcttaagaacatgacactaaaaaaaaagtggtttttttccaccgttgctgattattagacagtaggaaatagctgttttctttagttttacaagatgtgacagctttagtggtagatgtagggaaacatttcaacagccatagtactatttgttttaccactgattgcactgttttgtttttttaacagttgcaaagctttttaatgcataaaagtataattgaaatctgtggtatttatttacaaacatgtctacaaaaatagattacagcttattttatttttagttaaatctcttaatacacagagaactcccaatcttgctcatctaaataaggaaagacttggtgtatagtgtgatggtttagtcttaaggattaagacatttttggtacttgcatttgacttacgatgtatctgtgaaaatgggatgatattgacaaatggagactcctacctcaatagttaatggaataataagaggctactgttgtgtctaatgttcttcaaaaaagtaatatcctcacttggagagtgtcaaatacatactttgaggattgactttatataaggtgccctgtagaaatctgttacacatatttttgacccatattatttacaatgtcttgataattctacctttttagagcaagaatagtatctgctaatgtaagggacatctgtatttaactcctttgtagacatgaatttctatcaaaatgttctttgcactgtaacagagattccttttttcaataatcttaattcaaaagcattattagacttgaaagggtttgataatctcccagtccttagtaaagattgagagaggctggagcagttttcagttttaaatgagtctgcagttaatatcaaatgtgagtttgggactgcctggcaacatttatatttcttattcagaacccttgatgagactatttttaaacatactagtctgctgatagaaagcactatacatcctattgtttctttctttccaaaatcagccttctgtctgtaacaaaaatgtactttatagagatggaggaaaaggtctaatactacatagccttaagtgtttctgtcattgttcaagtgtattttctgtaacagaaacatatttggaatgtttttcttttccccttataaattgtaattcctgaaatactgctgctttaaaaagtcccactgtcagattatattatctaacaattgaatattgtaaatatacttgtcttacctctcaataaaagggtactttt

SEQ ID NO: 434605 - DNA, 372 bp, Homo sapiens
tcacaaaatttttaattaagtttgtagttatttctaagtttgaagaccctcaattattcagaattttaacaggatactttctttttccttggttagcaattattttgaaaatagaaaatgtgtaaatattaagaaccttttttttccctctcccaggggcttctttcctgtcgttgttggctttattagaagagtgccagtccttggatccctcctaaatttacctggaattagatcagtaagtaatcatgtatattttaggccaacaaaatacgtattttgatgctttttacttctagaaatttgagtaattgatacttggttaattgctgagttttgtattatgatatagttacttcacatagatcatga

SEQ ID NO: 434606 - DNA, 3014 bp, Homo sapiens
aagcgctcttaaagcggagtgagggtggctgcgtgtttccggaagacgtggcggctctcgcctgggctgtttcccggcttcatttctcccgactcagcttcccaccctgggctttccgaggtgctttcgccgctgtccccaccactgcagccatgatctccttaacggacacgcagaaaattggaatgggattaacaggatttggagtgtttttcctgttctttggaatgattctcttttttgacaaagcactactggctattggaaatgttttatttgtagccggcttggcttttgtaattggtttagaaagaacattcagattcttcttccaaaaacataaaatgaaagctacaggtttttttctgggtggtgtatttgtagtccttattggttggcctttgataggcatgatcttcgaaatttatggattttttctcttgttcaggggcttctttcctgtcgttgttggctttattagaagagtgccagtccttggatccctcctaaatttacctggaattagatcatttgtagataaagttggagaaagcaacaatatggtataacaacaagtgaatttgaagactcatttaaaatattgtgttatttataaagtcatttgaagaatattcagcacaaaattaaattacatgaaatagcttgtaatgttctttacaggagtttaaaacgtatagcctacaaagtaccagcagcaaattagcaaagaagcagtgaaaacaggcttctactcaagtgaactaagaagaagtcagcaagcaaactgagagaggtgaaatccatgttaatgatgcttaagaaactcttgaaggctatttgtgttgtttttccacaatgtgcgaaactcagccatccttagagaactgtggtgcctgtttcttttctttttattttgaaggctcaggagcatccataggcatttgctttttagaagtgtccactgcaatggcaaaaatatttccagttgcactgtatctctggaagtgatgcatgaattcgattggattgtgtcattttaaagtattaaaaccaaggaaaccccaattttgatgtatggattacttttttttgtaaacatggttaaaataaaacttttgtggttcttctgaatcttaatatttcaaagccaggtgaaaatctgaactagatattctttgttggaatatgcaaaggtcattctttactaacttttagttactaaattatagctaagttttgtcagcagcatactccggaaagtctcatacttcttgggagtctgccctcctaagtatctgtctatatcattcattacgtgtaagtatttaacaaaaaagcattcttgaccatgaatgaagtagtttgtttcatagcttgtctcattgaatagtattattgaagatactaaatgatgcaaaccaaatggattttttccatgtcatgatgtaatttttctttcttctttcttttttttaaattttagcagtggcttattatttgtttttcataaattaaaataacttttgataatgtttactttaagacatgtaacatgttaaaaggttaaacttatggctgtttttaaagggctattcatttaatctgagttttcccttattttcagctttttcctagcatataatagtcattaagcatgacatatccttcatatgatcactcatcttgagttaattagaaaatacctgagttcacgtgctaaagtcatttcactgtaataaactgactatggtttcttaagaacatgacactaaaaaaaaagtggtttttttccaccgttgctgattattagacagtaggaaatagctgttttctttagttttacaagatgtgacagctttagtggtagatgtagggaaacatttcaacagccatagtactatttgttttaccactgattgcactgttttgtttttttaacagttgcaaagctttttaatgcataaaagtataattgaaatctgtggtatttatttacaaacatgtctacaaaaatagattacagcttattttatttttagttaaatctcttaatacacagagaactcccaatcttgctcatctaaataaggaaagacttggtgtatagtgtgatggtttagtcttaaggattaagacatttttggtacttgcatttgacttacgatgtatctgtgaaaatgggatgatattgacaaatggagactcctacctcaatagttaatggaataataagaggctactgttgtgtctaatgttcttcaaaaaagtaatatcctcacttggagagtgtcaaatacatactttgaggattgactttatataaggtgccctgtagaaatctgttacacatatttttgacccatattatttacaatgtcttgataattctacctttttagagcaagaatagtatctgctaatgtaagggacatctgtatttaactcctttgtagacatgaatttctatcaaaatgttctttgcactgtaacagagattccttttttcaataatcttaattcaaaagcattattagacttgaaagggtttgataatctcccagtccttagtaaagattgagagaggctggagcagttttcagttttaaatgagtctgcagttaatatcaaatgtgagtttgggactgcctggcaacatttatatttcttattcagaacccttgatgagactatttttaaacatactagtctgctgatagaaagcactatacatcctattgtttctttctttccaaaatcagccttctgtctgtaacaaaaatgtactttatagagatggaggaaaaggtctaatactacatagccttaagtgtttctgtcattgttcaagtgtattttctgtaacagaaacatatttggaatgtttttcttttccccttataaattgtaattcctgaaatactgctgctttaaaaagtcccactgtcagattatattatctaacaattgaatattgtaaatatacttgtcttacctctcaataaaagggtactttt

SEQ ID NO: 434607 - DNA, 827 bp, Homo sapiens
  misc_feature (821)..(821): n is a, c, g, or t
aagcgctcttaaagcggagtgagggtggctgcgtgtttccggaagacgtggcggctctcgcctgggctgtttcccggcttcatttctcccgactcagcttcccaccctgggctttccgaggtgctttcgccgctgtccccaccactgcagccatgatctccttaacggacacgcagaaaattggaatgggattaacaggatttggagtgtttttcctgttctttggaatgattctcttttttgacaaagcactactggctattggaaatgttttatttgtagccggcttggcttttgtaattggtttagaaagaacattcagattcttcttccaaaaacataaaatgaaagctacaggtttttttctgggtggtgtatttgtagtccttattggttggcctttgataggcatgatcttcgaaatttatggattttttctcttgttcaggggcttctttcctgtcgttgttggctttattagaagagtgccagtccttggatccctcctaaatttacctggaattagatcatttgtagataaagttggagaaagcaacaatatggtataacaacaagtgaatttgaagactcatttaaaatattgtgttatttataaagtcatttgaagaatattcagcacatacctacaaagtaccagcgcaattagcaagaagcatgaaacggtctctcagtgaccggagagtccagcactggaagggcaccgtagcgctctccaggtgggtgttcccatggcccccctccggggttcttagggcgccctctatcgcgggtctctttgttttttacttcttatctcttcntcgccc

SEQ ID NO: 434608 - DNA, 3116 bp, Homo sapiens
aagcgctcttaaagcggagtgagggtggctgcgtgtttccggaagacgtggcggctctcgcctgggctgtttcccggcttcatttctcccgactcagcttcccaccctgggctttccgaggtgctttcgccgctgtccccaccactgcagccatgatctccttaacggacacgcagaaaattggaatgggattaacaggatttggagtgtttttcctgttctttggaatgattctcttttttgacaaagcactactggctattggaaatgttttatttgtagccggcttggcttttgtaattggtttagaaagaacattcagattcttcttccaaaaacataaaatgaaagctacaggtttttttctgggtggtgtatttgtagtccttattggttggcctttgataggcatgatcttcgaaatttatggattttttctcttgttcaggggcttctttcctgtcgttgttggctttattagaagagtgccagtccttggatccctcctaaatttacctggaattagatcatttgtagataaagttggagaaagcaacaatatggtataacaacaagtgaatttgaagactcatttaaaatattgtgttatttataaagtcatttgaagaatattcagcacaaaattaaattacatgaaatagcttgtaatgttctttacaggagtttaaaacgtatagcctacaaagtaccagcagcaaattagcaaagaagcagtgaaaacaggcttctactcaagtgaactaagaagaagtcagcaagcaaactgagagaggtgaaatccatgttaatgatgcttaagaaactcttgaaggctatttgtgttgtttttccacaatgtgcgaaactcagccatccttagagaactgtggtgcctgtttcttttctttttattttgaaggctcaggagcatccataggcatttgctttttagaagtgtccactgcaatggcaaaaatatttccagttgcactgtatctctggaagtgatgcatgaattcgattggattgtgtcattttaaagtattaaaaccaaggaaaccccaattttgatgtatggattacttttttttgtaaacatggttaaaataaaacttttgtggttcttctgaatcttaatatttcaaagccaggtgaaaatctgaactagatattctttgttggaatatgcaaaggtcattctttactaacttttagttactaaattatagctaagttttgtcagcagcatactccggaaagtctcatacttcttgggagtctgccctcctaagtatctgtctatatcattcattacgtgtaagtatttaacaaaaaagcattcttgaccatgaatgaagtagtttgtttcatagcttgtctcattgaatagtattattgaagatactaaatgatgcaaaccaaatggattttttccatgtcatgatgtaatttttctttcttctttcttttttttaaattttagcagtggcttattatttgtttttcataaattaaaataacttttgataatgtttactttaagacatgtaacatgttaaaaggttaaacttatggctgtttttaaagggctattcatttaatctgagttttcccttattttcagctttttcctagcatataatagtcattaagcatgacatatccttcatatgatcactcatcttgagttaattagaaaatacctgagttcacgtgctaaagtcatttcactgtaataaactgactatggtttcttaagaacatgacactaaaaaaaaagtggtttttttccaccgttgctgattattagacagtaggaaatagctgttttctttagttttacaagatgtgacagctttagtggtagatgtagggaaacatttcaacagccatagtactatttgttttaccactgattgcactgttttgtttttttaacagttgcaaagctttttaatgcataaaagtataattgaaatctgtggtatttatttacaaacatgtctacaaaaatagattacagcttattttatttttagttaaatctcttaatacacagagaactcccaatcttgctcatctaaataaggaaagacttggtgtatagtgtgatggtttagtcttaaggattaagacatttttggtacttgcatttgacttacgatgtatctgtgaaaatgggatgatattgacaaatggagactcctacctcaatagttaatggaataataagaggctactgttgtgtctaatgttcttcaaaaaagtaatatcctcacttggagagtgtcaaatacatactttgaggattgactttatataaggtgccctgtagaaatctgttacacatatttttgacccatattatttacaatgtcttgataattctacctttttagagcaagaatagtatctgctaatgtaagggacatctgtatttaactcctttgtagacatgaatttctatcaaaatgttctttgcactgtaacagagattccttttttcaataatcttaattcaaaagcattattagacttgaaagggtttgataatctcccagtccttagtaaagattgagagaggctggagcagttttcagttttaaatgagtctgcagttaatatcaaatgtgagtttgggactgcctggcaacatttatatttcttattcagaacccttgatgagactatttttaaacatactagtctgctgatagaaagcactatacatcctattgtttctttctttccaaaatcagccttctgtctgtaacaaaaatgtactttatagagatggaggaaaaggtctaatactacatagccttaagtgtttctgtcattgttcaagtgtattttctgtaacagaaacatatttggaatgtttttcttttccccttataaattgtaattcctgaaatactgctgctttaaaaagtcccactgtcagattatattatctaacaattgaatattgtaaatatacttgtcttacctctcaataaaagggtacttttttaaaaaaaacaggggggggcaaaatctgagggcaagttggtccgtttgtaaggcctaaggggttaaaggggggtaaggggagaggggttggaccttgggga

SEQ ID NO: 434609 - DNA, 3906 bp, Homo sapiens
actcgctccctcccccggatcccgactgggaagggggcggaggggacgacgtccgcgagaatgcaaaccacacaaaaccccgaagtggccgtccccgccgggctcgaacctctgcgaacacccgctgggctgctgctcccccttctttctgtctttcctttattttttggaagtgacaagggcccatctgcgcccagacccccgttcgccctctggcccgcgggcgaagaggggagagggagctgcccgcgcagtccccgggctcgggccattcgaccgggtggggggtgacggggggtcgcggaggcggccaggctaggaaaggggagaagagccgaagacagcacagacttgagcggcggcgccgcgggaggcactagagcgggcccgagcgaaacataaacaaacgcacgcacacccgagctcgggctctgaccgcggctcggctgcgccagctccggccgctgcccgctttaaaggcgcggccgcccctcccccgggcgcccctcccccttctccccgccccgccgcctagcccgggagggacctgcggctgggcggcggggggagggggctgccccgcgcgaggccgtcgattcgctcgcggctccatcgcggcctggccggggggcggtgtctgctgcgccaggttcgctggccgcacgtcttcaggtcctcctgttcctgggaggcgggcgcggcaggactgggaggtggcggcagcgggcgaggactcgccgaggacggggctccggcccgggataaccaactctccttctctcttctttggtgcttccccaggcggcggcggcggcgcccgggagccggagccttcgcggcgtccacgtccctcccccgctgcaccccgccccggcgcgagaggagagcgcgagagccccagccgcgggcgggcgggcggcgaagatggcagaggcaccggcttccccggccccgctctctccgctcgaagtggagctggacccggagttcgagccccagagccgtccgcgatcctgtacgtggcccctgcaaaggccggagctccaagcgagccctgccaagccctcgggggagacggccgccgactccatgatccccgaggaggaggacgatgaagacgacgaggacggcgggggacgggccggctcggccatggcgatcggcggcggcggcgggagcggcacgctgggctccgggctgctccttgaggactcggcccgggtgctggcacccggagggcaagaccccgggtctgggccagccaccgcggcgggcgggctgagcgggggtacacaggcgctgctgcagcctcagcaaccgctgccaccgccgcagccgggggcggctgggggctccgggcagccgaggaaatgttcgtcgcggcggaacgcctggggaaacctgtcctacgcggacctgatcacccgcgccatcgagagctccccggacaaacggctcactctgtcccagatctacgagtggatggtgcgttgcgtgccctacttcaaggataagggcgacagcaacagctctgccggctggaagaactccatccggcacaacctgtcactgcatagtcgattcatgcgggtccagaatgagggaactggcaagagctcttggtggatcatcaaccctgatggggggaagagcggaaaagccccccggcggcgggctgtctccatggacaatagcaacaagtataccaagagccgtggccgcgcagccaagaagaaggcagccctgcagacagcccccgaatcagctgacgacagtccctcccagctctccaagtggcctggcagccccacgtcacgcagcagtgatgagctggatgcgtggacggacttccgttcacgcaccaattctaacgccagcacagtcagtggccgcctgtcgcccatcatggcaagcacagagttggatgaagtccaggacgatgatgcgcctctctcgcccatgctctacagcagctcagccagcctgtcaccttcagtaagcaagccgtgcacggtggaactgccacggctgactgatatggcaggcaccatgaatctgaatgatgggctgactgaaaacctcatggacgacctgctggataacatcacgctcccgccatcccagccatcgcccactgggggactcatgcagcggagctctagcttcccgtataccaccaagggctcgggcctgggctccccaaccagctcctttaacagcacggtgttcggaccttcatctctgaactccctacgccagtctcccatgcagaccatccaagagaacaagccagctaccttctcttccatgtcacactatggtaaccagacactccaggacctgctcacttcggactcacttagccacagcgatgtcatgatgacacagtcggaccccttgatgtctcaggccagcaccgctgtgtctgcccagaattcccgccggaacgtgatgcttcgcaatgatccgatgatgtcctttgctgcccagcctaaccagggaagtttggtcaatcagaacttgctccaccaccagcaccaaacccagggcgctcttggtggcagccgtgccttgtcgaattctgtcagcaacatgggcttgagtgagtccagcagccttgggtcagccaaacaccagcagcagtctcctgtcagccagtctatgcaaaccctctcggactctctctcaggctcctccttgtactcaactagtgcaaacctgcccgtcatgggccatgagaagttccccagcgacttggacctggacatgttcaatgggagcttggaatgtgacatggagtccattatccgtagtgaactcatggatgctgatgggttggattttaactttgattccctcatctccacacagaatgttgttggtttgaacgtggggaacttcactggtgctaagcaggcctcatctcagagctgggtgccaggctgaaggatcactgaggaaggggaagtgggcaaagcagaccctcaaactgacacaagacctacagagaaaaccctttgccaaatctgctctcagcaagtggacagtgataccgtttacagcttaacacctttgtgaatcccacgccattttcctaacccagcagagactgttaatggccccttaccctgggtgaagcacttacccttggaacagaactctaaaaagtatgcaaaatcttccttgtacagggtggtgagccgcctgccagtggaggacagcacccctcagcaccacccaccctcattcagagcacaccgtgagcccccgtcggccattctgtggtgttttaatattgcgatggtttatgggacgttttaagtgttgttcttgtgtttgttttcctttgactttctgagtttttcacatgcattaacttgcggtatttttctgttaaaatgttaaccgtccttcccctagcaaatttaaaaacagaaagaaaatgttgtaccagttaccattccgggttcgagcatcacaagcttttgagcgcatggaactccataaactaacaaattacataaactaaagggggattttctttcttcttttgtttggtagaaaattatccttttctaaaaactgaacaatggcacaattgtttgctatgtgcacccgtccaggacagaaccgtgcataggcaaaaggagtggagcacagcgtccggcccagtgtgtttccggttctgagtcagggtgatctgtggacgggaccccagcaccaagtctacgggtgccagatcagtagggcctgtgatttcctgtcagtgtcctcagctaatgtgaacagtgttggtctgctggttagaaactagaatattgatattttcaggaaagaaatcagctcagctctccactcattgccaaatgtcactaaagggtttagttttaaggagaaagaaaagga

SEQ ID NO: 434610 - DNA, 4284 bp, Homo sapiens
actcgctccctcccccggatcccgactgggaagggggcggaggggacgacgtccgcgagaatgcaaaccacacaaaaccccgaagtggccgtccccgccgggctcgaacctctgcgaacacccgctgggctgctgctcccccttctttctgtctttcctttattttttggaagtgacaagggcccatctgcgcccagacccccgttcgccctctggcccgcgggcgaagaggggagagggagctgcccgcgcagtccccgggctcgggccattcgaccgggtggggggtgacggggggtcgcggaggcggccaggctaggaaaggggagaagagccgaagacagcacagacttgagcggcggcgccgcgggaggcactagagcgggcccgagcgaaacataaacaaacgcacgcacacccgagctcgggctctgaccgcggctcggctgcgccagctccggccgctgcccgctttaaaggcgcggccgcccctcccccgggcgcccctcccccttctccccgccccgccgcctagcccgggagggacctgcggctgggcggcggggggagggggctgccccgcgcgaggccgtcgattcgctcgcggctccatcgcggcctggccggggggcggtgtctgctgcgccaggttcgctggccgcacgtcttcaggtcctcctgttcctgggaggcgggcgcggcaggactgggaggtggcggcagcgggcgaggactcgccgaggacggggctccggcccgggataaccaactctccttctctcttctttggtgcttccccaggcggcggcggcggcgcccgggagccggagccttcgcggcgtccacgtccctcccccgctgcaccccgccccggcgcgagaggagagcgcgagagccccagccgcgggcgggcgggcggcgaagatggcagaggcaccggcttccccggccccgctctctccgctcgaagtggagctggacccggagttcgagccccagagccgtccgcgatcctgtacgtggcccctgcaaaggccggagctccaagcgagccctgccaagccctcgggggagacggccgccgactccatgatccccgaggaggaggacgatgaagacgacgaggacggcgggggacgggccggctcggccatggcgatcggcggcggcggcgggagcggcacgctgggctccgggctgctccttgaggactcggcccgggtgctggcacccggagggcaagaccccgggtctgggccagccaccgcggcgggcgggctgagcgggggtacacaggcgctgctgcagcctcagcaaccgctgccaccgccgcagccgggggcggctgggggctccgggcagccgaggaaatgttcgtcgcggcggaacgcctggggaaacctgtcctacgcggacctgatcacccgcgccatcgagagctccccggacaaacggctcactctgtcccagatctacgagtggatggtgcgttgcgtgccctacttcaaggataagggcgacagcaacagctctgccggctggaagaactccatccggcacaacctgtcactgcatagtcgattcatgcgggtccagaatgagggaactggcaagagctcttggtggatcatcaaccctgatggggggaagagcggaaaagccccccggcggcgggctgtctccatggacaatagcaacaagtataccaagagccgtggccgcgcagccaagaagaaggcagccctgcagacagcccccgaatcagctgacgacagtccctcccagctctccaagtggcctggcagccccacgtcacgcagcagtgatgagctggatgcgtggacggacttccgttcacgcaccaattctaacgccagcacagtcagtggccgcctgtcgcccatcatggcaagcacagagttggatgaagtccaggacgatgatgcgcctctctcgcccatgctctacagcagctcagccagcctgtcaccttcagtaagcaagccgtgcacggtggaactgccacggctgactgatatggcaggcaccatgaatctgaatgatgggctgactgaaaacctcatggacgacctgctggataacatcacgctcccgccatcccagccatcgcccactgggggactcatgcagcggagctctagcttcccgtataccaccaagggctcgggcctgggctccccaaccagctcctttaacagcacggtgttcggaccttcatctctgaactccctacgccagtctcccatgcagaccatccaagagaacaagccagctaccttctcttccatgtcacactatggtaaccagacactccaggacctgctcacttcggactcacttagccacagcgatgtcatgatgacacagtcggaccccttgatgtctcaggccagcaccgctgtgtctgcccagaattcccgccggaacgtgatgcttcgcaatgatccgatgatgtcctttgctgcccagcctaaccagggaagtttggtcaatcagaacttgctccaccaccagcaccaaacccagggcgctcttggtggcagccgtgccttgtcgaattctgtcagcaacatgggcttgagtgagtccagcagccttgggtcagccaaacaccagcagcagtctcctgtcagccagtctatgcaaaccctctcggactctctctcaggctcctccttgtactcaactagtgcaaacctgcccgtcatgggccatgagaagttccccagcgacttggacctggacatgttcaatgggagcttggaatgtgacatggagtccattatccgtagtgaactcatggatgctgatgggttggattttaactttgattccctcatctccacacagaatgttgttggtttgaacgtggggaacttcactggtgctaagcaggcctcatctcagagctgggtgccaggctgaaggatcactgaggaaggggaagtgggcaaagcagaccctcaaactgacacaagacctacagagaaaaccctttgccaaatctgctctcagcaagtggacagtgataccgtttacagcttaacacctttgtgaatcccacgccattttcctaacccagcagagactgttaatggccccttaccctgggtgaagcacttacccttggaacagaactctaaaaagtatgcaaaatcttccttgtacagggtggtgagccgcctgccagtggaggacagcacccctcagcaccacccaccctcattcagagcacaccgtgagcccccgtcggccattctgtggtgttttaatattgcgatggtttatgggacgttttaagtgttgttcttgtgtttgttttcctttgactttctgagtttttcacatgcattaacttgcggtatttttctgttaaaatgttaaccgtccttcccctagcaaatttaaaaacagaaagaaaatgttgtaccagttaccattccgggttcgagcatcacaagcttttgagcgcatggaactccataaactaacaaattacataaactaaagggggattttctttcttcttttgtttggtagaaaattatccttttctaaaaactgaacaatggcacaattgtttgctatgtgcacccgtccaggacagaaccgtgcataggcaaaaggagtggagcacagcgtccggcccagtgtgtttccggttctgagtcagggtgatctgtggacgggaccccagcaccaagtctacgggtgccagatcagtagggcctgtgatttcctgtcagtgtcctcagctaatgtgaacagtgttggtctgctggttagaaactagaatattgatattttcaggaaagaaatcagctcagctctccactcattgccaaatgtcactaaagggtttagttttaaggagaaagaaaaggaaaaaaaaaaaaaacaaaaaagtcctgtttggcttggcagaacaaatgaccttacaggtgagcattaagcttgcagtgagaaatgtgcgaagagtaaaaacccaagtcaatgctgaggcagttctaacttcactgttttcctaaatacacatccttgattattttcagccttgctatataatctgatctgctagaagtgtatgagtgagaggcaatagcatacaaactgattttttaaattataagcttaggttgtaattgtacaagtgactcaatggaagtacaaaatagggcagttttaacttttttttctgcttctatggatttcattttgttgtgttttcaaaaagttatggtgctgtataggtgctttctgttt

SEQ ID NO: 434611 - DNA, 3287 bp, Homo sapiens
ggggaggaggaggaatgtggaaggtggcggcgcgcgagctgacaggcggttcctcgggcgggctgcggcgacggcccgagcgcttctccttcgccgaggttgcgcgccccctcctcgccgtgccccgggcccgcgcgggatcgtgcgtcgtcccgccgcgtccctgaagggaaggaagcgaggcggcggcggcggcgcccgggagccggagccttcgcggcgtccacgtccctcccccgctgcaccccgccccggcgcgagaggagagcgcgagagccccagccgcgggcgggcgggcggcgaagatggcagaggcaccggcttccccggccccgctctctccgctcgaagtggagctggacccggagttcgagccccagagccgtccgcgatcctgtacgtggcccctgcaaaggccggagctccaagcgagccctgccaagccctcgggggagacggccgccgactccatgatccccgaggaggaggacgatgaagacgacgaggacggcgggggacgggccggctcggccatggcgatcggcggcggcggcgggagcggcacgctgggctccgggctgctccttgaggactcggcccgggtgctggcacccggagggcaagaccccgggtctgggccagccaccgcggcgggcgggctgagcgggggtacacaggcgctgctgcagcctcagcaaccgctgccaccgccgcagccgggggcggctgggggctccgggcagccgaggaaatgttcgtcgcggcggaacgcctggggaaacctgtcctacgcggacctgatcacccgcgccatcgagagctccccggacaaacggctcactctgtcccagatctacgagtggatggtgcgttgcgtgccctacttcaaggataagggcgacagcaacagctctgccggctggaagaactccatccggcacaacctgtcactgcatagtcgattcatgcgggtccagaatgagggaactggcaagagctcttggtggatcatcaaccctgatggggggaagagcggaaaagccccccggcggcgggctgtctccatggacaatagcaacaagtataccaagagccgtggccgcgcagccaagaagaaggcagccctgcagacagcccccgaatcagctgacgacagtccctcccagctctccaagtggcctggcagccccacgtcacgcagcagtgatgagctggatgcgtggacggacttccgttcacgcaccaattctaacgccagcacagtcagtggccgcctgtcgcccatcatggcaagcacagagttggatgaagtccaggacgatgatgcgcctctctcgcccatgctctacagcagctcagccagcctgtcaccttcagtaagcaagccgtgcacggtggaactgccacggctgactgatatggcaggcaccatgaatctgaatgatgggctgactgaaaacctcatggacgacctgctggataacatcacgctcccgccatcccagccatcgcccactgggggactcatgcagcggagctctagcttcccgtataccaccaagggctcgggcctgggctccccaaccagctcctttaacagcacggtgttcggaccttcatctctgaactccctacgccagtctcccatgcagaccatccaagagaacaagccagctaccttctcttccatgtcacactatggtaaccagacactccaggacctgctcacttcggactcacttagccacagcgatgtcatgatgacacagtcggaccccttgatgtctcaggccagcaccgctgtgtctgcccagaattcccgccggaacgtgatgcttcgcaatgatccgatgatgtcctttgctgcccagcctaaccagggaagtttggtcaatcagaacttgctccaccaccagcaccaaacccagggcgctcttggtggcagccgtgccttgtcgaattctgtcagcaacatgggcttgagtgagtccagcagccttgggtcagccaaacaccagcagcagtctcctgtcagccagtctatgcaaaccctctcggactctctctcaggctcctccttgtactcaactagtgcaaacctgcccgtcatgggccatgagaagttccccagcgacttggacctggacatgttcaatgggagcttggaatgtgacatggagtccattatccgtagtgaactcatggatgctgatgggttggattttaactttgattccctcatctccacacagaatgttgttggtttgaacgtggggaacttcactggtgctaagcaggcctcatctcagagctgggtgccaggctgaaggatcactgaggaaggggaagtgggcaaagcagaccctcaaactgacacaagacctacagagaaaaccctttgccaaatctgctctcagcaagtggacagtgataccgtttacagcttaacacctttgtgaatcccacgccattttcctaacccagcagagactgttaatggccccttaccctgggtgaagcacttacccttggaacagaactctaaaaagtatgcaaaatcttccttgtacagggtggtgagccgcctgccagtggaggacagcacccctcagcaccacccaccctcattcagagcacaccgtgagcccccgtcggccattctgtggtgttttaatattgcgatggtttatgggacgttttaagtgttgttcttgtgtttgttttcctttgactttctgagtttttcacatgcattaacttgcggtatttttctgttaaaatgttaaccgtccttcccctagcaaatttaaaaacagaaagaaaatgttgtaccagttaccattccgggttcgagcatcacaagcttttgagcgcatggaactccataaactaacaaattacataaactaaagggggattttctttcttcttttgtttggtagaaaattatccttttctaaaaactgaacaatggcacaattgtttgctatgtgcacccgtccaggacagaaccgtgcataggcaaaaggagtggagcacagcgtccggcccagtgtgtttccggttctgagtcagggtgatctgtggacgggaccccagcaccaagtctacgggtgccagatcagtagggcctgtgatttcctgtcagtgtcctcagctaatgtgaacagtgttggtctgctggttagaaactagaatattgatattttcaggaaagaaatcagctcagctctccactcattgccaaatgtcactaaagggtttagttttaaggagaaagaaaagga

SEQ ID NO: 434612 - DNA, 2926 bp, Homo sapiens
tagcctcagtagtactatagtgagaggtaaaagacaagaatcttaccttatttcatacagctggagcaaaaagggacataagattagcttccaaacttatgttatgcctttaaatgaaaacagaagtagcgtggctttttctgttacttagaaactttttctcttgggacatcataaagagaacactgatctaataaacgacattctcctgcttgaaacttggttctctgaggtaatgagccagtccattagtttcagtgtaccttcctcagtgatgtatctatgttcatctatctggccttgtgaatatttttttgacgtaacatgagctagactgagtatgaatggctccaaacttaggagtgactaggatttacagatgaagcagtatggatcagtttctttgggaaggttcttggaggaccctatgggaggaaaccctggacagaacgcattccctgggatgaaaaaccctgctcaagcctgggtacagtgacccaaggtgacagcaatgacagtggcccttcagaaaggagcaagtggaggtggaccctgcctcaaacagaactccatccggcacaacctgtcactgcatagtcgattcatgcgggtccagaatgagggaactggcaagagctcttggtggatcatcaaccctgatggggggaagagcggaaaagccccccggcggcgggctgtctccatggacaatagcaacaagtataccaagagccgtggccgcgcagccaagaagaaggcagccctgcagacagcccccgaatcagctgacgacagtccctcccagctctccaagtggcctggcagccccacgtcacgcagcagtgatgagctggatgcgtggacggacttccgttcacgcaccaattctaacgccagcacagtcagtggccgcctgtcgcccatcatggcaagcacagagttggatgaagtccaggacgatgatgcgcctctctcgcccatgctctacagcagctcagccagcctgtcaccttcagtaagcaagccgtgcacggtggaactgccacggctgactgatatggcaggcaccatgaatctgaatgatgggctgactgaaaacctcatggacgacctgctggataacatcacgctcccgccatcccagccatcgcccactgggggactcatgcagcggagctctagcttcccgtataccaccaagggctcgggcctgggctccccaaccagctcctttaacagcacggtgttcggaccttcatctctgaactccctacgccagtctcccatgcagaccatccaagagaacaagccagctaccttctcttccatgtcacactatggtaaccagacactccaggacctgctcacttcggactcacttagccacagcgatgtcatgatgacacagtcggaccccttgatgtctcaggccagcaccgctgtgtctgcccagaattcccgccggaacgtgatgcttcgcaatgatccgatgatgtcctttgctgcccagcctaaccagggaagtttggtcaatcagaacttgctccaccaccagcaccaaacccagggcgctcttggtggcagccgtgccttgtcgaattctgtcagcaacatgggcttgagtgagtccagcagccttgggtcagccaaacaccagcagcagtctcctgtcagccagtctatgcaaaccctctcggactctctctcaggctcctccttgtactcaactagtgcaaacctgcccgtcatgggccatgagaagttccccagcgacttggacctggacatgttcaatgggagcttggaatgtgacatggagtccattatccgtagtgaactcatggatgctgatgggttggattttaactttgattccctcatctccacacagaatgttgttggtttgaacgtggggaacttcactggtgctaagcaggcctcatctcagagctgggtgccaggctgaaggatcactgaggaaggggaagtgggcaaagcagaccctcaaactgacacaagacctacagagaaaaccctttgccaaatctgctctcagcaagtggacagtgataccgtttacagcttaacacctttgtgaatcccacgccattttcctaacccagcagagactgttaatggccccttaccctgggtgaagcacttacccttggaacagaactctaaaaagtatgcaaaatcttccttgtacagggtggtgagccgcctgccagtggaggacagcacccctcagcaccacccaccctcattcagagcacaccgtgagcccccgtcggccattctgtggtgttttaatattgcgatggtttatgggacgttttaagtgttgttcttgtgtttgttttcctttgactttctgagtttttcacatgcattaacttgcggtatttttctgttaaaatgttaaccgtccttcccctagcaaatttaaaaacagaaagaaaatgttgtaccagttaccattccgggttcgagcatcacaagcttttgagcgcatggaactccataaactaacaaattacataaactaaagggggattttctttcttcttttgtttggtagaaaattatccttttctaaaaactgaacaatggcacaattgtttgctatgtgcacccgtccaggacagaaccgtgcataggcaaaaggagtggagcacagcgtccggcccagtgtgtttccggttctgagtcagggtgatctgtggacgggaccccagcaccaagtctacgggtgccagatcagtagggcctgtgatttcctgtcagtgtcctcagctaatgtgaacagtgttggtctgctggttagaaactagaatattgatattttcaggaaagaaatcagctcagctctccactcattgccaaatgtcactaaagggtttagttttaaggagaaagaaaagga

SEQ ID NO: 434613 - DNA, 1852 bp, Homo sapiens
ggggaggaggaggaatgtggaaggtggcggcgcgcgagctgacaggcggttcctcgggcgggctgcggcgacggcccgagcgcttctccttcgccgaggttgcgcgccccctcctcgccgtgccccgggcccgcgcgggatcgtgcgtcgtcccgccgcgtccctgaagggaaggaagcgaggcggcggcggcggcgcccgggagccggagccttcgcggcgtccacgtccctcccccgctgcaccccgccccggcgcgagaggagagcgcgagagccccagccgcgggcgggcgggcggcgaagatggcagaggcaccggcttccccggccccgctctctccgctcgaagtggagctggacccggagttcgagccccagagccgtccgcgatcctgtacgtggcccctgcaaaggccggagctccaagcgagccctgccaagccctcgggggagacggccgccgactccatgatccccgaggaggaggacgatgaagacgacgaggacggcgggggacgggccggctcggccatggcgatcggcggcggcggcgggagcggcacgctgggctccgggctgctccttgaggactcggcccgggtgctggcacccggagggcaagaccccgggtctgggccagccaccgcggcgggcgggctgagcgggggtacacaggcgctgctgcagcctcagcaaccgctgccaccgccgcagccgggggcggctgggggctccgggcagccgaggaaatgttcgtcgcggcggaacgcctggggaaacctgtcctacgcggacctgatcacccgcgccatcgagagctccccggacaaacggctcactctgtcccagatctacgagtggatggtgcgttgcgtgccctacttcaaggataagggcgacagcaacagctctgccggctggaagaccctcaaactgacacaagacctacagagaaaaccctttgccaaatctgctctcagcaagtggacagtgataccgtttacagcttaacacctttgtgaatcccacgccattttcctaacccagcagagactgttaatggccccttaccctgggtgaagcacttacccttggaacagaactctaaaaagtatgcaaaatcttccttgtacagggtggtgagccgcctgccagtggaggacagcacccctcagcaccacccaccctcattcagagcacaccgtgagcccccgtcggccattctgtggtgttttaatattgcgatggtttatgggacgttttaagtgttgttcttgtgtttgttttcctttgactttctgagtttttcacatgcattaacttgcggtatttttctgttaaaatgttaaccgtccttcccctagcaaatttaaaaacagaaagaaaatgttgtaccagttaccattccgggttcgagcatcacaagcttttgagcgcatggaactccataaactaacaaattacataaactaaagggggattttctttcttcttttgtttggtagaaaattatccttttctaaaaactgaacaatggcacaattgtttgctatgtgcacccgtccaggacagaaccgtgcataggcaaaaggagtggagcacagcgtccggcccagtgtgtttccggttctgagtcagggtgatctgtggacgggaccccagcaccaagtctacgggtgccagatcagtagggcctgtgatttcctgtcagtgtcctcagctaatgtgaacagtgttggtctgctggttagaaactagaatattgatattttcaggaaagaaatcagctcagctctccactcattgccaaatgtcactaaagggtttagttttaaggagaaagaaaagga

SEQ ID NO: 434614 - DNA, 728 bp, Homo sapiens
gcttagtaattacttactctttttatggtggggaataggggagtcaagattacccacacccagcactgcagacttattaaggcctttatagaaagtggccatttcatctccactggtgttggggtattcgtggaaaagggtggtaagcaattcagttagtccacatagccagtagggaagaaccagaaaagtataactcatctacttaggatgagcggctctccttgttttagcatggaaagtcccatgtcctaggaaatccctcagtccggaagtctagaacagaatcttatctgcaccttgaacatctaactaaaaaggacccaccaaaacacccctaatatggctttctttatctcccaaagtgaatgatcccattccctttgggcttttcaacttcagagcattttgtaataaggacaacatgagaaataaggtaagtaatctttgtgctttgtccttaggatttcagacctttgaaactggtgtagcagagcagctttgctgtgctagccctgggctctgaggtgggtgagggagatggaaggccttgacaggtggccctcaggtgcccactattgctgttgcagtgcccttaatgatctctggttttcttttctcctcctttagaccctcaaactgacacaagacctacagagaaaaccctttgccaaatctgctctcagcaagtggacagtgataccgtttacagcttaacacctttgtga

SEQ ID NO: 434615 - DNA, 610 bp, Homo sapiens
acggaggatgtaatgatcgtgcctatgagtgggcgccacacaggaccccgcggccccccatggccctcggaaccgaggaattaggggcaccctgggttgctcgtcggaagggaaaccgaattgttagaatcccagtgtctccgcgagccaaaggaccgaacgccttcggcttgtgacatttgaataaggaaaaacagagttcctgttaagtgaataactttagcttttacaggggattatgatcaaaagtgattttagtacatcttaaatgatatcttatttctacatggaaagaagttatagaatcttcatagagttctatgagaaaaaatatacttgctatctataaaaaagagaaaaaagaaaaaaaatgagaaaaaagtaagaaaaaaaaaaatcctgtcctaggcttttactcttgatcttcaaaggcacgcagggtttaatggttccttgggttattattttgcagttttgttttttattttgccttaagtaatgatagaagatatatatggccggacacatatgtataaacttttcagcagcatttttaataataaaatatcacagtattttctaatgctttgtgcaaataattatgcgtcca

SEQ ID NO: 434616 - DNA, 237 bp, Homo sapiens
catttaagcgattttttttccctccttcatctccgggcctcggataagatgacggcttgggtgatgcacgaaataacgcacgtgattgattagacctggcttggcttggctagggaacgatccaggcgcgctggagaccccgcgtgaagatgaaatgacggtagctccgggctgcttctgtaaaccggggagcgggctccatgcacccctttcccgtgtgtgtgggtttcgaggcgg

SEQ ID NO: 434617 - DNA, 5687 bp, Homo sapiens
catttaagcgattttttttccctccttcatctccgggcctcggataagatgacggcttgggtgatgcacgaaataacgcacgtgattgattagacctggcttggcttggctagggaacgatccaggcgcgctggagaccccgcgtgaagatgaaatgacggctgccttggagttttcataagaaattgtccctggaggtgttggatgatcacagcttccttggagcattgcagttgctggaatccagtttcaggattaagggagggctgcctccttgcaatgggctgccaagaaaacggctgtgcttgttcttaacctcaggctctgtctgtgatcagtctgagagtctctcccaggtctactgctccctggaaagccctatctctctgcaggctcgcctctgggctttgtctccttggagccacatcactgggacagctgtggatgtggatgcagatttgaaccatgtcacggccccagggactgctatggcttcctttgttgttcaccccggtctgcgtcatgttaaactccaatgtcctcctgtggttaactgctcttgccatcaagttcaccctcattgacagccaagcacagtatccagttgtcaacacaaattatggcaaaatccggggcctaagaacaccgttacccaatgagatcttgggtccagtggagcagtacttaggggtcccctatgcctcaccccccactggagagaggcggtttcagcccccagaacccccgtcctcctggactggcatccgaaatactactcagtttgctgctgtgtgcccccagcacctggatgagagatccttactgcatgacatgctgcccatctggtttaccgccaatttggatactttgatgacctatgttcaagatcaaaatgaagactgcctttacttaaacatctacgtgcccacggaagatgatattcatgatcagaacagtaagaagcccgtcatggtctatatccatgggggatcttacatggagggcaccggcaacatgattgacggcagcattttggcaagctacggaaacgtcatcgtgatcaccattaactaccgtctgggaatactagggtttttaagtaccggtgaccaggcagcaaaaggcaactatgggctcctggatcagattcaagcactgcggtggattgaggagaatgtgggagcctttggcggggaccccaagagagtgaccatctttggctcgggggctggggcctcctgtgtcagcctgttgaccctgtcccactactcagaaggtctcttccagaaggccatcattcagagcggcaccgccctgtccagctgggcagtgaactaccagccggccaagtacactcggatattggcagacaaggtcggctgcaacatgctggacaccacggacatggtagaatgcctgcggaacaagaactacaaggagctcatccagcagaccatcaccccggccacctaccacatagccttcgggccggtgatcgacggcgacgtcatcccagacgacccccagatcctgatggagcaaggcgagttcctcaactacgacatcatgctgggcgtcaaccaaggggaaggcctgaagttcgtggacggcatcgtggataacgaggacggtgtgacgcccaacgactttgacttctccgtgtccaacttcgtggacaacctttacggctaccctgaagggaaagacactttgcgggagactatcaagttcatgtacacagactgggccgataaggaaaacccggagacgcggcggaaaaccctggtggctctctttactgaccaccagtgggtggcccccgccgtggccaccgccgacctgcacgcgcagtacggctcccccacctacttctatgccttctatcatcactgccaaagcgaaatgaagcccagctgggcagattcggcccatggtgatgaggtcccctatgtcttcggcatccccatgatcggtcccaccgagctcttcagttgtaacttttccaagaacgacgtcatgctcagcgccgtggtcatgacctactggacgaacttcgccaaaactggtgatccaaatcaaccagttcctcaggataccaagttcattcacacaaaacccaaccgctttgaagaagtggcctggtccaagtataatcccaaagaccagctctatctgcatattggcttgaaacccagagtgagagatcactaccgggcaacgaaagtggctttctggttggaactcgttcctcatttgcacaacttgaacgagatattccagtatgtttcaacaaccacaaaggttcctccaccagacatgacatcatttccctatggcacccggcgatctcccgccaagatatggccaaccaccaaacgcccagcaatcactcctgccaacaatcccaaacactctaaggaccctcacaaaacagggcctgaggacacaactgtcctcattgaaaccaaacgagattattccaccgaattaagtgtcaccattgccgtcggggcgtcgctcctcttcctcaacatcttagcttttgcggcgctgtactacaaaaaggacaagaggcgccatgagactcacaggcgccccagtccccagagaaacaccacaaatgatatcgctcacatccagaacgaagagatcatgtctctgcagatgaagcagctggaacacgatcacgagtgtgagtcgctgcaggcacacgacacactgaggctcacctgcccgccagactacaccctcacgctgcgccggtcgccagatgacatcccacttatgacgccaaacaccatcaccatgattccaaacacactgacggggatgcagcctttgcacacttttaacaccttcagtggaggacaaaacagtacaaatttaccccacggacattccaccactagagtatagctttgccctatttcccttcctatccctctgccctacccgctcagcaacatagaagagggaaggaaagagagaaggaaagagagagagaaagaaagtctccagaccaggaatgtttttgtcccactgacttaagacaaaaatgcaaaaaggcagtcatcccatcccggcagacccttatcgttggtgttttccagtattacaagatcaacttctgaccctgtgaaatgtgagaagtacacatttctgttaaaataactgctttaagatctctaccactccaatcaatgtttagtgtgataggacatcaccatttcaaggccccgggtgtttccaacgtcatggaagcagctgacacttctgaaactcagccaaggacacttgatattttttaattacaatggaagtttaaacatttctttctgtgccacacaatggatggctctccttaagtgaagaaagagtcaatgagattttgcccagcacatggagctgtaatccagagagaaggaaacgtagaaatttattattaaaagaatggactgtgcagcgaaatctgtacggttctgtgcaaagaggtgttttgccagcctgaactatatttaagagactttgtaaaaaagaaaaatgtatatagctgtgagtttaaacaaaaaccacaaacagacaaacaagaaaaaaagcttttattggtgttttcactttgaaagagcttttagcaaggttgtgcttttcattgtgctctgtacgtatataaatatatatatatacacacacacacacacacattagtcatatcacctctgtttcctccccaacaaaagaggcttttcttcttaattacttgtggtaaacaaagacatgggattttcttacatgagattctcatttgtaggaggatgtgatgtcccacagaagacccagacggtctgtgtggcctatttcccccgtcaggttgcacaggtgcatgcaagagcattcttaggagaccactgttttgaaaaacttttgacttgtacgtgttagccttcatgaaattgcagtacagagatgggtccccaaagtggagtgtatttacagcttgttaaattagagacatgcacacacaaagaatcagtagggagaaacaaaaatacaagtcccgttctgtagctctggccctttgaatatgtttaggaagagttgcttcccatttcagggccctgccaaaaaaagaagaaagcttgcctttggtggggctatgccccttggagtaaatacggctctgtgttccctagcagctgcgggagggtttggccgatgaagtacctgctcagcttagctaatcagattgaaggaagacatgtgtctttcctttttgtttaagcactcggtcccttatttatcagtaagcaggtttttaaaaatcttttatatcatttatgggatcaaacatatgattgtctgaaaacatcactttttgtggatttgtgtatccggtcaccaaacggtgaatattatagaagaatgggggaagaaaggatagaatattaaaactgctttgcatgggttttctgggaaattaggataacttcactgagaagacattgaatggaaattattcacccattttaaattggtgacctagggatcagagatttgtctttccaacagcttgtcattttttcatttctcttctcatttttcaggaaagttttgagtgttataaggtggaaggaaacatagtagcaatggatacttttttgaaaaattattgcattaccaagaaacagtagccaaagatatttgaagatcatgttcctcggctccattgtgggttattctagaaatccagtcttaaatctctccgctaaagtggacattccccataaaaattgtccagctgcctggctcttttgcaataacaacctttgattactgaatccctacactcaaactatagtgatatatcagtgtttgagagtgacctctagaaaaaagaaaagtgtttttagaaatgtgtacaagtcacccccaaatcctattgcttatcttgggttaaatttgagagtgattctctgtatataaatatgtgaaatattattatctcaacttagcacacgtgaagcaacatttctttcctacagagaggtgtcatggtaagatttcattccgaattcattgtttcatagagctatgatcaggccatttctgcaagcaatgtatgaccccacctgagcaaccacaaataggctctctgtgaaactacaaaggaagttatgtgtggcatccatgttggtttcgtctgtctgtaatgtgaattccagtatttgtttagtatttccagttgtctcctgctagcaatatgtacagtaacgcgtcaggcttgtgacatttgaataaggaaaaacagagttcctgttaagtgaataactttagcttttacaggggattatgatcaaaagtgattttagtacatcttaaatgatatcttatttctacatggaaagaagttatagaatcttcatagagttctatgagaaaaaatatacttgctatctataaaaaagagaaaaaagaaaaaaaatgagaaaaaagtaagaaaaaaaaaaatcctgtcctaggcttttactcttgatcttcaaaggcacgcagggtttaatggttccttgggttattattttgcagttttgttttttattttgccttaagtaatgatagaagatatatatggccggacacatatgtataaacttttcagcagcatttttaataataaaatatcacagtatttt

SEQ ID NO: 434618 - DNA, 5718 bp, Homo sapiens
catttaagcgattttttttccctccttcatctccgggcctcggataagatgacggcttgggtgatgcacgaaataacgcacgtgattgattagacctggcttggcttggctagggaacgatccaggcgcgctggagaccccgcgtgaagatgaaatgacggctgccttggagttttcataagaaattgtccctggaggtgttggatgatcacagcttccttggagcattgcagttgctggaatccagtttcaggattaagggagggctgcctccttgcaatgggctgccaagaaaacggctgtgcttgttcttaacctcaggctctgtctgtgatcagtctgagagtctctcccaggtctactgctccctggaaagccctatctctctgcaggctcgcctctgggctttgtctccttggagccacatcactgggacagctgtggatgtggatgcagatttgaaccatgtcacggccccagggactgctatggcttcctttgttgttcaccccggtctgcgtcatgttaaactccaatgtcctcctgtggttaactgctcttgccatcaagttcaccctcattgacagccaagcacagtatccagttgtcaacacaaattatggcaaaatccggggcctaagaacaccgttacccaatgagatcttgggtccagtggagcagtacttaggggtcccctatgcctcaccccccactggagagaggcggtttcagcccccagaacccccgtcctcctggactggcatccgaaatactactcagtttgctgctgtgtgcccccagcacctggatgagagatccttactgcatgacatgctgcccatctggtttaccgccaatttggatactttgatgacctatgttcaagatcaaaatgaagactgcctttacttaaacatctacgtgcccacggaagatgatattcatgatcagaacagtaagaagcccgtcatggtctatatccatgggggatcttacatggagggcaccggcaacatgattgacggcagcattttggcaagctacggaaacgtcatcgtgatcaccattaactaccgtctgggaatactagggtttttaagtaccggtgaccaggcagcaaaaggcaactatgggctcctggatcagattcaagcactgcggtggattgaggagaatgtgggagcctttggcggggaccccaagagagtgaccatctttggctcgggggctggggcctcctgtgtcagcctgttgaccctgtcccactactcagaaggtctcttccagaaggccatcattcagagcggcaccgccctgtccagctgggcagtgaactaccagccggccaagtacactcggatattggcagacaaggtcggctgcaacatgctggacaccacggacatggtagaatgcctgcggaacaagaactacaaggagctcatccagcagaccatcaccccggccacctaccacatagccttcgggccggtgatcgacggcgacgtcatcccagacgacccccagatcctgatggagcaaggcgagttcctcaactacgacatcatgctgggcgtcaaccaaggggaaggcctgaagttcgtggacggcatcgtggataacgaggacggtgtgacgcccaacgactttgacttctccgtgtccaacttcgtggacaacctttacggctaccctgaagggaaagacactttgcgggagactatcaagttcatgtacacagactgggccgataaggaaaacccggagacgcggcggaaaaccctggtggctctctttactgaccaccagtgggtggcccccgccgtggccaccgccgacctgcacgcgcagtacggctcccccacctacttctatgccttctatcatcactgccaaagcgaaatgaagcccagctgggcagattcggcccatggtgatgaggtcccctatgtcttcggcatccccatgatcggtcccaccgagctcttcagttgtaacttttccaagaacgacgtcatgctcagcgccgtggtcatgacctactggacgaacttcgccaaaactggtgatccaaatcaaccagttcctcaggataccaagttcattcacacaaaacccaaccgctttgaagaagtggcctggtccaagtataatcccaaagaccagctctatctgcatattggcttgaaacccagagtgagagatcactaccgggcaacgaaagtggctttctggttggaactcgttcctcatttgcacaacttgaacgagatattccagtatgtttcaacaaccacaaaggttcctccaccagacatgacatcatttccctatggcacccggcgatctcccgccaagatatggccaaccaccaaacgcccagcaatcactcctgccaacaatcccaaacactctaaggaccctcacaaaacagggcctgaggacacaactgtcctcattgaaaccaaacgagattattccaccgaattaagtgtcaccattgccgtcggggcgtcgctcctcttcctcaacatcttagcttttgcggcgctgtactacaaaaaggacaagaggcgccatgagactcacaggcgccccagtccccagagaaacaccacaaatgatatcgctcacatccagaacgaagagatcatgtctctgcagatgaagcagctggaacacgatcacgagtgtgagtcgctgcaggcacacgacacactgaggctcacctgcccgccagactacaccctcacgctgcgccggtcgccagatgacatcccacttatgacgccaaacaccatcaccatgattccaaacacactgacggggatgcagcctttgcacacttttaacaccttcagtggaggacaaaacagtacaaatttaccccacggacattccaccactagagtatagctttgccctatttcccttcctatccctctgccctacccgctcagcaacatagaagagggaaggaaagagagaaggaaagagagagagaaagaaagtctccagaccaggaatgtttttgtcccactgacttaagacaaaaatgcaaaaaggcagtcatcccatcccggcagacccttatcgttggtgttttccagtattacaagatcaacttctgaccctgtgaaatgtgagaagtacacatttctgttaaaataactgctttaagatctctaccactccaatcaatgtttagtgtgataggacatcaccatttcaaggccccgggtgtttccaacgtcatggaagcagctgacacttctgaaactcagccaaggacacttgatattttttaattacaatggaagtttaaacatttctttctgtgccacacaatggatggctctccttaagtgaagaaagagtcaatgagattttgcccagcacatggagctgtaatccagagagaaggaaacgtagaaatttattattaaaagaatggactgtgcagcgaaatctgtacggttctgtgcaaagaggtgttttgccagcctgaactatatttaagagactttgtaaaaaagaaaaatgtatatagctgtgagtttaaacaaaaaccacaaacagacaaacaagaaaaaaagcttttattggtgttttcactttgaaagagcttttagcaaggttgtgcttttcattgtgctctgtacgtatataaatatatatatatacacacacacacacacacattagtcatatcacctctgtttcctccccaacaaaagaggcttttcttcttaattacttgtggtaaacaaagacatgggattttcttacatgagattctcatttgtaggaggatgtgatgtcccacagaagacccagacggtctgtgtggcctatttcccccgtcaggttgcacaggtgcatgcaagagcattcttaggagaccactgttttgaaaaacttttgacttgtacgtgttagccttcatgaaattgcagtacagagatgggtccccaaagtggagtgtatttacagcttgttaaattagagacatgcacacacaaagaatcagtagggagaaacaaaaatacaagtcccgttctgtagctctggccctttgaatatgtttaggaagagttgcttcccatttcagggccctgccaaaaaaagaagaaagcttgcctttggtggggctatgccccttggagtaaatacggctctgtgttccctagcagctgcgggagggtttggccgatgaagtacctgctcagcttagctaatcagattgaaggaagacatgtgtctttcctttttgtttaagcactcggtcccttatttatcagtaagcaggtttttaaaaatcttttatatcatttatgggatcaaacatatgattgtctgaaaacatcactttttgtggatttgtgtatccggtcaccaaacggtgaatattatagaagaatgggggaagaaaggatagaatattaaaactgctttgcatgggttttctgggaaattaggataacttcactgagaagacattgaatggaaattattcacccattttaaattggtgacctagggatcagagatttgtctttccaacagcttgtcattttttcatttctcttctcatttttcaggaaagttttgagtgttataaggtggaaggaaacatagtagcaatggatacttttttgaaaaattattgcattaccaagaaacagtagccaaagatatttgaagatcatgttcctcggctccattgtgggttattctagaaatccagtcttaaatctctccgctaaagtggacattccccataaaaattgtccagctgcctggctcttttgcaataacaacctttgattactgaatccctacactcaaactatagtgatatatcagtgtttgagagtgacctctagaaaaaagaaaagtgtttttagaaatgtgtacaagtcacccccaaatcctattgcttatcttgggttaaatttgagagtgattctctgtatataaatatgtgaaatattattatctcaacttagcacacgtgaagcaacatttctttcctacagagaggtgtcatggtaagatttcattccgaattcattgtttcatagagctatgatcaggccatttctgcaagcaatgtatgaccccacctgagcaaccacaaataggctctctgtgaaactacaaaggaagttatgtgtggcatccatgttggtttcgtctgtctgtaatgtgaattccagtatttgtttagtatttccagttgtctcctgctagcaatatgtacagtaacgcgtcaggcttgtgacatttgaataaggaaaaacagagttcctgttaagtgaataactttagcttttacaggggattatgatcaaaagtgattttagtacatcttaaatgatatcttatttctacatggaaagaagttatagaatcttcatagagttctatgagaaaaaatatacttgctatctataaaaaagagaaaaaagaaaaaaaatgagaaaaaagtaagaaaaaaaaaaatcctgtcctaggcttttactcttgatcttcaaaggcacgcagggtttaatggttccttgggttattattttgcagttttgttttttattttgccttaagtaatgatagaagatatatatggccggacacatatgtataaacttttcagcagcatttttaataataaaatatcacagtattttctaatgctttgtgcaaataattatgcgtcca

SEQ ID NO: 434619 - DNA, 5850 bp, Homo sapiens
aaccgtctctctcccttctctgtctcttagcacagagctcttattcagccactagcttggcccttcctgcttcaattgtaatgcttgttctgcccgtccacagactattggcggcagaaacaacgaatttcctccaaactaggcggtgttggtggctcttgcattcctctggatgaggaaatctagttggggggttccagaaggggaaggctcctgggctttcaatacatcctcctgaatcatacctcgtttcgggttccctagaaaaatctggacgtgtaaaaagaactcttaacggccgatgcagctcttccaaagctaaggctgccttggagttttcataagaaattgtccctggaggtgttggatgatcacagcttccttggagcattgcagttgctggaatccagtttcaggattaagggagggctgcctccttgcaatgggctgccaagaaaacggctgtgcttgttcttaacctcaggctctgtctgtgatcagtctgagagtctctcccaggtctactgctccctggaaagccctatctctctgcaggctcgcctctgggctttgtctccttggagccacatcactgggacagctgtggatgtggatgcagatttgaaccatgtcacggccccagggactgctatggcttcctttgttgttcaccccggtctgcgtcatgttaaactccaatgtcctcctgtggttaactgctcttgccatcaagttcaccctcattgacagccaagcacagtatccagttgtcaacacaaattatggcaaaatccggggcctaagaacaccgttacccaatgagatcttgggtccagtggagcagtacttaggggtcccctatgcctcaccccccactggagagaggcggtttcagcccccagaacccccgtcctcctggactggcatccgaaatactactcagtttgctgctgtgtgcccccagcacctggatgagagatccttactgcatgacatgctgcccatctggtttaccgccaatttggatactttgatgacctatgttcaagatcaaaatgaagactgcctttacttaaacatctacgtgcccacggaagatgatattcatgatcagaacagtaagaagcccgtcatggtctatatccatgggggatcttacatggagggcaccggcaacatgattgacggcagcattttggcaagctacggaaacgtcatcgtgatcaccattaactaccgtctgggaatactagggtttttaagtaccggtgaccaggcagcaaaaggcaactatgggctcctggatcagattcaagcactgcggtggattgaggagaatgtgggagcctttggcggggaccccaagagagtgaccatctttggctcgggggctggggcctcctgtgtcagcctgttgaccctgtcccactactcagaaggtctcttccagaaggccatcattcagagcggcaccgccctgtccagctgggcagtgaactaccagccggccaagtacactcggatattggcagacaaggtcggctgcaacatgctggacaccacggacatggtagaatgcctgcggaacaagaactacaaggagctcatccagcagaccatcaccccggccacctaccacatagccttcgggccggtgatcgacggcgacgtcatcccagacgacccccagatcctgatggagcaaggcgagttcctcaactacgacatcatgctgggcgtcaaccaaggggaaggcctgaagttcgtggacggcatcgtggataacgaggacggtgtgacgcccaacgactttgacttctccgtgtccaacttcgtggacaacctttacggctaccctgaagggaaagacactttgcgggagactatcaagttcatgtacacagactgggccgataaggaaaacccggagacgcggcggaaaaccctggtggctctctttactgaccaccagtgggtggcccccgccgtggccaccgccgacctgcacgcgcagtacggctcccccacctacttctatgccttctatcatcactgccaaagcgaaatgaagcccagctgggcagattcggcccatggtgatgaggtcccctatgtcttcggcatccccatgatcggtcccaccgagctcttcagttgtaacttttccaagaacgacgtcatgctcagcgccgtggtcatgacctactggacgaacttcgccaaaactggtgatccaaatcaaccagttcctcaggataccaagttcattcacacaaaacccaaccgctttgaagaagtggcctggtccaagtataatcccaaagaccagctctatctgcatattggcttgaaacccagagtgagagatcactaccgggcaacgaaagtggctttctggttggaactcgttcctcatttgcacaacttgaacgagatattccagtatgtttcaacaaccacaaaggttcctccaccagacatgacatcatttccctatggcacccggcgatctcccgccaagatatggccaaccaccaaacgcccagcaatcactcctgccaacaatcccaaacactctaaggaccctcacaaaacagggcctgaggacacaactgtcctcattgaaaccaaacgagattattccaccgaattaagtgtcaccattgccgtcggggcgtcgctcctcttcctcaacatcttagcttttgcggcgctgtactacaaaaaggacaagaggcgccatgagactcacaggcgccccagtccccagagaaacaccacaaatgatatcgctcacatccagaacgaagagatcatgtctctgcagatgaagcagctggaacacgatcacgagtgtgagtcgctgcaggcacacgacacactgaggctcacctgcccgccagactacaccctcacgctgcgccggtcgccagatgacatcccacttatgacgccaaacaccatcaccatgattccaaacacactgacggggatgcagcctttgcacacttttaacaccttcagtggaggacaaaacagtacaaatttaccccacggacattccaccactagagtatagctttgccctatttcccttcctatccctctgccctacccgctcagcaacatagaagagggaaggaaagagagaaggaaagagagagagaaagaaagtctccagaccaggaatgtttttgtcccactgacttaagacaaaaatgcaaaaaggcagtcatcccatcccggcagacccttatcgttggtgttttccagtattacaagatcaacttctgaccctgtgaaatgtgagaagtacacatttctgttaaaataactgctttaagatctctaccactccaatcaatgtttagtgtgataggacatcaccatttcaaggccccgggtgtttccaacgtcatggaagcagctgacacttctgaaactcagccaaggacacttgatattttttaattacaatggaagtttaaacatttctttctgtgccacacaatggatggctctccttaagtgaagaaagagtcaatgagattttgcccagcacatggagctgtaatccagagagaaggaaacgtagaaatttattattaaaagaatggactgtgcagcgaaatctgtacggttctgtgcaaagaggtgttttgccagcctgaactatatttaagagactttgtaaaaaagaaaaatgtatatagctgtgagtttaaacaaaaaccacaaacagacaaacaagaaaaaaagcttttattggtgttttcactttgaaagagcttttagcaaggttgtgcttttcattgtgctctgtacgtatataaatatatatatatacacacacacacacacacattagtcatatcacctctgtttcctccccaacaaaagaggcttttcttcttaattacttgtggtaaacaaagacatgggattttcttacatgagattctcatttgtaggaggatgtgatgtcccacagaagacccagacggtctgtgtggcctatttcccccgtcaggttgcacaggtgcatgcaagagcattcttaggagaccactgttttgaaaaacttttgacttgtacgtgttagccttcatgaaattgcagtacagagatgggtccccaaagtggagtgtatttacagcttgttaaattagagacatgcacacacaaagaatcagtagggagaaacaaaaatacaagtcccgttctgtagctctggccctttgaatatgtttaggaagagttgcttcccatttcagggccctgccaaaaaaagaagaaagcttgcctttggtggggctatgccccttggagtaaatacggctctgtgttccctagcagctgcgggagggtttggccgatgaagtacctgctcagcttagctaatcagattgaaggaagacatgtgtctttcctttttgtttaagcactcggtcccttatttatcagtaagcaggtttttaaaaatcttttatatcatttatgggatcaaacatatgattgtctgaaaacatcactttttgtggatttgtgtatccggtcaccaaacggtgaatattatagaagaatgggggaagaaaggatagaatattaaaactgctttgcatgggttttctgggaaattaggataacttcactgagaagacattgaatggaaattattcacccattttaaattggtgacctagggatcagagatttgtctttccaacagcttgtcattttttcatttctcttctcatttttcaggaaagttttgagtgttataaggtggaaggaaacatagtagcaatggatacttttttgaaaaattattgcattaccaagaaacagtagccaaagatatttgaagatcatgttcctcggctccattgtgggttattctagaaatccagtcttaaatctctccgctaaagtggacattccccataaaaattgtccagctgcctggctcttttgcaataacaacctttgattactgaatccctacactcaaactatagtgatatatcagtgtttgagagtgacctctagaaaaaagaaaagtgtttttagaaatgtgtacaagtcacccccaaatcctattgcttatcttgggttaaatttgagagtgattctctgtatataaatatgtgaaatattattatctcaacttagcacacgtgaagcaacatttctttcctacagagaggtgtcatggtaagatttcattccgaattcattgtttcatagagctatgatcaggccatttctgcaagcaatgtatgaccccacctgagcaaccacaaataggctctctgtgaaactacaaaggaagttatgtgtggcatccatgttggtttcgtctgtctgtaatgtgaattccagtatttgtttagtatttccagttgtctcctgctagcaatatgtacagtaacgcgtcaggcttgtgacatttgaataaggaaaaacagagttcctgttaagtgaataactttagcttttacaggggattatgatcaaaagtgattttagtacatcttaaatgatatcttatttctacatggaaagaagttatagaatcttcatagagttctatgagaaaaaatatacttgctatctataaaaaagagaaaaaagaaaaaaaatgagaaaaaagtaagaaaaaaaaaaatcctgtcctaggcttttactcttgatcttcaaaggcacgcagggtttaatggttccttgggttattattttgcagttttgttttttattttgccttaagtaatgatagaagatatatatggccggacacatatgtataaacttttcagcagcatttttaataataaaatatcacagtatttt

SEQ ID NO: 434620 - DNA, 5795 bp, Homo sapiens
ggcgtgaacccgggaggcggagcttgcagtgagctgagatcgtaccactgtactccagcctggttagagtttatatttcctttaaatttctagagaaaacagattgtcatgtatttttatagagacaaaatactgatgaaggtgatatacaggtagcttaattatgatttttctaagatttaattagatggtaaatttacagtaattattaatatgttcactgcttttattaaaaaccatcaattctgaatccacaatgacacaaatggctgccttggagttttcataagaaattgtccctggaggtgttggatgatcacagcttccttggagcattgcagttgctggaatccagtttcaggattaagggagggctgcctccttgcaatgggctgccaagaaaacggctgtgcttgttcttaacctcaggctctgtctgtgatcagtctgagagtctctcccaggtctactgctccctggaaagccctatctctctgcaggctcgcctctgggctttgtctccttggagccacatcactgggacagctgtggatgtggatgcagatttgaaccatgtcacggccccagggactgctatggcttcctttgttgttcaccccggtctgcgtcatgttaaactccaatgtcctcctgtggttaactgctcttgccatcaagttcaccctcattgacagccaagcacagtatccagttgtcaacacaaattatggcaaaatccggggcctaagaacaccgttacccaatgagatcttgggtccagtggagcagtacttaggggtcccctatgcctcaccccccactggagagaggcggtttcagcccccagaacccccgtcctcctggactggcatccgaaatactactcagtttgctgctgtgtgcccccagcacctggatgagagatccttactgcatgacatgctgcccatctggtttaccgccaatttggatactttgatgacctatgttcaagatcaaaatgaagactgcctttacttaaacatctacgtgcccacggaagatgatattcatgatcagaacagtaagaagcccgtcatggtctatatccatgggggatcttacatggagggcaccggcaacatgattgacggcagcattttggcaagctacggaaacgtcatcgtgatcaccattaactaccgtctgggaatactagggtttttaagtaccggtgaccaggcagcaaaaggcaactatgggctcctggatcagattcaagcactgcggtggattgaggagaatgtgggagcctttggcggggaccccaagagagtgaccatctttggctcgggggctggggcctcctgtgtcagcctgttgaccctgtcccactactcagaaggtctcttccagaaggccatcattcagagcggcaccgccctgtccagctgggcagtgaactaccagccggccaagtacactcggatattggcagacaaggtcggctgcaacatgctggacaccacggacatggtagaatgcctgcggaacaagaactacaaggagctcatccagcagaccatcaccccggccacctaccacatagccttcgggccggtgatcgacggcgacgtcatcccagacgacccccagatcctgatggagcaaggcgagttcctcaactacgacatcatgctgggcgtcaaccaaggggaaggcctgaagttcgtggacggcatcgtggataacgaggacggtgtgacgcccaacgactttgacttctccgtgtccaacttcgtggacaacctttacggctaccctgaagggaaagacactttgcgggagactatcaagttcatgtacacagactgggccgataaggaaaacccggagacgcggcggaaaaccctggtggctctctttactgaccaccagtgggtggcccccgccgtggccaccgccgacctgcacgcgcagtacggctcccccacctacttctatgccttctatcatcactgccaaagcgaaatgaagcccagctgggcagattcggcccatggtgatgaggtcccctatgtcttcggcatccccatgatcggtcccaccgagctcttcagttgtaacttttccaagaacgacgtcatgctcagcgccgtggtcatgacctactggacgaacttcgccaaaactggtgatccaaatcaaccagttcctcaggataccaagttcattcacacaaaacccaaccgctttgaagaagtggcctggtccaagtataatcccaaagaccagctctatctgcatattggcttgaaacccagagtgagagatcactaccgggcaacgaaagtggctttctggttggaactcgttcctcatttgcacaacttgaacgagatattccagtatgtttcaacaaccacaaaggttcctccaccagacatgacatcatttccctatggcacccggcgatctcccgccaagatatggccaaccaccaaacgcccagcaatcactcctgccaacaatcccaaacactctaaggaccctcacaaaacagggcctgaggacacaactgtcctcattgaaaccaaacgagattattccaccgaattaagtgtcaccattgccgtcggggcgtcgctcctcttcctcaacatcttagcttttgcggcgctgtactacaaaaaggacaagaggcgccatgagactcacaggcgccccagtccccagagaaacaccacaaatgatatcgctcacatccagaacgaagagatcatgtctctgcagatgaagcagctggaacacgatcacgagtgtgagtcgctgcaggcacacgacacactgaggctcacctgcccgccagactacaccctcacgctgcgccggtcgccagatgacatcccacttatgacgccaaacaccatcaccatgattccaaacacactgacggggatgcagcctttgcacacttttaacaccttcagtggaggacaaaacagtacaaatttaccccacggacattccaccactagagtatagctttgccctatttcccttcctatccctctgccctacccgctcagcaacatagaagagggaaggaaagagagaaggaaagagagagagaaagaaagtctccagaccaggaatgtttttgtcccactgacttaagacaaaaatgcaaaaaggcagtcatcccatcccggcagacccttatcgttggtgttttccagtattacaagatcaacttctgaccctgtgaaatgtgagaagtacacatttctgttaaaataactgctttaagatctctaccactccaatcaatgtttagtgtgataggacatcaccatttcaaggccccgggtgtttccaacgtcatggaagcagctgacacttctgaaactcagccaaggacacttgatattttttaattacaatggaagtttaaacatttctttctgtgccacacaatggatggctctccttaagtgaagaaagagtcaatgagattttgcccagcacatggagctgtaatccagagagaaggaaacgtagaaatttattattaaaagaatggactgtgcagcgaaatctgtacggttctgtgcaaagaggtgttttgccagcctgaactatatttaagagactttgtaaaaaagaaaaatgtatatagctgtgagtttaaacaaaaaccacaaacagacaaacaagaaaaaaagcttttattggtgttttcactttgaaagagcttttagcaaggttgtgcttttcattgtgctctgtacgtatataaatatatatatatacacacacacacacacacattagtcatatcacctctgtttcctccccaacaaaagaggcttttcttcttaattacttgtggtaaacaaagacatgggattttcttacatgagattctcatttgtaggaggatgtgatgtcccacagaagacccagacggtctgtgtggcctatttcccccgtcaggttgcacaggtgcatgcaagagcattcttaggagaccactgttttgaaaaacttttgacttgtacgtgttagccttcatgaaattgcagtacagagatgggtccccaaagtggagtgtatttacagcttgttaaattagagacatgcacacacaaagaatcagtagggagaaacaaaaatacaagtcccgttctgtagctctggccctttgaatatgtttaggaagagttgcttcccatttcagggccctgccaaaaaaagaagaaagcttgcctttggtggggctatgccccttggagtaaatacggctctgtgttccctagcagctgcgggagggtttggccgatgaagtacctgctcagcttagctaatcagattgaaggaagacatgtgtctttcctttttgtttaagcactcggtcccttatttatcagtaagcaggtttttaaaaatcttttatatcatttatgggatcaaacatatgattgtctgaaaacatcactttttgtggatttgtgtatccggtcaccaaacggtgaatattatagaagaatgggggaagaaaggatagaatattaaaactgctttgcatgggttttctgggaaattaggataacttcactgagaagacattgaatggaaattattcacccattttaaattggtgacctagggatcagagatttgtctttccaacagcttgtcattttttcatttctcttctcatttttcaggaaagttttgagtgttataaggtggaaggaaacatagtagcaatggatacttttttgaaaaattattgcattaccaagaaacagtagccaaagatatttgaagatcatgttcctcggctccattgtgggttattctagaaatccagtcttaaatctctccgctaaagtggacattccccataaaaattgtccagctgcctggctcttttgcaataacaacctttgattactgaatccctacactcaaactatagtgatatatcagtgtttgagagtgacctctagaaaaaagaaaagtgtttttagaaatgtgtacaagtcacccccaaatcctattgcttatcttgggttaaatttgagagtgattctctgtatataaatatgtgaaatattattatctcaacttagcacacgtgaagcaacatttctttcctacagagaggtgtcatggtaagatttcattccgaattcattgtttcatagagctatgatcaggccatttctgcaagcaatgtatgaccccacctgagcaaccacaaataggctctctgtgaaactacaaaggaagttatgtgtggcatccatgttggtttcgtctgtctgtaatgtgaattccagtatttgtttagtatttccagttgtctcctgctagcaatatgtacagtaacgcgtcaggcttgtgacatttgaataaggaaaaacagagttcctgttaagtgaataactttagcttttacaggggattatgatcaaaagtgattttagtacatcttaaatgatatcttatttctacatggaaagaagttatagaatcttcatagagttctatgagaaaaaatatacttgctatctataaaaaagagaaaaaagaaaaaaaatgagaaaaaagtaagaaaaaaaaaaatcctgtcctaggcttttactcttgatcttcaaaggcacgcagggtttaatggttccttgggttattattttgcagttttgttttttattttgccttaagtaatgatagaagatatatatggccggacacatatgtataaacttttcagcagcatttttaataataaaatatcacagtatttt

SEQ ID NO: 434621 - DNA, 2552 bp, Homo sapiens
aaccgtctctctcccttctctgtctcttagcacagagctcttattcagccactagcttggcccttcctgcttcaattgtaatgcttgttctgcccgtccacagactattggcggcagaaacaacgaatttcctccaaactaggcggtgttggtggctcttgcattcctctggatgaggaaatctagttggggggttccagaaggggaaggctcctgggctttcaatacatcctcctgaatcatacctcgtttcgggttccctagaaaaatctggacgtgtaaaaagaactcttaacggccgatgcagctcttccaaagctaaggctgccttggagttttcataagaaattgtccctggaggtgttggatgatcacagcttccttggagcattgcagttgctggaatccagtttcaggattaagggagggctgcctccttgcaatgggctgccaagaaaacggctgtgcttgttcttaacctcaggctctgtctgtgatcagtctgagagtctctcccaggtctactgctccctggaaagccctatctctctgcaggctcgcctctgggctttgtctccttggagccacatcactgggacagctgtggatgtggatgcagatttgaaccatgtcacggccccagggactgctatggcttcctttgttgttcaccccggtctgcgtcatgttaaactccaatgtcctcctgtggttaactgctcttgccatcaagttcaccctcattgacagccaagcacagtatccagttgtcaacacaaattatggcaaaatccggggcctaagaacaccgttacccaatgagatcttgggtccagtggagcagtacttaggggtcccctatgcctcaccccccactggagagaggcggtttcagcccccagaacccccgtcctcctggactggcatccgaaatactactcagtttgctgctgtgtgcccccagcacctggatgagagatccttactgcatgacatgctgcccatctggtttaccgccaatttggatactttgatgacctatgttcaagatcaaaatgaagactgcctttacttaaacatctacgtgcccacggaagatgatattcatgatcagaacagtaagaagcccgtcatggtctatatccatgggggatcttacatggagggcaccggcaacatgattgacggcagcattttggcaagctacggaaacgtcatcgtgatcaccattaactaccgtctgggaatactagggtttttaagtaccggtgaccaggcagcaaaaggcaactatgggctcctggatcagattcaagcactgcggtggattgaggagaatgtgggagcctttggcggggaccccaagagagtgaccatctttggctcgggggctggggcctcctgtgtcagcctgttgaccctgtcccactactcagaaggtctcttccagaaggccatcattcagagcggcaccgccctgtccagctgggcagtgaactaccagccggccaagtacactcggatattggcagacaaggtcggctgcaacatgctggacaccacggacatggtagaatgcctgcggaacaagaactacaaggagctcatccagcagaccatcaccccggccacctaccacatagccttcgggccggtgatcgacggcgacgtcatcccagacgacccccagatcctgatggagcaaggcgagttcctcaactacgacatcatgctgggcgtcaaccaaggggaaggcctgaagttcgtggacggcatcgtggataacgaggacggtgtgacgcccaacgactttgacttctccgtgtccaacttcgtggacaacctttacggctaccctgaagggaaagacactttgcgggagactatcaagttcatgtacacagactgggccgataaggaaaacccggagacgcggcggaaaaccctggtggctctctttactgaccaccagtgggtggcccccgccgtggccaccgccgacctgcacgcgcagtacggctcccccacctacttctatgccttctatcatcactgccaaagcgaaatgaagcccagctgggcagattcggcccatggtgatgaggtcccctatgtcttcggcatccccatgatcggtcccaccgagctcttcagttgtaacttttccaagaacgacgtcatgctcagcgccgtggtcatgacctactggacgaacttcgccaaaactgggtcaataacgactggagtgtgatggagaggaagagacagtacacggttgaaatttttcctgatgaaagctgtgtggttcctaagaattcaagactatccagaactataggatggtgtttataggacacaacagctgacttgaatggactcccactggctaaagatgacacactttgaccgtcagtaagaatgataatttaaatgcatttcaatacatcaagtttgataaaagacacgagttcccaatgatgttaaagatatgcacattgattgtctttagaaaatagttgggaatcatttcattactttgtgaactgaaaaaa

SEQ ID NO: 434622 - DNA, 698 bp, Homo sapiens
cctttcgcgcttctgccgtggccctctgcgggccgctccgccggtgctgtccctgggcgcctccgtgctctcagccaaccgcctctgagagcgcccactcgagcgccccgggagccagagggcgggggtcctcgccgggaccctcctgtgggcccaggggaaataatgaagatgtttcattttcaagaccagcagatcttgaccttattcagtcaactccctttaaacccctggcactgaaaacaccacctcgtgtacttacgctgagtgaaagaccactagattttctggatttagaaagacctcctacaacccctcaaaatgaagaaatccgagcagttggcagactaaaaagagagcggtctatgagtgaaaatgctgttcgccaaaatggacagctggtcagaaatgattctctgtatggcatttcaaatatagatacaaccattgaaggaacgtcagatgacctgactgttgtagatgcagcttcactaagacgacagataatcaaactaaatagacgtctacaacttctggaagaggagaacaaagaacgtgctaaaagagaaatggtcatgtattcaattactgtagctttctggctgcttaatagctggctctggtttcgccgctagaggtaacatcagccctcaaaaatactgtctcaacagctggaaatataaaagatttgcaaactt

SEQ ID NO: 434623 - DNA, 754 bp, Homo sapiens
  misc_feature (30)..(30): n is a, c, g, or t
  misc_feature (215)..(215): n is a, c, g, or t
  misc_feature (251)..(251): n is a, c, g, or t
gacacttcattgcgaagttctctccctctnacagtctttaaattcagttatttattttatgttaggttccaagttattaagtctgcctgtaactagttttgaaacattcaaaatattattcttgactgtttcctgtggggaagtaaggtggggaaggggcaagaccctaagaaattaagataaagctgctcagctaagttttataaaatctgacntgagtgttttctcttcatatgctgtgcttgtgtaancagtgtgacaccatcgccacaacaggctcgggtctgtcctccccatatgttacctgaagatggagctaatctttcctctgctcgtggcattttgtcgcttatccagtcttctactcgtagggcataccagcagatcttggatgtgctggatgaaaatcgcagacctgtgttgcgtggtgggtctgctgccgccacttctaatcctcatcatgacaacgtcagggtatggcatttcaaatatagatacaaccattgaaggaacgtcagatgacctgactgttgtagatgcagcttcactaagacgacagataatcaaactaaatagacgtctacaacttctggaagaggagaacaaagaacgtgctaaaagagaaatggtcatgtattcaattactgtagctttctggctgcttaatagctggctctggtttcgccgctagaggtaacatcagccctcaaaaatactgtctcaacagctggaaatataaaagatttgcaaactt

SEQ ID NO: 434624 - DNA, 448 bp, Homo sapiens
caatataatcctatttgacatttatttgtcttgtttttgcttttattttattacttctctgtttcctgattctgtcttgtgccttctcccgcaaaaacctgccttagacctgtgttgcgtggtgggtctgctgccgccacttctaatcctcatcatgacaacgtcagggtatggcatttcaaatatagatacaaccattgaaggaacgtcagatgacctgactgttgtagatgcagcttcactaagacgacagataatcaaactaaatagacgtctacaacttctggaagaggagaacaaagaacgtgctaaaagagaaatggtcatgtattcaattactgtagctttctggctgcttaatagctggctctggtttcgccgctagaggtaacatcagccctcaaaaatactgtctcaacagctggaaatataaaagatttgcaaactt

SEQ ID NO: 434625 - DNA, 490 bp, Homo sapiens
tttttcaatattgtagacagttgtcattttaagcttttttctttcctttattagtacaaattcaggtagtaaaatattttagtaattcatattattaagtaccaattttctgaatactactttgagcattacacaaagcatgatgtggcgtgccatttactctgagttctactttactattcatttgtatttctatctcttatctgcagggtatggcatttcaaatatagatacaaccattgaaggaacgtcagatgacctgactgttgtagatgcagcttcactaagacgacagataatcaaactaaatagacgtctacaacttctggaagaggagaacaaagaacgtgctaaaagagaaatggtcatgtattcaattactgtagctttctggctgcttaatagctggctctggtttcgccgctagaggtaacatcagccctcaaaaatactgtctcaacagctggaaatataaaagatttgcaaactt

SEQ ID NO: 434626 - DNA, 1031 bp, Homo sapiens
cctttcgcgcttctgccgtggccctctgcgggccgctccgccggtgctgtccctgggcgcctccgtgctctcagccaaccgcctctgagagcgcccactcgagcgccccgggagccagagggcgggggtcctcgccgggaccctcctgtgggcccagggggacaaaagtggctctcaatccagcacatgcacattgaagcaagttaaaggatttaatatgaagcacagaagcagatagtgccaaatagcaagcagtagttgttacacatttggtgagcagggcagcatttccttctcccactgctgctgagatggcagaaattagtcgaattcagtacgaaatggaatatactgaaggcattagtcagcgaatgagggtcccagaaaagttaaaagtagcaccgccaaacgctgacctggaacaaggattccaagaaggagttccaaatgctagtgtgataatgcaagttccggagaggattgttgtagcaggaaataatgaagatgtttcattttcaagaccagcagatcttgaccttattcagtcaactccctttaaacccctggcactgaaaacaccacctcgtgtacttacgctgagtgaaagaccactagattttctggatttagaaagacctcctacaacccctcaaaatgaagaaatccgagcagttggcagactaaaaagagagcggtctatgagtgaaaatgctgttcgccaaaatggacagctggtcagaaatgattctctgtatggcatttcaaatatagatacaaccattgaaggaacgtcagatgacctgactgttgtagatgcagcttcactaagacgacagataatcaaactaaatagacgtctacaacttctggaagaggagaacaaagaacgtgctaaaagagaaatggtcatgtattcaattactgtagctttctggctgcttaatagctggctctggtttcgccgctagaggtaacatcagccctcaaaaatactgtctcaacagctggaaatataaaagatttgcaaactt

SEQ ID NO: 434627 - DNA, 1221 bp, Homo sapiens
  misc_feature (1179)..(1180): n is a, c, g, or t
cctttcgcgcttctgccgtggccctctgcgggccgctccgccggtgctgtccctgggcgcctccgtgctctcagccaaccgcctctgagagcgcccactcgagcgccccgggagccagagggcgggggtcctcgccgggaccctcctgtgggcccagggggacaaaagtggctctcaatccagcacatgcacattgaagcaagttaaaggatttaatatgaagcacagaagcagatagtgccaaatagcaagcagtagttgttacacatttggtgagcagggcagcatttccttctcccactgctgctgagatggcagaaattagtcgaattcagtacgaaatggaatatactgaaggcattagtcagcgaatgagggtcccagaaaagttaaaagtagcaccgccaaacgctgacctggaacaaggattccaagaaggagttccaaatgctagtgtgataatgcaagttccggagaggattgttgtagcaggaaataatgaagatgtttcattttcaagaccagcagatcttgaccttattcagtcaactccctttaaacccctggcactgaaaacaccacctcgtgtacttacgctgagtgaaagaccactagattttctggatttagaaagacctcctacaacccctcaaaatgaagaaatccgagcagttggcagactaaaaagagagcggtctatgagtgaaaatgctgttcgccaaaatggacagctggtcagaaatgattctctgtatggcatttcaaatatagatacaaccattgaaggaacgtcagatgacctgactgttgtagatgcagcttcactaagacgacagataatcaaactaaatagacgtctacaacttctggaagaggagaacaaagaacgtgctaaaagagaaatggtcatgtattcaattactgtagctttctggctgcttaatagctggctctggtttcgccgctagaggtaacatcagccctcaaaaatactgtctcaacagctggaaatataaaagatttgcaaacttcctttgtttctgtctctgcattgtatgccattttatagtccacaccctgaaaatgtatttcttccagaaagtctggaggaaggacctatatttgtagaagtaaaggtatattctgtcactcagctgtattcacgtctgagcagtctgnngttaacacctgcttaaaattctccttttgcatgttttgtaa

SEQ ID NO: 434628 - DNA, 1250 bp, Homo sapiens
cctttcgcgcttctgccgtggccctctgcgggccgctccgccggtgctgtccctgggcgcctccgtgctctcagccaaccgcctctgagagcgcccactcgagcgccccgggagccagagggcgggggtcctcgccgggaccctcctgtgggcccagggggacaaaagtggctctcaatccagcacatgcacattgaagcaagttaaaggatttaatatgaagcacagaagcagatagtgccaaatagcaagcagtagttgttacacatttggtgagcagggcagcatttccttctcccactgctgctgagatggcagaaattagtcgaattcagtacgaaatggaatatactgaaggcattagtcagcgaatgagggtcccagaaaagttaaaagtagcaccgccaaacgctgacctggaacaaggattccaagaaggagttccaaatgctagtgtgataatgcaagttccggagaggattgttgtagcaggaaataatgaagatgtttcattttcaagaccagcagatcttgaccttattcagtcaactccctttaaacccctggcactgaaaacaccacctcgtgtacttacgctgagtgaaagaccactagattttctggatttagaaagacctcctacaacccctcaaaatgaagaaatccgagcagttggcagactaaaaagagagcggtctatgagtgaaaatgctgttcgccaaaatggacagctggtcagaaatgattctctgtgacaccatcgccacaacaggctcgggtctgtcctccccatatgttacctgaagatggagctaatctttcctctgctcgtggcattttgtcgcttatccagtcttctactcgtagggcataccagcagatcttggatgtgctggatgaaaatcgcagacctgtgttgcgtggtgggtctgctgccgccacttctaatcctcatcatgacaacgtcagggtatggcatttcaaatatagatacaaccattgaaggaacgtcagatgacctgactgttgtagatgcagcttcactaagacgacagataatcaaactaaatagacgtctacaacttctggaagaggagaacaaagaacgtgctaaaagagaaatggtcatgtattcaattactgtagctttctggctgcttaatagctggctctggtttcgccgctagaggtaacatcagccctcaaaaatactgtctcaacagctggaaatataaaagatttgcaaactt

SEQ ID NO: 434629 - DNA, 1440 bp, Homo sapiens
  misc_feature (1398)..(1399): n is a, c, g, or t
cctttcgcgcttctgccgtggccctctgcgggccgctccgccggtgctgtccctgggcgcctccgtgctctcagccaaccgcctctgagagcgcccactcgagcgccccgggagccagagggcgggggtcctcgccgggaccctcctgtgggcccagggggacaaaagtggctctcaatccagcacatgcacattgaagcaagttaaaggatttaatatgaagcacagaagcagatagtgccaaatagcaagcagtagttgttacacatttggtgagcagggcagcatttccttctcccactgctgctgagatggcagaaattagtcgaattcagtacgaaatggaatatactgaaggcattagtcagcgaatgagggtcccagaaaagttaaaagtagcaccgccaaacgctgacctggaacaaggattccaagaaggagttccaaatgctagtgtgataatgcaagttccggagaggattgttgtagcaggaaataatgaagatgtttcattttcaagaccagcagatcttgaccttattcagtcaactccctttaaacccctggcactgaaaacaccacctcgtgtacttacgctgagtgaaagaccactagattttctggatttagaaagacctcctacaacccctcaaaatgaagaaatccgagcagttggcagactaaaaagagagcggtctatgagtgaaaatgctgttcgccaaaatggacagctggtcagaaatgattctctgtgacaccatcgccacaacaggctcgggtctgtcctccccatatgttacctgaagatggagctaatctttcctctgctcgtggcattttgtcgcttatccagtcttctactcgtagggcataccagcagatcttggatgtgctggatgaaaatcgcagacctgtgttgcgtggtgggtctgctgccgccacttctaatcctcatcatgacaacgtcagggtatggcatttcaaatatagatacaaccattgaaggaacgtcagatgacctgactgttgtagatgcagcttcactaagacgacagataatcaaactaaatagacgtctacaacttctggaagaggagaacaaagaacgtgctaaaagagaaatggtcatgtattcaattactgtagctttctggctgcttaatagctggctctggtttcgccgctagaggtaacatcagccctcaaaaatactgtctcaacagctggaaatataaaagatttgcaaacttcctttgtttctgtctctgcattgtatgccattttatagtccacaccctgaaaatgtatttcttccagaaagtctggaggaaggacctatatttgtagaagtaaaggtatattctgtcactcagctgtattcacgtctgagcagtctgnngttaacacctgcttaaaattctccttttgcatgttttgtaa

SEQ ID NO: 434630 - DNA, 1324 bp, Homo sapiens
cctttcgcgcttctgccgtggccctctgcgggccgctccgccggtgctgtccctgggcgcctccgtgctctcagccaaccgcctctgagagcgcccactcgagcgccccgggagccagagggcgggggtcctcgccgggaccctcctgtgggcccagggggacaaaagtggctctcaatccagcacatgcacattgaagcaagttaaaggatttaatatgaagcacagaagcagatagtgccaaatagcaagcagtagttgttacacatttggtgagcagggcagcatttccttctcccactgctgctgagatggcagaaattagtcgaattcagtacgaaatggaatatactgaaggcattagtcagcgaatgagggtcccagaaaagttaaaagtagcaccgccaaacgctgacctggaacaaggattccaagaaggagttccaaatgctagtgtgataatgcaagttccggagaggattgttgtagcaggaaataatgaagatgtttcattttcaagaccagcagatcttgaccttattcagtcaactccctttaaacccctggcactgaaaacaccacctcgtgtacttacgctgagtgaaagaccactagattttctggatttagaaagacctcctacaacccctcaaaatgaagaaatccgagcagttggcagactaaaaagagagcggtctatgagtgaaaatgctgttcgccaaaatggacagctggtcagaaatgattctctggcacagatcagattctgccccaagaaataaaatttcaaggttccaggcaccgatttctgcaccggagtacactgtgacaccatcgccacaacaggctcgggtctgtcctccccatatgttacctgaagatggagctaatctttcctctgctcgtggcattttgtcgcttatccagtcttctactcgtagggcataccagcagatcttggatgtgctggatgaaaatcgcagacctgtgttgcgtggtgggtctgctgccgccacttctaatcctcatcatgacaacgtcagggtatggcatttcaaatatagatacaaccattgaaggaacgtcagatgacctgactgttgtagatgcagcttcactaagacgacagataatcaaactaaatagacgtctacaacttctggaagaggagaacaaagaacgtgctaaaagagaaatggtcatgtattcaattactgtagctttctggctgcttaatagctggctctggtttcgccgctagaggtaacatcagccctcaaaaatactgtctcaacagctggaaatataaaagatttgcaaactt

SEQ ID NO: 434631 - DNA, 917 bp, Homo sapiens
cctttcgcgcttctgccgtggccctctgcgggccgctccgccggtgctgtccctgggcgcctccgtgctctcagccaaccgcctctgagagcgcccactcgagcgccccgggagccagagggcgggggtcctcgccgggaccctcctgtgggcccagggtgagcagggcagcatttccttctcccactgctgctgagatggcagaaattagtcgaattcagtacgaaatggaatatactgaaggcattagtcagcgaatgagggtcccagaaaagttaaaagtagcaccgccaaacgctgacctggaacaaggattccaagaaggagttccaaatgctagtgtgataatgcaagttccggagaggattgttgtagcaggaaataatgaagatgtttcattttcaagaccagcagatcttgaccttattcagtcaactccctttaaacccctggcactgaaaacaccacctcgtgtacttacgctgagtgaaagaccactagattttctggatttagaaagacctcctacaacccctcaaaatgaagaaatccgagcagttggcagactaaaaagagagcggtctatgagtgaaaatgctgttcgccaaaatggacagctggtcagaaatgattctctgtatggcatttcaaatatagatacaaccattgaaggaacgtcagatgacctgactgttgtagatgcagcttcactaagacgacagataatcaaactaaatagacgtctacaacttctggaagaggagaacaaagaacgtgctaaaagagaaatggtcatgtattcaattactgtagctttctggctgcttaatagctggctctggtttcgccgctagaggtaacatcagccctcaaaaatactgtctcaacagctggaaatataaaagatttgcaaactt

SEQ ID NO: 434632 - DNA, 844 bp, Homo sapiens
tagctatatgttaactagcgataatagacctgtatttactgtatttaaatgagtaaaggaacaagcagtgacacatcactaggaagtgagcagggcagcatttccttctcccactgctgctgagatggcagaaattagtcgaattcagtacgaaatggaatatactgaaggcattagtcagcgaatgagggtcccagaaaagttaaaagtagcaccgccaaacgctgacctggaacaaggattccaagaaggagttccaaatgctagtgtgataatgcaagttccggagaggattgttgtagcaggaaataatgaagatgtttcattttcaagaccagcagatcttgaccttattcagtcaactccctttaaacccctggcactgaaaacaccacctcgtgtacttacgctgagtgaaagaccactagattttctggatttagaaagacctcctacaacccctcaaaatgaagaaatccgagcagttggcagactaaaaagagagcggtctatgagtgaaaatgctgttcgccaaaatggacagctggtcagaaatgattctctgtatggcatttcaaatatagatacaaccattgaaggaacgtcagatgacctgactgttgtagatgcagcttcactaagacgacagataatcaaactaaatagacgtctacaacttctggaagaggagaacaaagaacgtgctaaaagagaaatggtcatgtattcaattactgtagctttctggctgcttaatagctggctctggtttcgccgctagaggtaacatcagccctcaaaaatactgtctcaacagctggaaatataaaagatttgcaaactt

SEQ ID NO: 434633 - DNA, 1107 bp, Homo sapiens
  misc_feature (1065)..(1066): n is a, c, g, or t
cctttcgcgcttctgccgtggccctctgcgggccgctccgccggtgctgtccctgggcgcctccgtgctctcagccaaccgcctctgagagcgcccactcgagcgccccgggagccagagggcgggggtcctcgccgggaccctcctgtgggcccagggtgagcagggcagcatttccttctcccactgctgctgagatggcagaaattagtcgaattcagtacgaaatggaatatactgaaggcattagtcagcgaatgagggtcccagaaaagttaaaagtagcaccgccaaacgctgacctggaacaaggattccaagaaggagttccaaatgctagtgtgataatgcaagttccggagaggattgttgtagcaggaaataatgaagatgtttcattttcaagaccagcagatcttgaccttattcagtcaactccctttaaacccctggcactgaaaacaccacctcgtgtacttacgctgagtgaaagaccactagattttctggatttagaaagacctcctacaacccctcaaaatgaagaaatccgagcagttggcagactaaaaagagagcggtctatgagtgaaaatgctgttcgccaaaatggacagctggtcagaaatgattctctgtatggcatttcaaatatagatacaaccattgaaggaacgtcagatgacctgactgttgtagatgcagcttcactaagacgacagataatcaaactaaatagacgtctacaacttctggaagaggagaacaaagaacgtgctaaaagagaaatggtcatgtattcaattactgtagctttctggctgcttaatagctggctctggtttcgccgctagaggtaacatcagccctcaaaaatactgtctcaacagctggaaatataaaagatttgcaaacttcctttgtttctgtctctgcattgtatgccattttatagtccacaccctgaaaatgtatttcttccagaaagtctggaggaaggacctatatttgtagaagtaaaggtatattctgtcactcagctgtattcacgtctgagcagtctgnngttaacacctgcttaaaattctccttttgcatgttttgtaa

SEQ ID NO: 434634 - DNA, 1136 bp, Homo sapiens
cctttcgcgcttctgccgtggccctctgcgggccgctccgccggtgctgtccctgggcgcctccgtgctctcagccaaccgcctctgagagcgcccactcgagcgccccgggagccagagggcgggggtcctcgccgggaccctcctgtgggcccagggtgagcagggcagcatttccttctcccactgctgctgagatggcagaaattagtcgaattcagtacgaaatggaatatactgaaggcattagtcagcgaatgagggtcccagaaaagttaaaagtagcaccgccaaacgctgacctggaacaaggattccaagaaggagttccaaatgctagtgtgataatgcaagttccggagaggattgttgtagcaggaaataatgaagatgtttcattttcaagaccagcagatcttgaccttattcagtcaactccctttaaacccctggcactgaaaacaccacctcgtgtacttacgctgagtgaaagaccactagattttctggatttagaaagacctcctacaacccctcaaaatgaagaaatccgagcagttggcagactaaaaagagagcggtctatgagtgaaaatgctgttcgccaaaatggacagctggtcagaaatgattctctgtgacaccatcgccacaacaggctcgggtctgtcctccccatatgttacctgaagatggagctaatctttcctctgctcgtggcattttgtcgcttatccagtcttctactcgtagggcataccagcagatcttggatgtgctggatgaaaatcgcagacctgtgttgcgtggtgggtctgctgccgccacttctaatcctcatcatgacaacgtcagggtatggcatttcaaatatagatacaaccattgaaggaacgtcagatgacctgactgttgtagatgcagcttcactaagacgacagataatcaaactaaatagacgtctacaacttctggaagaggagaacaaagaacgtgctaaaagagaaatggtcatgtattcaattactgtagctttctggctgcttaatagctggctctggtttcgccgctagaggtaacatcagccctcaaaaatactgtctcaacagctggaaatataaaagatttgcaaactt

SEQ ID NO: 434635 - DNA, 1168 bp, Homo sapiens
cctttcgcgcttctgccgtggccctctgcgggccgctccgccggtgctgtccctgggcgcctccgtgctctcagccaaccgcctctgagagcgcccactcgagcgccccgggagccagagggcgggggtcctcgccgggaccctcctgtgggcccagggggacaaaagtggctctcaatccagcacatgcacattgaagcaagttaaaggatttaatatgaagcacagaagcagatagtgccaaatagcaagcagtagttgttacacatttggtgagcagggcagcatttccttctcccactgctgctgagatggcagaaattagtcgaattcagtacgaaatggaatatactgaaggcattagtcagcgaatgagggtcccagaaaagttaaaagtagcaccgccaaacgctgacctggaacaaggattccaagaaggagttccaaatgctagtgtgataatgcaagttccggagaggattgttgtagcaggaaataatgaagatgtttcattttcaagaccagcagatcttgaccttattcagtcaactccctttaaacccctggcactgaaaacaccacctcgtgtacttacgctgagtgaaagaccactagattttctggatttagaaagacctcctacaacccctcaaaatgaagaaatccgagcagttggcagactaaaaagagagcggtctatgagtgaaaatgctgttcgccaaaatggacagctggtcagaaatgattctctggcacagatcagattctgccccaagaaataaaatttcaaggttccaggcaccgatttctgcaccggagtacactagacctgtgttgcgtggtgggtctgctgccgccacttctaatcctcatcatgacaacgtcagggtatggcatttcaaatatagatacaaccattgaaggaacgtcagatgacctgactgttgtagatgcagcttcactaagacgacagataatcaaactaaatagacgtctacaacttctggaagaggagaacaaagaacgtgctaaaagagaaatggtcatgtattcaattactgtagctttctggctgcttaatagctggctctggtttcgccgctagaggtaacatcagccctcaaaaatactgtctcaacagctggaaatataaaagatttgcaaactt

SEQ ID NO: 434636 - DNA, 1210 bp, Homo sapiens
cctttcgcgcttctgccgtggccctctgcgggccgctccgccggtgctgtccctgggcgcctccgtgctctcagccaaccgcctctgagagcgcccactcgagcgccccgggagccagagggcgggggtcctcgccgggaccctcctgtgggcccagggtgagcagggcagcatttccttctcccactgctgctgagatggcagaaattagtcgaattcagtacgaaatggaatatactgaaggcattagtcagcgaatgagggtcccagaaaagttaaaagtagcaccgccaaacgctgacctggaacaaggattccaagaaggagttccaaatgctagtgtgataatgcaagttccggagaggattgttgtagcaggaaataatgaagatgtttcattttcaagaccagcagatcttgaccttattcagtcaactccctttaaacccctggcactgaaaacaccacctcgtgtacttacgctgagtgaaagaccactagattttctggatttagaaagacctcctacaacccctcaaaatgaagaaatccgagcagttggcagactaaaaagagagcggtctatgagtgaaaatgctgttcgccaaaatggacagctggtcagaaatgattctctggcacagatcagattctgccccaagaaataaaatttcaaggttccaggcaccgatttctgcaccggagtacactgtgacaccatcgccacaacaggctcgggtctgtcctccccatatgttacctgaagatggagctaatctttcctctgctcgtggcattttgtcgcttatccagtcttctactcgtagggcataccagcagatcttggatgtgctggatgaaaatcgcagacctgtgttgcgtggtgggtctgctgccgccacttctaatcctcatcatgacaacgtcagggtatggcatttcaaatatagatacaaccattgaaggaacgtcagatgacctgactgttgtagatgcagcttcactaagacgacagataatcaaactaaatagacgtctacaacttctggaagaggagaacaaagaacgtgctaaaagagaaatggtcatgtattcaattactgtagctttctggctgcttaatagctggctctggtttcgccgctagaggtaacatcagccctcaaaaatactgtctcaacagctggaaatataaaagatttgcaaactt

SEQ ID NO: 434637 - DNA, 917 bp, Homo sapiens
cctttcgcgcttctgccgtggccctctgcgggccgctccgccggtgctgtccctgggcgcctccgtgctctcagccaaccgcctctgagagcgcccactcgagcgccccgggagccagagggcgggggtcctcgccgggaccctcctgtgggcccaggggaaataatgaagatgtttcattttcaagaccagcagatcttgaccttattcagtcaactccctttaaacccctggcactgaaaacaccacctcgtgtacttacgctgagtgaaagaccactagattttctggatttagaaagacctcctacaacccctcaaaatgaagaaatccgagcagttggcagactaaaaagagagcggtctatgagtgaaaatgctgttcgccaaaatggacagctggtcagaaatgattctctgtgacaccatcgccacaacaggctcgggtctgtcctccccatatgttacctgaagatggagctaatctttcctctgctcgtggcattttgtcgcttatccagtcttctactcgtagggcataccagcagatcttggatgtgctggatgaaaatcgcagacctgtgttgcgtggtgggtctgctgccgccacttctaatcctcatcatgacaacgtcagggtatggcatttcaaatatagatacaaccattgaaggaacgtcagatgacctgactgttgtagatgcagcttcactaagacgacagataatcaaactaaatagacgtctacaacttctggaagaggagaacaaagaacgtgctaaaagagaaatggtcatgtattcaattactgtagctttctggctgcttaatagctggctctggtttcgccgctagaggtaacatcagccctcaaaaatactgtctcaacagctggaaatataaaagatttgcaaactt

SEQ ID NO: 434638 - DNA, 1088 bp, Homo sapiens
cctttcgcgcttctgccgtggccctctgcgggccgctccgccggtgctgtccctgggcgcctccgtgctctcagccaaccgcctctgagagcgcccactcgagcgccccgggagccagagggcgggggtcctcgccgggaccctcctgtgggcccagggtgagcagggcagcatttccttctcccactgctgctgagatggcagaaattagtcgaattcagtacgaaatggaatatactgaaggcattagtcagcgaatgagggtcccagaaaagttaaaagtagcaccgccaaacgctgacctggaacaaggattccaagaaggagttccaaatgctagtgtgataatgcaagttccggagaggattgttgtagcaggaaataatgaagatgtttcattttcaagaccagcagatcttgaccttattcagtcaactccctttaaacccctggcactgaaaacaccacctcgtgtacttacgctgagtgaaagaccactagattttctggatttagaaagacctcctacaacccctcaaaatgaagaaatccgagcagttggcagactaaaaagagagcggtctatgagtgaaaatgctgttcgccaaaatggacagctggtcagaaatgattctctggcacagatcagattctgccccaagaaataaaatttcaaggttccaggcaccgatttctgcaccggagtacactccagcagatcttggatgtgctggatgaaaatcgcagacctgtgttgcgtggtgggtctgctgccgccacttctaatcctcatcatgacaacgtcagggtatggcatttcaaatatagatacaaccattgaaggaacgtcagatgacctgactgttgtagatgcagcttcactaagacgacagataatcaaactaaatagacgtctacaacttctggaagaggagaacaaagaacgtgctaaaagagaaatggtcatgtattcaattactgtagctttctggctgcttaatagctggctctggtttcgccgctagaggtaacatcagccctcaaaaatactgtctcaacagctggaaatataaaagatttgcaaactt

SEQ ID NO: 434639 - DNA, 977 bp, Homo sapiens
cctttcgcgcttctgccgtggccctctgcgggccgctccgccggtgctgtccctgggcgcctccgtgctctcagccaaccgcctctgagagcgcccactcgagcgccccgggagccagagggcgggggtcctcgccgggaccctcctgtgggcccagggggacaaaagtggctctcaatccagcacatgcacattgaagcaagttaaaggatttaatatgaagcacagaagcagatagtgccaaatagcaagcagtagttgttacacatttggtgagcagggcagcatttccttctcccactgctgctgagatggcagaaattagtcgaattcagtacgaaatggaatatactgaaggcattagtcagcgaatgagggtcccagaaaagttaaaagtagcaccgccaaacgctgacctggaacaaggattccaagaaggagttccaaatgctagtgtgataatgcaagttccggagaggattgttgtagcaggaaataatgaagatgtttcattttcaagaccagcagatcttgaccttattcagtcaactccctttaaacccctgctggatttagaaagacctcctacaacccctcaaaatgaagaaatccgagcagttggcagactaaaaagagagcggtctatgagtgaaaatgctgttcgccaaaatggacagctggtcagaaatgattctctgtatggcatttcaaatatagatacaaccattgaaggaacgtcagatgacctgactgttgtagatgcagcttcactaagacgacagataatcaaactaaatagacgtctacaacttctggaagaggagaacaaagaacgtgctaaaagagaaatggtcatgtattcaattactgtagctttctggctgcttaatagctggctctggtttcgccgctagaggtaacatcagccctcaaaaatactgtctcaacagctggaaatataaaagatttgcaaactt

SEQ ID NO: 434640 - DNA, 1065 bp, Homo sapiens
cctttcgcgcttctgccgtggccctctgcgggccgctccgccggtgctgtccctgggcgcctccgtgctctcagccaaccgcctctgagagcgcccactcgagcgccccgggagccagagggcgggggtcctcgccgggaccctcctgtgggcccagggggacaaaagtggctctcaatccagcacatgcacattgaagcaagttaaaggatttaatatgaagcacagaagcagatagtgccaaatagcaagcagtagttgttacacatttggtgagcagggcagcatttccttctcccactgctgctgagatggcagaaattagtcgaattcagtacgaaatggaatatactgaaggcattagtcagcgaatgagggtcccagaaaagttaaaagtagcaccgccaaacgctgacctggaacaaggattccaagaaggagttccaaatgctagtgtgataatgcaagttccggagaggattgttgtagcaggaaataatgaagatgtttcattttcaagaccagcagatcttgaccttattcagtcaactccctttaaacccctggcactgaaaacaccacctcgtgtacttacgctgagtgaaagaccactagattttctggatttagaaagacctcctacaacccctcaaaatgaagaaatccgagcagttggcagactaaaaagagagcggtctatgagtgaaaatgctgttcgccaaaatggacagctggtcagaaatgattctctagacctgtgttgcgtggtgggtctgctgccgccacttctaatcctcatcatgacaacgtcaggtatggcatttcaaatatagatacaaccctttgaagaacgtcgatgaccgactgggggatgcgagtcctaagaagaaggtatcaactaaatagacgtttcacttctgggaagggcacagcacgtgtaaaaaaggggggttccaaggggctggggaaaaaggcggtgggaaaggaaaaagcaaaaagtgtgggggaaaaagagattttgtggttggtgttaaccccaggtttaggggaatagaaataatctcg

SEQ ID NO: 434641 - DNA, 351 bp, Homo sapiens
  misc_feature (52)..(52): n is a, c, g, or t
ccgcgatagtatcttcacctattttcatttcctcaactacccacacaccacncatcacttgagtgatggccgtatggcatttcaaatatagatacaaccattgaaggaacgtcagatgacctgactgttgtagatgcagcttcactaagacgacagataatcaaactaaatagacgtctacaacttctggaagaggagaacaaagaacgtgctaaaagagaaatggtcatgtattcaattactgtagctttctggctgcttaatagctggctctggtttcgccgctagaggtaacatcagccctcaaaaatactgtctcaacagctggaaatataaaagatttgcaaactt

SEQ ID NO: 434642 - DNA, 5794 bp, Homo sapiens
gtaagagtcgaggcctgagtcgcagtagaagccgaagtagggggcgcagcaaagaccgggatccaaataggaatgttgagcacagggaaagatcgaagtttaagagtgaaaggaatgacctggagagttcctatgtgcctgtgtctgcaccacctccaaactcttctgagcagtattcctctggggcacagtctattcccagcactgttactgtgatcgcacctgctcaccactctgaaaacacaactgagagttggtctaattactataacaatcatagctcttccaattcttttggtcgaaacctaccaccaaagaggcgatgcagagattatgatgaaagaggattttgtgtacttggtgacctttgtcagtttgatcatggaaatgatcccctagttgttgatgaagttgctctgccaagtatgattcctttcccaccccctcctcctgggcttcctcctccaccacctcctggaatgttaatgcctccaatgccaggtccaggcccaggcccgggcccaggtccaggcccaggcccgggcccaggtccaggtcctggccatagtatgagacttcctgttccccaaggacatggtcagcctccaccatccgttgtgcttcccataccaagaccacctataacacaatcaagcttgataaacagccgtgaccagcctgggacaagtgcagtgcccaatcttgcatcagtgggaacaagactacctcctcctttaccccagaacctcctttacacagtatcagaacgacagcccatgtactctcgtgaacatggtgctgctgcatctgagcgacttcagttggggacaccgcctcctctgttggcagctcgtttggtgccacctcgaaacctcatgggatcctccattggataccatacctcagtctccagccctacccctctggttccagatacatatgaaccagatggttacaacccagaagctcctagtattactagttctggtagatctcagtacagacagttcttttcaagaactcagacacagcgtcccaatctgattggcctaacatctggagatatggatgtaaatccaagagctgctaacattgtgatccagactgaaccaccagttcctgtttcgattaatagcaacataaccagagtagttcttgaaccagatagtcgaaaaagagctatgagtggtttggaagggccactcacaaagaaaccttggctgggaaagcaaggaaataacaatcaaaataaaccagggttcttacgaaagaatcagtatacaaacaccaaattagaagtcaagaaaatccctcaggaattgaacaacattaccaagctcaatgaacacttcagcaaatttggaactattgttaatatccaggttgcttttaagggtgacccagaagcagccctaatccaatatcttaccaatgaggaggccaggaaagccatttctagcacagaagcagttctaaacaaccgattcattcgagtcttgtggcatagggaaaataatgagcaaccgacactacagtcctcagcacagctgctcctgcaacaacagcaaacacttagtcacctctcacagcagcaccatcacctgccacagcatctacatcagcagcaggtgctagtggcccagtctgctccttcaacagtgcacggaggtatccagaagatgatgagcaaaccacagacatcaggtgcatatgttcttaacaaagttcctgttaaacatcgtcttggacatgcaggtggtaaccagagtgatgcatcacatttgttgaatcagtctggtggtgctggagaagattgccagatattttcaactccaggccatccaaaaatgatttacagctcctcaaacttaaagacaccttcaaagctctgttcagggtctaaatctcatgatgttcaagaagtgcttaaaaaaaaacaggaagcaatgaagttacaacaagatatgaggaaaaaaagacaggaagtgttagaaaagcaaatagaatgccaaaagatgttaatatccaagttagaaaaaaacaaaaacatgaaaccagaagaaagagcaaatataatgaagactttgaaagagcttggagagaagatctcacaattaaaagatgaattaaaaacatcttctgcagtctccacaccatctaaagtgaagacaaaaacggaggcccagaaggagttattagatactgaactggacctccacaagaggctgtcctcaggagaagacaccacagaattacggaaaaaactcagtcagttacaggttgaggctgcacggttaggtattttacctgtgggtcgaggaaagaccatgtcctctcaaggtcgaggaagaggccgagggcgtggaggaagaggaaggggctcactaaatcacatggtggtggaccatcgtcccaaagcactaacagttggaggattcattgaggaagaaaaagaagacttgcttcagcatttctcaaccgcaaaccaagggccaaaatttaaagaccgtcggctacagatatcatggcacaagcccaaggtaccatctatatccactgagactgaagaagaagaagtcaaggaggaggaaacagaaacctcagatttgtttttgcctgatgatgacgatgaagatgaagatgaatatgagtctcgctcatggcgaagatgaaatctgatgctagctgtataatttttaggaatattgtttagaagaacaacttttaaaaattatttaaaagaagtcaatgagccaaaaaaaatttttttatttttcttttcaacacagtaggttcaagaacagcaagtttgctatttaaacacatctcataactgtacatgatattaaagcaccaaaggcctagtgacttttacacagttgtgaagatccacagcaatgacatggataatctctagagccttattttccacaccaccttttttttgttgctgttggtgttggattatgatgtaaatgacagggtgttcagaaattttattttggattataatctactgataaaatttaattaaatgtcaaaatcacctgtaatcttttaactctcagttgttatggatgggtcatcagacagtaggaaatatttgtaattaaaatacccttttgctttcaagagtggtcttggaagaaaaatatgtttattttaattttaatttttttttttttttactttggaggagcccaatttgtattcagtctaaatttgtttttcatggtttttatgtgtggtagtactagttcagtgaaaatcacaacaaactgtgtgttcttaaatgctacagcaatggtagctagctctatagtatttccattctcttgtcatatgaactcctggacttttcctgctactgattcttagtttgctttgatatttagtgagcgctggttcggctggtctttttaaaaatttttataactcagaatgtaaaaggctttcacctattgcccctttctcgtcccccttttcttcctcttgcctttctattaataggcctgacttagtcatcattgatataagtggttcatttgggcaaccgcaggcagtctccaataaaaggttcaaaccagcacctggataaataagtgatgttttgatgagaatgatggaaggattttggggagaagagaatcaccagctttattttttccctcttttgaagcttcagttcagtatagttacacagaagggtttaaaaatgtctgaaattcttttcctaaatttaaaccatgatggtgaggtgactggggggtggggggtggaggtgggagggggttgagggctgagtatgctagtaataaatgggagtcatatatgactttgttcagatgaccttattttttcataattttgtagcttgttgctatccatgaacatacgcatccctcagtagacagtttcctttactgtgtgcatttttactgtacactgtatagagtagagtatctgttaagtaaaatatatatgtaaatttatgtcttcgtgttctgaatgttagatggaaaagcagaggagcaacactacactgtactgacccctgggaaaataaaatgattaatgtacctaggctgtcactttttcaaggatatacacatctgtgtttttatatatgtgtggtatgaaaatttgaaacctcctgttgtctccaaaagggtcttggtgaccactatatcaaggattttgtttgctgaggtaaagacaatttctcaatatagaaactattcactaagaacttaaaaccatcaggattctagatttacttagctataagaagttaaatcccacgttctgataatctttattcttctacatgttttcctggaatgatgtgtcaaaccagggtcatttttaagttcatataattttctttcataataatgaggacttcctttttctaggttattgttatatttctagtaacactgaaggtaaaataagcttataaaagaaggaaaacatcagaatggtgtatctagaatacacaatcttgctccttactcctccatcatctctaatgaaatttttcttgatgtctgtggctcagtcagtatatattttgaaagattcattgtggtgaatattttgagtcctgacagtttaaacgtgatagagggaacaaaggatttatatattttttgtacaaagttttttcttaaactgtataattttgtaaataatttgtttgggttttttttttgtgtactaaaactaccagcgtatagatttcaataagaattgttgtatttttgtatttggaaactgaaaattacagtaaataaatggaactctaagaaaaatttcagtagacagttcaacagaatgagattccttttcatatgatttttttgacctcaaaatggacatcttatttcactctcagtaaaaagttgaaaatttgactttttagtattgggggcagaagatagaagtgtgttaaagtgaaaaacagttttttcagtaaggtttgaggccctttctataagttttcagtacaccttaaacaggactaaaaatactttaaaagtgtgctttcaaagaattttaaaacatgtttgactcaaagatgaatttgaagtgagttaattataatactggaaaacttcaggttagcataaaatagtttatatatatcccctgccccctttgggatttacttccaccatcaaatcttcaactgttagaatttcacttaaaagtgaataactgccatacatgttttcttggcatcttcatttacagaaataacatacagcatctaaagcaagttctgtccctcttaatgtgtatgacatctttttaagtagctgatcagcaataatagccaccagttgactaggtcagcctgatatactagtggatcactgtccaagataaaaaggtaaccccaagtattgcaaaatttccctcaatttctttatgtaacattgaagaaatgttgttaccagctaagatgataaattggaaaacagtcttgttaaggtgaaaggggtccttggtgatggatcattatttcaaaaaagaaaaaaatcatgtgaaaaggaatagtggttcctcttgatgtatagtatgcctgtattatagtttttacaaaattgtgaacttgtgtaatagtataataggagatattgttgaatttctaactgtttatacatttaaattcatatatgtaatgtttgttttatcaattacaatctgaatttctaagaagcatgttgacttttgcaataaagatgcaatatggaatggttcacaattggaaaaaaaaagaaaaaagatg

SEQ ID NO: 434643 - DNA, 5629 bp, Homo sapiens
gtaagagtcgaggcctgagtcgcagtagaagccgaagtagggggcgcagcaaagaccgggatccaaataggaatgttgagcacagggaaagatcgaagtttaagagtgaaaggaatgacctggagagttcctatgtgcctgtgtctgcaccacctccaaactcttctgagcagtattcctctggggcacagtctattcccagcactgttactgtgatcgcacctgctcaccactctgaaaacacaactgagagttggtctaattactataacaatcatagctcttccaattcttttggtcgaaacctaccaccaaagaggcgatgcagagattatgatgaaagaggattttgtgtacttggtgacctttgtcagtttgatcatggaaatgatcccctagttgttgatgaagttgctctgccaagtatgattcctttcccaccccctcctcctgggcttcctcctccaccacctcctggaatgttaatgcctccaatgccaggtccaggcccaggcccgggcccaggtccaggcccaggcccgggcccaggtccaggtcctggccatagtatgagacttcctgttccccaaggacatggtcagcctccaccatccgttgtgcttcccataccaagaccacctataacacaatcaagcttgataaacagccgtgaccagcctgggacaagtgcagtgcccaatcttgcatcagtgggaacaagactacctcctcctttaccccagaacctcctttacacagtatcagaacatacatatgaaccagatggttacaacccagaagctcctagtattactagttctggtagatctcagtacagacagttcttttcaagaactcagacacagcgtcccaatctgattggcctaacatctggagatatggatgtaaatccaagagctgctaacattgtgatccagactgaaccaccagttcctgtttcgattaatagcaacataaccagagtagttcttgaaccagatagtcgaaaaagagctatgagtggtttggaagggccactcacaaagaaaccttggctgggaaagcaaggaaataacaatcaaaataaaccagggttcttacgaaagaatcagtatacaaacaccaaattagaagtcaagaaaatccctcaggaattgaacaacattaccaagctcaatgaacacttcagcaaatttggaactattgttaatatccaggttgcttttaagggtgacccagaagcagccctaatccaatatcttaccaatgaggaggccaggaaagccatttctagcacagaagcagttctaaacaaccgattcattcgagtcttgtggcatagggaaaataatgagcaaccgacactacagtcctcagcacagctgctcctgcaacaacagcaaacacttagtcacctctcacagcagcaccatcacctgccacagcatctacatcagcagcaggtgctagtggcccagtctgctccttcaacagtgcacggaggtatccagaagatgatgagcaaaccacagacatcaggtgcatatgttcttaacaaagttcctgttaaacatcgtcttggacatgcaggtggtaaccagagtgatgcatcacatttgttgaatcagtctggtggtgctggagaagattgccagatattttcaactccaggccatccaaaaatgatttacagctcctcaaacttaaagacaccttcaaagctctgttcagggtctaaatctcatgatgttcaagaagtgcttaaaaaaaaacaggaagcaatgaagttacaacaagatatgaggaaaaaaagacaggaagtgttagaaaagcaaatagaatgccaaaagatgttaatatccaagttagaaaaaaacaaaaacatgaaaccagaagaaagagcaaatataatgaagactttgaaagagcttggagagaagatctcacaattaaaagatgaattaaaaacatcttctgcagtctccacaccatctaaagtgaagacaaaaacggaggcccagaaggagttattagatactgaactggacctccacaagaggctgtcctcaggagaagacaccacagaattacggaaaaaactcagtcagttacaggttgaggctgcacggttaggtattttacctgtgggtcgaggaaagaccatgtcctctcaaggtcgaggaagaggccgagggcgtggaggaagaggaaggggctcactaaatcacatggtggtggaccatcgtcccaaagcactaacagttggaggattcattgaggaagaaaaagaagacttgcttcagcatttctcaaccgcaaaccaagggccaaaatttaaagaccgtcggctacagatatcatggcacaagcccaaggtaccatctatatccactgagactgaagaagaagaagtcaaggaggaggaaacagaaacctcagatttgtttttgcctgatgatgacgatgaagatgaagatgaatatgagtctcgctcatggcgaagatgaaatctgatgctagctgtataatttttaggaatattgtttagaagaacaacttttaaaaattatttaaaagaagtcaatgagccaaaaaaaatttttttatttttcttttcaacacagtaggttcaagaacagcaagtttgctatttaaacacatctcataactgtacatgatattaaagcaccaaaggcctagtgacttttacacagttgtgaagatccacagcaatgacatggataatctctagagccttattttccacaccaccttttttttgttgctgttggtgttggattatgatgtaaatgacagggtgttcagaaattttattttggattataatctactgataaaatttaattaaatgtcaaaatcacctgtaatcttttaactctcagttgttatggatgggtcatcagacagtaggaaatatttgtaattaaaatacccttttgctttcaagagtggtcttggaagaaaaatatgtttattttaattttaatttttttttttttttactttggaggagcccaatttgtattcagtctaaatttgtttttcatggtttttatgtgtggtagtactagttcagtgaaaatcacaacaaactgtgtgttcttaaatgctacagcaatggtagctagctctatagtatttccattctcttgtcatatgaactcctggacttttcctgctactgattcttagtttgctttgatatttagtgagcgctggttcggctggtctttttaaaaatttttataactcagaatgtaaaaggctttcacctattgcccctttctcgtcccccttttcttcctcttgcctttctattaataggcctgacttagtcatcattgatataagtggttcatttgggcaaccgcaggcagtctccaataaaaggttcaaaccagcacctggataaataagtgatgttttgatgagaatgatggaaggattttggggagaagagaatcaccagctttattttttccctcttttgaagcttcagttcagtatagttacacagaagggtttaaaaatgtctgaaattcttttcctaaatttaaaccatgatggtgaggtgactggggggtggggggtggaggtgggagggggttgagggctgagtatgctagtaataaatgggagtcatatatgactttgttcagatgaccttattttttcataattttgtagcttgttgctatccatgaacatacgcatccctcagtagacagtttcctttactgtgtgcatttttactgtacactgtatagagtagagtatctgttaagtaaaatatatatgtaaatttatgtcttcgtgttctgaatgttagatggaaaagcagaggagcaacactacactgtactgacccctgggaaaataaaatgattaatgtacctaggctgtcactttttcaaggatatacacatctgtgtttttatatatgtgtggtatgaaaatttgaaacctcctgttgtctccaaaagggtcttggtgaccactatatcaaggattttgtttgctgaggtaaagacaatttctcaatatagaaactattcactaagaacttaaaaccatcaggattctagatttacttagctataagaagttaaatcccacgttctgataatctttattcttctacatgttttcctggaatgatgtgtcaaaccagggtcatttttaagttcatataattttctttcataataatgaggacttcctttttctaggttattgttatatttctagtaacactgaaggtaaaataagcttataaaagaaggaaaacatcagaatggtgtatctagaatacacaatcttgctccttactcctccatcatctctaatgaaatttttcttgatgtctgtggctcagtcagtatatattttgaaagattcattgtggtgaatattttgagtcctgacagtttaaacgtgatagagggaacaaaggatttatatattttttgtacaaagttttttcttaaactgtataattttgtaaataatttgtttgggttttttttttgtgtactaaaactaccagcgtatagatttcaataagaattgttgtatttttgtatttggaaactgaaaattacagtaaataaatggaactctaagaaaaatttcagtagacagttcaacagaatgagattccttttcatatgatttttttgacctcaaaatggacatcttatttcactctcagtaaaaagttgaaaatttgactttttagtattgggggcagaagatagaagtgtgttaaagtgaaaaacagttttttcagtaaggtttgaggccctttctataagttttcagtacaccttaaacaggactaaaaatactttaaaagtgtgctttcaaagaattttaaaacatgtttgactcaaagatgaatttgaagtgagttaattataatactggaaaacttcaggttagcataaaatagtttatatatatcccctgccccctttgggatttacttccaccatcaaatcttcaactgttagaatttcacttaaaagtgaataactgccatacatgttttcttggcatcttcatttacagaaataacatacagcatctaaagcaagttctgtccctcttaatgtgtatgacatctttttaagtagctgatcagcaataatagccaccagttgactaggtcagcctgatatactagtggatcactgtccaagataaaaaggtaaccccaagtattgcaaaatttccctcaatttctttatgtaacattgaagaaatgttgttaccagctaagatgataaattggaaaacagtcttgttaaggtgaaaggggtccttggtgatggatcattatttcaaaaaagaaaaaaatcatgtgaaaaggaatagtggttcctcttgatgtatagtatgcctgtattatagtttttacaaaattgtgaacttgtgtaatagtataataggagatattgttgaatttctaactgtttatacatttaaattcatatatgtaatgtttgttttatcaattacaatctgaatttctaagaagcatgttgacttttgcaataaagatgcaatatggaatggttcacaattggaaaaaaaaagaaaaaagatg

SEQ ID NO: 434644 - DNA, 5526 bp, Homo sapiens
gactcttttatttgctttctcaacaagtcatagtatcatagtgtaaaaagtagagagtacatctgcctctaccttggggatatgtgatgcttaacagagtaacactgagactttggattccttggagaaaaccactttgtaaatgagattggtgggtttttcagggacatgttttgttgttttctgaactctaagtagatgataataagattctttttttattctttattccacagaaagaggattttgtgtacttggtgacctttgtcagtttgatcatggaaatgatcccctagttgttgatgaagttgctctgccaagtatgattcctttcccaccccctcctcctgggcttcctcctccaccacctcctggaatgttaatgcctccaatgccaggtccaggcccaggcccgggcccaggtccaggcccaggcccgggcccaggtccaggtcctggccatagtatgagacttcctgttccccaaggacatggtcagcctccaccatccgttgtgcttcccataccaagaccacctataacacaatcaagcttgataaacagccgtgaccagcctgggacaagtgcagtgcccaatcttgcatcagtgggaacaagactacctcctcctttaccccagaacctcctttacacagtatcagaacatacatatgaaccagatggttacaacccagaagctcctagtattactagttctggtagatctcagtacagacagttcttttcaagaactcagacacagcgtcccaatctgattggcctaacatctggagatatggatgtaaatccaagagctgctaacattgtgatccagactgaaccaccagttcctgtttcgattaatagcaacataaccagagtagttcttgaaccagatagtcgaaaaagagctatgagtggtttggaagggccactcacaaagaaaccttggctgggaaagcaaggaaataacaatcaaaataaaccagggttcttacgaaagaatcagtatacaaacaccaaattagaagtcaagaaaatccctcaggaattgaacaacattaccaagctcaatgaacacttcagcaaatttggaactattgttaatatccaggttgcttttaagggtgacccagaagcagccctaatccaatatcttaccaatgaggaggccaggaaagccatttctagcacagaagcagttctaaacaaccgattcattcgagtcttgtggcatagggaaaataatgagcaaccgacactacagtcctcagcacagctgctcctgcaacaacagcaaacacttagtcacctctcacagcagcaccatcacctgccacagcatctacatcagcagcaggtgctagtggcccagtctgctccttcaacagtgcacggaggtatccagaagatgatgagcaaaccacagacatcaggtgcatatgttcttaacaaagttcctgttaaacatcgtcttggacatgcaggtggtaaccagagtgatgcatcacatttgttgaatcagtctggtggtgctggagaagattgccagatattttcaactccaggccatccaaaaatgatttacagctcctcaaacttaaagacaccttcaaagctctgttcagggtctaaatctcatgatgttcaagaagtgcttaaaaaaaaacaggaagcaatgaagttacaacaagatatgaggaaaaaaagacaggaagtgttagaaaagcaaatagaatgccaaaagatgttaatatccaagttagaaaaaaacaaaaacatgaaaccagaagaaagagcaaatataatgaagactttgaaagagcttggagagaagatctcacaattaaaagatgaattaaaaacatcttctgcagtctccacaccatctaaagtgaagacaaaaacggaggcccagaaggagttattagatactgaactggacctccacaagaggctgtcctcaggagaagacaccacagaattacggaaaaaactcagtcagttacaggttgaggctgcacggttaggtattttacctgtgggtcgaggaaagaccatgtcctctcaaggtcgaggaagaggccgagggcgtggaggaagaggaaggggctcactaaatcacatggtggtggaccatcgtcccaaagcactaacagttggaggattcattgaggaagaaaaagaagacttgcttcagcatttctcaaccgcaaaccaagggccaaaatttaaagaccgtcggctacagatatcatggcacaagcccaaggtaccatctatatccactgagactgaagaagaagaagtcaaggaggaggaaacagaaacctcagatttgtttttgcctgatgatgacgatgaagatgaagatgaatatgagtctcgctcatggcgaagatgaaatctgatgctagctgtataatttttaggaatattgtttagaagaacaacttttaaaaattatttaaaagaagtcaatgagccaaaaaaaatttttttatttttcttttcaacacagtaggttcaagaacagcaagtttgctatttaaacacatctcataactgtacatgatattaaagcaccaaaggcctagtgacttttacacagttgtgaagatccacagcaatgacatggataatctctagagccttattttccacaccaccttttttttgttgctgttggtgttggattatgatgtaaatgacagggtgttcagaaattttattttggattataatctactgataaaatttaattaaatgtcaaaatcacctgtaatcttttaactctcagttgttatggatgggtcatcagacagtaggaaatatttgtaattaaaatacccttttgctttcaagagtggtcttggaagaaaaatatgtttattttaattttaatttttttttttttttactttggaggagcccaatttgtattcagtctaaatttgtttttcatggtttttatgtgtggtagtactagttcagtgaaaatcacaacaaactgtgtgttcttaaatgctacagcaatggtagctagctctatagtatttccattctcttgtcatatgaactcctggacttttcctgctactgattcttagtttgctttgatatttagtgagcgctggttcggctggtctttttaaaaatttttataactcagaatgtaaaaggctttcacctattgcccctttctcgtcccccttttcttcctcttgcctttctattaataggcctgacttagtcatcattgatataagtggttcatttgggcaaccgcaggcagtctccaataaaaggttcaaaccagcacctggataaataagtgatgttttgatgagaatgatggaaggattttggggagaagagaatcaccagctttattttttccctcttttgaagcttcagttcagtatagttacacagaagggtttaaaaatgtctgaaattcttttcctaaatttaaaccatgatggtgaggtgactggggggtggggggtggaggtgggagggggttgagggctgagtatgctagtaataaatgggagtcatatatgactttgttcagatgaccttattttttcataattttgtagcttgttgctatccatgaacatacgcatccctcagtagacagtttcctttactgtgtgcatttttactgtacactgtatagagtagagtatctgttaagtaaaatatatatgtaaatttatgtcttcgtgttctgaatgttagatggaaaagcagaggagcaacactacactgtactgacccctgggaaaataaaatgattaatgtacctaggctgtcactttttcaaggatatacacatctgtgtttttatatatgtgtggtatgaaaatttgaaacctcctgttgtctccaaaagggtcttggtgaccactatatcaaggattttgtttgctgaggtaaagacaatttctcaatatagaaactattcactaagaacttaaaaccatcaggattctagatttacttagctataagaagttaaatcccacgttctgataatctttattcttctacatgttttcctggaatgatgtgtcaaaccagggtcatttttaagttcatataattttctttcataataatgaggacttcctttttctaggttattgttatatttctagtaacactgaaggtaaaataagcttataaaagaaggaaaacatcagaatggtgtatctagaatacacaatcttgctccttactcctccatcatctctaatgaaatttttcttgatgtctgtggctcagtcagtatatattttgaaagattcattgtggtgaatattttgagtcctgacagtttaaacgtgatagagggaacaaaggatttatatattttttgtacaaagttttttcttaaactgtataattttgtaaataatttgtttgggttttttttttgtgtactaaaactaccagcgtatagatttcaataagaattgttgtatttttgtatttggaaactgaaaattacagtaaataaatggaactctaagaaaaatttcagtagacagttcaacagaatgagattccttttcatatgatttttttgacctcaaaatggacatcttatttcactctcagtaaaaagttgaaaatttgactttttagtattgggggcagaagatagaagtgtgttaaagtgaaaaacagttttttcagtaaggtttgaggccctttctataagttttcagtacaccttaaacaggactaaaaatactttaaaagtgtgctttcaaagaattttaaaacatgtttgactcaaagatgaatttgaagtgagttaattataatactggaaaacttcaggttagcataaaatagtttatatatatcccctgccccctttgggatttacttccaccatcaaatcttcaactgttagaatttcacttaaaagtgaataactgccatacatgttttcttggcatcttcatttacagaaataacatacagcatctaaagcaagttctgtccctcttaatgtgtatgacatctttttaagtagctgatcagcaataatagccaccagttgactaggtcagcctgatatactagtggatcactgtccaagataaaaaggtaaccccaagtattgcaaaatttccctcaatttctttatgtaacattgaagaaatgttgttaccagctaagatgataaattggaaaacagtcttgttaaggtgaaaggggtccttggtgatggatcattatttcaaaaaagaaaaaaatcatgtgaaaaggaatagtggttcctcttgatgtatagtatgcctgtattatagtttttacaaaattgtgaacttgtgtaatagtataataggagatattgttgaatttctaactgtttatacatttaaattcatatatgtaatgtttgttttatcaattacaatctgaatttctaagaagcatgttgacttttgcaataaagatgcaatatggaatggttcacaattggaaaaaaaaagaaaaaagatg

SEQ ID NO: 434645 - DNA, 5362 bp, Homo sapiens
tttcagtttcaaaaggtgtgtctagatactgtaacacaaagagaaatacagtcatcccttcacctcaggttccacatctgcagattcaaccaactacagatcaaaaatattcaggaaaaaaataaaaataaaaaaaaaccagtacaataattaaaaggaatgcaagttttaaaaacaatatccataacagctatttacgtagcatttatattatgtattataattaacctagagatgttttagagtatacaagaggatttacctaggttatatgcaaataccaccaccctgttttatatcaaagtcttgaacatttgtgcatttttatatctgcgggagggtcctggaaccagtccctcacagatactgagaggtgactgtaggttgatgtatttgttggagaatatatgttttttaagcagttgtttattttataacaatgagagatggtttaacctctctctgatttgttgtgtgttttgttgctttgttttccctcagatacatatgaaccagatggttacaacccagaagctcctagtattactagttctggtagatctcagtacagacagttcttttcaagaactcagacacagcgtcccaatctgattggcctaacatctggagatatggatgtaaatccaagagctgctaacattgtgatccagactgaaccaccagttcctgtttcgattaatagcaacataaccagagtagttcttgaaccagatagtcgaaaaagagctatgagtggtttggaagggccactcacaaagaaaccttggctgggaaagcaaggaaataacaatcaaaataaaccagggttcttacgaaagaatcagtatacaaacaccaaattagaagtcaagaaaatccctcaggaattgaacaacattaccaagctcaatgaacacttcagcaaatttggaactattgttaatatccaggttgcttttaagggtgacccagaagcagccctaatccaatatcttaccaatgaggaggccaggaaagccatttctagcacagaagcagttctaaacaaccgattcattcgagtcttgtggcatagggaaaataatgagcaaccgacactacagtcctcagcacagctgctcctgcaacaacagcaaacacttagtcacctctcacagcagcaccatcacctgccacagcatctacatcagcagcaggtgctagtggcccagtctgctccttcaacagtgcacggaggtatccagaagatgatgagcaaaccacagacatcaggtgcatatgttcttaacaaagttcctgttaaacatcgtcttggacatgcaggtggtaaccagagtgatgcatcacatttgttgaatcagtctggtggtgctggagaagattgccagatattttcaactccaggccatccaaaaatgatttacagctcctcaaacttaaagacaccttcaaagctctgttcagggtctaaatctcatgatgttcaagaagtgcttaaaaaaaaacaggaagcaatgaagttacaacaagatatgaggaaaaaaagacaggaagtgttagaaaagcaaatagaatgccaaaagatgttaatatccaagttagaaaaaaacaaaaacatgaaaccagaagaaagagcaaatataatgaagactttgaaagagcttggagagaagatctcacaattaaaagatgaattaaaaacatcttctgcagtctccacaccatctaaagtgaagacaaaaacggaggcccagaaggagttattagatactgaactggacctccacaagaggctgtcctcaggagaagacaccacagaattacggaaaaaactcagtcagttacaggttgaggctgcacggttaggtattttacctgtgggtcgaggaaagaccatgtcctctcaaggtcgaggaagaggccgagggcgtggaggaagaggaaggggctcactaaatcacatggtggtggaccatcgtcccaaagcactaacagttggaggattcattgaggaagaaaaagaagacttgcttcagcatttctcaaccgcaaaccaagggccaaaatttaaagaccgtcggctacagatatcatggcacaagcccaaggtaccatctatatccactgagactgaagaagaagaagtcaaggaggaggaaacagaaacctcagatttgtttttgcctgatgatgacgatgaagatgaagatgaatatgagtctcgctcatggcgaagatgaaatctgatgctagctgtataatttttaggaatattgtttagaagaacaacttttaaaaattatttaaaagaagtcaatgagccaaaaaaaatttttttatttttcttttcaacacagtaggttcaagaacagcaagtttgctatttaaacacatctcataactgtacatgatattaaagcaccaaaggcctagtgacttttacacagttgtgaagatccacagcaatgacatggataatctctagagccttattttccacaccaccttttttttgttgctgttggtgttggattatgatgtaaatgacagggtgttcagaaattttattttggattataatctactgataaaatttaattaaatgtcaaaatcacctgtaatcttttaactctcagttgttatggatgggtcatcagacagtaggaaatatttgtaattaaaatacccttttgctttcaagagtggtcttggaagaaaaatatgtttattttaattttaatttttttttttttttactttggaggagcccaatttgtattcagtctaaatttgtttttcatggtttttatgtgtggtagtactagttcagtgaaaatcacaacaaactgtgtgttcttaaatgctacagcaatggtagctagctctatagtatttccattctcttgtcatatgaactcctggacttttcctgctactgattcttagtttgctttgatatttagtgagcgctggttcggctggtctttttaaaaatttttataactcagaatgtaaaaggctttcacctattgcccctttctcgtcccccttttcttcctcttgcctttctattaataggcctgacttagtcatcattgatataagtggttcatttgggcaaccgcaggcagtctccaataaaaggttcaaaccagcacctggataaataagtgatgttttgatgagaatgatggaaggattttggggagaagagaatcaccagctttattttttccctcttttgaagcttcagttcagtatagttacacagaagggtttaaaaatgtctgaaattcttttcctaaatttaaaccatgatggtgaggtgactggggggtggggggtggaggtgggagggggttgagggctgagtatgctagtaataaatgggagtcatatatgactttgttcagatgaccttattttttcataattttgtagcttgttgctatccatgaacatacgcatccctcagtagacagtttcctttactgtgtgcatttttactgtacactgtatagagtagagtatctgttaagtaaaatatatatgtaaatttatgtcttcgtgttctgaatgttagatggaaaagcagaggagcaacactacactgtactgacccctgggaaaataaaatgattaatgtacctaggctgtcactttttcaaggatatacacatctgtgtttttatatatgtgtggtatgaaaatttgaaacctcctgttgtctccaaaagggtcttggtgaccactatatcaaggattttgtttgctgaggtaaagacaatttctcaatatagaaactattcactaagaacttaaaaccatcaggattctagatttacttagctataagaagttaaatcccacgttctgataatctttattcttctacatgttttcctggaatgatgtgtcaaaccagggtcatttttaagttcatataattttctttcataataatgaggacttcctttttctaggttattgttatatttctagtaacactgaaggtaaaataagcttataaaagaaggaaaacatcagaatggtgtatctagaatacacaatcttgctccttactcctccatcatctctaatgaaatttttcttgatgtctgtggctcagtcagtatatattttgaaagattcattgtggtgaatattttgagtcctgacagtttaaacgtgatagagggaacaaaggatttatatattttttgtacaaagttttttcttaaactgtataattttgtaaataatttgtttgggttttttttttgtgtactaaaactaccagcgtatagatttcaataagaattgttgtatttttgtatttggaaactgaaaattacagtaaataaatggaactctaagaaaaatttcagtagacagttcaacagaatgagattccttttcatatgatttttttgacctcaaaatggacatcttatttcactctcagtaaaaagttgaaaatttgactttttagtattgggggcagaagatagaagtgtgttaaagtgaaaaacagttttttcagtaaggtttgaggccctttctataagttttcagtacaccttaaacaggactaaaaatactttaaaagtgtgctttcaaagaattttaaaacatgtttgactcaaagatgaatttgaagtgagttaattataatactggaaaacttcaggttagcataaaatagtttatatatatcccctgccccctttgggatttacttccaccatcaaatcttcaactgttagaatttcacttaaaagtgaataactgccatacatgttttcttggcatcttcatttacagaaataacatacagcatctaaagcaagttctgtccctcttaatgtgtatgacatctttttaagtagctgatcagcaataatagccaccagttgactaggtcagcctgatatactagtggatcactgtccaagataaaaaggtaaccccaagtattgcaaaatttccctcaatttctttatgtaacattgaagaaatgttgttaccagctaagatgataaattggaaaacagtcttgttaaggtgaaaggggtccttggtgatggatcattatttcaaaaaagaaaaaaatcatgtgaaaaggaatagtggttcctcttgatgtatagtatgcctgtattatagtttttacaaaattgtgaacttgtgtaatagtataataggagatattgttgaatttctaactgtttatacatttaaattcatatatgtaatgtttgttttatcaattacaatctgaatttctaagaagcatgttgacttttgcaataaagatgcaatatggaatggttcacaattggaaaaaaaaagaaaaaagatg

SEQ ID NO: 434646 - DNA, 5332 bp, Homo sapiens
gtaagagtcgaggcctgagtcgcagtagaagccgaagtagggggcgcagcaaagaccgggatccaaataggaatgttgagcacagggaaagatcgaagtttaagagtgaaaggaatgacctggagagttcctatgtgcctgtgtctgcaccacctccaaactcttctgagcagtattcctctggggcacagtctattcccagcactgttactgtgatcgcacctgctcaccactctgaaaacacaactgagagttggtctaattactataacaatcatagctcttccaattcttttggtcgaaacctaccaccaaagaggcgatgcagagattatgatgaaagaggattttgtgtacttggtgacctttgtcagtttgatcatggaaatgatcccctagttgttgatgaagttgctctgccaagtatgattcctttcccaccccctcctcctgggcttcctcctccaccacctcctggaatgttaatgcctccaatgccaggtccaggcccaggcccgggcccaggtccaggcccaggcccgggcccaggtccaggtcctggccatagtatgagacttcctgttccccaaggacatggtcagcctccaccatccgttgtgcttcccataccaagaccacctataacacaatcaagcttgataaacagccgtgaccagcctgggacaagtgcagtgcccaatcttgcatcagtgggaacaagactacctcctcctttaccccagaacctcctttacacagtatcagaacatacatatgaaccagatggttacaacccagaagctcctagtattactagttctggtagatctcagtacagacagttcttttcaagaactcagacacagcgtcccaatctgattggcctaacatctggagatatggatgtaaatccaagagctgctaacattgtgatccagactgaaccaccagttcctgtttcgattaatagcaacataaccagagtagttcttgaaccagatagtcgaaaaagagctatgagtggtttggaagggccactcacaaagaaaccttggctgggaaagcaaggaaataacaatcaaaataaaccagggttcttacgaaagaatcagtatacaaacaccaaattagaagtcaagaaaatccctcaggaattgaacaacattaccaagctcaatgaacacttcagcaaatttggaactattgttaatatccagatgatgagcaaaccacagacatcaggtgcatatgttcttaacaaagttcctgttaaacatcgtcttggacatgcaggtggtaaccagagtgatgcatcacatttgttgaatcagtctggtggtgctggagaagattgccagatattttcaactccaggccatccaaaaatgatttacagctcctcaaacttaaagacaccttcaaagctctgttcagggtctaaatctcatgatgttcaagaagtgcttaaaaaaaaacaggaagcaatgaagttacaacaagatatgaggaaaaaaagacaggaagtgttagaaaagcaaatagaatgccaaaagatgttaatatccaagttagaaaaaaacaaaaacatgaaaccagaagaaagagcaaatataatgaagactttgaaagagcttggagagaagatctcacaattaaaagatgaattaaaaacatcttctgcagtctccacaccatctaaagtgaagacaaaaacggaggcccagaaggagttattagatactgaactggacctccacaagaggctgtcctcaggagaagacaccacagaattacggaaaaaactcagtcagttacaggttgaggctgcacggttaggtattttacctgtgggtcgaggaaagaccatgtcctctcaaggtcgaggaagaggccgagggcgtggaggaagaggaaggggctcactaaatcacatggtggtggaccatcgtcccaaagcactaacagttggaggattcattgaggaagaaaaagaagacttgcttcagcatttctcaaccgcaaaccaagggccaaaatttaaagaccgtcggctacagatatcatggcacaagcccaaggtaccatctatatccactgagactgaagaagaagaagtcaaggaggaggaaacagaaacctcagatttgtttttgcctgatgatgacgatgaagatgaagatgaatatgagtctcgctcatggcgaagatgaaatctgatgctagctgtataatttttaggaatattgtttagaagaacaacttttaaaaattatttaaaagaagtcaatgagccaaaaaaaatttttttatttttcttttcaacacagtaggttcaagaacagcaagtttgctatttaaacacatctcataactgtacatgatattaaagcaccaaaggcctagtgacttttacacagttgtgaagatccacagcaatgacatggataatctctagagccttattttccacaccaccttttttttgttgctgttggtgttggattatgatgtaaatgacagggtgttcagaaattttattttggattataatctactgataaaatttaattaaatgtcaaaatcacctgtaatcttttaactctcagttgttatggatgggtcatcagacagtaggaaatatttgtaattaaaatacccttttgctttcaagagtggtcttggaagaaaaatatgtttattttaattttaatttttttttttttttactttggaggagcccaatttgtattcagtctaaatttgtttttcatggtttttatgtgtggtagtactagttcagtgaaaatcacaacaaactgtgtgttcttaaatgctacagcaatggtagctagctctatagtatttccattctcttgtcatatgaactcctggacttttcctgctactgattcttagtttgctttgatatttagtgagcgctggttcggctggtctttttaaaaatttttataactcagaatgtaaaaggctttcacctattgcccctttctcgtcccccttttcttcctcttgcctttctattaataggcctgacttagtcatcattgatataagtggttcatttgggcaaccgcaggcagtctccaataaaaggttcaaaccagcacctggataaataagtgatgttttgatgagaatgatggaaggattttggggagaagagaatcaccagctttattttttccctcttttgaagcttcagttcagtatagttacacagaagggtttaaaaatgtctgaaattcttttcctaaatttaaaccatgatggtgaggtgactggggggtggggggtggaggtgggagggggttgagggctgagtatgctagtaataaatgggagtcatatatgactttgttcagatgaccttattttttcataattttgtagcttgttgctatccatgaacatacgcatccctcagtagacagtttcctttactgtgtgcatttttactgtacactgtatagagtagagtatctgttaagtaaaatatatatgtaaatttatgtcttcgtgttctgaatgttagatggaaaagcagaggagcaacactacactgtactgacccctgggaaaataaaatgattaatgtacctaggctgtcactttttcaaggatatacacatctgtgtttttatatatgtgtggtatgaaaatttgaaacctcctgttgtctccaaaagggtcttggtgaccactatatcaaggattttgtttgctgaggtaaagacaatttctcaatatagaaactattcactaagaacttaaaaccatcaggattctagatttacttagctataagaagttaaatcccacgttctgataatctttattcttctacatgttttcctggaatgatgtgtcaaaccagggtcatttttaagttcatataattttctttcataataatgaggacttcctttttctaggttattgttatatttctagtaacactgaaggtaaaataagcttataaaagaaggaaaacatcagaatggtgtatctagaatacacaatcttgctccttactcctccatcatctctaatgaaatttttcttgatgtctgtggctcagtcagtatatattttgaaagattcattgtggtgaatattttgagtcctgacagtttaaacgtgatagagggaacaaaggatttatatattttttgtacaaagttttttcttaaactgtataattttgtaaataatttgtttgggttttttttttgtgtactaaaactaccagcgtatagatttcaataagaattgttgtatttttgtatttggaaactgaaaattacagtaaataaatggaactctaagaaaaatttcagtagacagttcaacagaatgagattccttttcatatgatttttttgacctcaaaatggacatcttatttcactctcagtaaaaagttgaaaatttgactttttagtattgggggcagaagatagaagtgtgttaaagtgaaaaacagttttttcagtaaggtttgaggccctttctataagttttcagtacaccttaaacaggactaaaaatactttaaaagtgtgctttcaaagaattttaaaacatgtttgactcaaagatgaatttgaagtgagttaattataatactggaaaacttcaggttagcataaaatagtttatatatatcccctgccccctttgggatttacttccaccatcaaatcttcaactgttagaatttcacttaaaagtgaataactgccatacatgttttcttggcatcttcatttacagaaataacatacagcatctaaagcaagttctgtccctcttaatgtgtatgacatctttttaagtagctgatcagcaataatagccaccagttgactaggtcagcctgatatactagtggatcactgtccaagataaaaaggtaaccccaagtattgcaaaatttccctcaatttctttatgtaacattgaagaaatgttgttaccagctaagatgataaattggaaaacagtcttgttaaggtgaaaggggtccttggtgatggatcattatttcaaaaaagaaaaaaatcatgtgaaaaggaatagtggttcctcttgatgtatagtatgcctgtattatagtttttacaaaattgtgaacttgtgtaatagtataataggagatattgttgaatttctaactgtttatacatttaaattcatatatgtaatgtttgttttatcaattacaatctgaatttctaagaagcatgttgacttttgcaataaagatgcaatatggaatggttcacaattggaaaaaaaaagaaaaaagatg

SEQ ID NO: 434647 - DNA, 4499 bp, Homo sapiens
ggaaaacattcattacatagcagtgggtcataatttatttaactattttctgtttttgggaatttatattgttttattttcttcaaggttgcttttaagggtgacccagaagcagccctaatccaatatcttaccaatgaggaggccaggaaagccatttctagcacagaagcagttctaaacaaccgattcattcgagtcttgtggcatagggaaaataatgagcaaccgacactacagtcctcagcacagctgctcctgcaacaacagcaaacacttagtcacctctcacagcagcaccatcacctgccacagcatctacatcagcagcaggtgctagtggcccagtctgctccttcaacagtgcacggaggtatccagaagatgatgagcaaaccacagacatcaggtgcatatgttcttaacaaagttcctgttaaacatcgtcttggacatgcaggtggtaaccagagtgatgcatcacatttgttgaatcagtctggtggtgctggagaagattgccagatattttcaactccaggccatccaaaaatgatttacagctcctcaaacttaaagacaccttcaaagctctgttcagggtctaaatctcatgatgttcaagaagtgcttaaaaaaaaacaggaagcaatgaagttacaacaagatatgaggaaaaaaagacaggaagtgttagaaaagcaaatagaatgccaaaagatgttaatatccaagttagaaaaaaacaaaaacatgaaaccagaagaaagagcaaatataatgaagactttgaaagagcttggagagaagatctcacaattaaaagatgaattaaaaacatcttctgcagtctccacaccatctaaagtgaagacaaaaacggaggcccagaaggagttattagatactgaactggacctccacaagaggctgtcctcaggagaagacaccacagaattacggaaaaaactcagtcagttacaggttgaggctgcacggttaggtattttacctgtgggtcgaggaaagaccatgtcctctcaaggtcgaggaagaggccgagggcgtggaggaagaggaaggggctcactaaatcacatggtggtggaccatcgtcccaaagcactaacagttggaggattcattgaggaagaaaaagaagacttgcttcagcatttctcaaccgcaaaccaagggccaaaatttaaagaccgtcggctacagatatcatggcacaagcccaaggtaccatctatatccactgagactgaagaagaagaagtcaaggaggaggaaacagaaacctcagatttgtttttgcctgatgatgacgatgaagatgaagatgaatatgagtctcgctcatggcgaagatgaaatctgatgctagctgtataatttttaggaatattgtttagaagaacaacttttaaaaattatttaaaagaagtcaatgagccaaaaaaaatttttttatttttcttttcaacacagtaggttcaagaacagcaagtttgctatttaaacacatctcataactgtacatgatattaaagcaccaaaggcctagtgacttttacacagttgtgaagatccacagcaatgacatggataatctctagagccttattttccacaccaccttttttttgttgctgttggtgttggattatgatgtaaatgacagggtgttcagaaattttattttggattataatctactgataaaatttaattaaatgtcaaaatcacctgtaatcttttaactctcagttgttatggatgggtcatcagacagtaggaaatatttgtaattaaaatacccttttgctttcaagagtggtcttggaagaaaaatatgtttattttaattttaatttttttttttttttactttggaggagcccaatttgtattcagtctaaatttgtttttcatggtttttatgtgtggtagtactagttcagtgaaaatcacaacaaactgtgtgttcttaaatgctacagcaatggtagctagctctatagtatttccattctcttgtcatatgaactcctggacttttcctgctactgattcttagtttgctttgatatttagtgagcgctggttcggctggtctttttaaaaatttttataactcagaatgtaaaaggctttcacctattgcccctttctcgtcccccttttcttcctcttgcctttctattaataggcctgacttagtcatcattgatataagtggttcatttgggcaaccgcaggcagtctccaataaaaggttcaaaccagcacctggataaataagtgatgttttgatgagaatgatggaaggattttggggagaagagaatcaccagctttattttttccctcttttgaagcttcagttcagtatagttacacagaagggtttaaaaatgtctgaaattcttttcctaaatttaaaccatgatggtgaggtgactggggggtggggggtggaggtgggagggggttgagggctgagtatgctagtaataaatgggagtcatatatgactttgttcagatgaccttattttttcataattttgtagcttgttgctatccatgaacatacgcatccctcagtagacagtttcctttactgtgtgcatttttactgtacactgtatagagtagagtatctgttaagtaaaatatatatgtaaatttatgtcttcgtgttctgaatgttagatggaaaagcagaggagcaacactacactgtactgacccctgggaaaataaaatgattaatgtacctaggctgtcactttttcaaggatatacacatctgtgtttttatatatgtgtggtatgaaaatttgaaacctcctgttgtctccaaaagggtcttggtgaccactatatcaaggattttgtttgctgaggtaaagacaatttctcaatatagaaactattcactaagaacttaaaaccatcaggattctagatttacttagctataagaagttaaatcccacgttctgataatctttattcttctacatgttttcctggaatgatgtgtcaaaccagggtcatttttaagttcatataattttctttcataataatgaggacttcctttttctaggttattgttatatttctagtaacactgaaggtaaaataagcttataaaagaaggaaaacatcagaatggtgtatctagaatacacaatcttgctccttactcctccatcatctctaatgaaatttttcttgatgtctgtggctcagtcagtatatattttgaaagattcattgtggtgaatattttgagtcctgacagtttaaacgtgatagagggaacaaaggatttatatattttttgtacaaagttttttcttaaactgtataattttgtaaataatttgtttgggttttttttttgtgtactaaaactaccagcgtatagatttcaataagaattgttgtatttttgtatttggaaactgaaaattacagtaaataaatggaactctaagaaaaatttcagtagacagttcaacagaatgagattccttttcatatgatttttttgacctcaaaatggacatcttatttcactctcagtaaaaagttgaaaatttgactttttagtattgggggcagaagatagaagtgtgttaaagtgaaaaacagttttttcagtaaggtttgaggccctttctataagttttcagtacaccttaaacaggactaaaaatactttaaaagtgtgctttcaaagaattttaaaacatgtttgactcaaagatgaatttgaagtgagttaattataatactggaaaacttcaggttagcataaaatagtttatatatatcccctgccccctttgggatttacttccaccatcaaatcttcaactgttagaatttcacttaaaagtgaataactgccatacatgttttcttggcatcttcatttacagaaataacatacagcatctaaagcaagttctgtccctcttaatgtgtatgacatctttttaagtagctgatcagcaataatagccaccagttgactaggtcagcctgatatactagtggatcactgtccaagataaaaaggtaaccccaagtattgcaaaatttccctcaatttctttatgtaacattgaagaaatgttgttaccagctaagatgataaattggaaaacagtcttgttaaggtgaaaggggtccttggtgatggatcattatttcaaaaaagaaaaaaatcatgtgaaaaggaatagtggttcctcttgatgtatagtatgcctgtattatagtttttacaaaattgtgaacttgtgtaatagtataataggagatattgttgaatttctaactgtttatacatttaaattcatatatgtaatgtttgttttatcaattacaatctgaatttctaagaagcatgttgacttttgcaataaagatgcaatatggaatggttcacaattggaaaaaaaaagaaaaaagatg

SEQ ID NO: 434648 - DNA, 4167 bp, Homo sapiens
  misc_feature (15)..(15): n is a, c, g, or t
agtgctgtggtatgncatcatcttctgatacctccgtgcactgttgaaggagatgatgagcaaaccacagacatcaggtgcatatgttcttaacaaagttcctgttaaacatcgtcttggacatgcaggtggtaaccagagtgatgcatcacatttgttgaatcagtctggtggtgctggagaagattgccagatattttcaactccaggccatccaaaaatgatttacagctcctcaaacttaaagacaccttcaaagctctgttcagggtctaaatctcatgatgttcaagaagtgcttaaaaaaaaacaggaagcaatgaagttacaacaagatatgaggaaaaaaagacaggaagtgttagaaaagcaaatagaatgccaaaagatgttaatatccaagttagaaaaaaacaaaaacatgaaaccagaagaaagagcaaatataatgaagactttgaaagagcttggagagaagatctcacaattaaaagatgaattaaaaacatcttctgcagtctccacaccatctaaagtgaagacaaaaacggaggcccagaaggagttattagatactgaactggacctccacaagaggctgtcctcaggagaagacaccacagaattacggaaaaaactcagtcagttacaggttgaggctgcacggttaggtattttacctgtgggtcgaggaaagaccatgtcctctcaaggtcgaggaagaggccgagggcgtggaggaagaggaaggggctcactaaatcacatggtggtggaccatcgtcccaaagcactaacagttggaggattcattgaggaagaaaaagaagacttgcttcagcatttctcaaccgcaaaccaagggccaaaatttaaagaccgtcggctacagatatcatggcacaagcccaaggtaccatctatatccactgagactgaagaagaagaagtcaaggaggaggaaacagaaacctcagatttgtttttgcctgatgatgacgatgaagatgaagatgaatatgagtctcgctcatggcgaagatgaaatctgatgctagctgtataatttttaggaatattgtttagaagaacaacttttaaaaattatttaaaagaagtcaatgagccaaaaaaaatttttttatttttcttttcaacacagtaggttcaagaacagcaagtttgctatttaaacacatctcataactgtacatgatattaaagcaccaaaggcctagtgacttttacacagttgtgaagatccacagcaatgacatggataatctctagagccttattttccacaccaccttttttttgttgctgttggtgttggattatgatgtaaatgacagggtgttcagaaattttattttggattataatctactgataaaatttaattaaatgtcaaaatcacctgtaatcttttaactctcagttgttatggatgggtcatcagacagtaggaaatatttgtaattaaaatacccttttgctttcaagagtggtcttggaagaaaaatatgtttattttaattttaatttttttttttttttactttggaggagcccaatttgtattcagtctaaatttgtttttcatggtttttatgtgtggtagtactagttcagtgaaaatcacaacaaactgtgtgttcttaaatgctacagcaatggtagctagctctatagtatttccattctcttgtcatatgaactcctggacttttcctgctactgattcttagtttgctttgatatttagtgagcgctggttcggctggtctttttaaaaatttttataactcagaatgtaaaaggctttcacctattgcccctttctcgtcccccttttcttcctcttgcctttctattaataggcctgacttagtcatcattgatataagtggttcatttgggcaaccgcaggcagtctccaataaaaggttcaaaccagcacctggataaataagtgatgttttgatgagaatgatggaaggattttggggagaagagaatcaccagctttattttttccctcttttgaagcttcagttcagtatagttacacagaagggtttaaaaatgtctgaaattcttttcctaaatttaaaccatgatggtgaggtgactggggggtggggggtggaggtgggagggggttgagggctgagtatgctagtaataaatgggagtcatatatgactttgttcagatgaccttattttttcataattttgtagcttgttgctatccatgaacatacgcatccctcagtagacagtttcctttactgtgtgcatttttactgtacactgtatagagtagagtatctgttaagtaaaatatatatgtaaatttatgtcttcgtgttctgaatgttagatggaaaagcagaggagcaacactacactgtactgacccctgggaaaataaaatgattaatgtacctaggctgtcactttttcaaggatatacacatctgtgtttttatatatgtgtggtatgaaaatttgaaacctcctgttgtctccaaaagggtcttggtgaccactatatcaaggattttgtttgctgaggtaaagacaatttctcaatatagaaactattcactaagaacttaaaaccatcaggattctagatttacttagctataagaagttaaatcccacgttctgataatctttattcttctacatgttttcctggaatgatgtgtcaaaccagggtcatttttaagttcatataattttctttcataataatgaggacttcctttttctaggttattgttatatttctagtaacactgaaggtaaaataagcttataaaagaaggaaaacatcagaatggtgtatctagaatacacaatcttgctccttactcctccatcatctctaatgaaatttttcttgatgtctgtggctcagtcagtatatattttgaaagattcattgtggtgaatattttgagtcctgacagtttaaacgtgatagagggaacaaaggatttatatattttttgtacaaagttttttcttaaactgtataattttgtaaataatttgtttgggttttttttttgtgtactaaaactaccagcgtatagatttcaataagaattgttgtatttttgtatttggaaactgaaaattacagtaaataaatggaactctaagaaaaatttcagtagacagttcaacagaatgagattccttttcatatgatttttttgacctcaaaatggacatcttatttcactctcagtaaaaagttgaaaatttgactttttagtattgggggcagaagatagaagtgtgttaaagtgaaaaacagttttttcagtaaggtttgaggccctttctataagttttcagtacaccttaaacaggactaaaaatactttaaaagtgtgctttcaaagaattttaaaacatgtttgactcaaagatgaatttgaagtgagttaattataatactggaaaacttcaggttagcataaaatagtttatatatatcccctgccccctttgggatttacttccaccatcaaatcttcaactgttagaatttcacttaaaagtgaataactgccatacatgttttcttggcatcttcatttacagaaataacatacagcatctaaagcaagttctgtccctcttaatgtgtatgacatctttttaagtagctgatcagcaataatagccaccagttgactaggtcagcctgatatactagtggatcactgtccaagataaaaaggtaaccccaagtattgcaaaatttccctcaatttctttatgtaacattgaagaaatgttgttaccagctaagatgataaattggaaaacagtcttgttaaggtgaaaggggtccttggtgatggatcattatttcaaaaaagaaaaaaatcatgtgaaaaggaatagtggttcctcttgatgtatagtatgcctgtattatagtttttacaaaattgtgaacttgtgtaatagtataataggagatattgttgaatttctaactgtttatacatttaaattcatatatgtaatgtttgttttatcaattacaatctgaatttctaagaagcatgttgacttttgcaataaagatgcaatatggaatggttcacaattggaaaaaaaaagaaaaaagatg

SEQ ID NO: 434649 - DNA, 4072 bp, Homo sapiens
gtaagagtcgaggcctgagtcgcagtagaagccgaagtagggggcgcagcaaagaccgggatccaaataggaatgttgagcacagggaaagatcgaagtttaagagtgaaaggaatgacctggagagttcctatgtgcctgtgtctgcaccacctccaaactcttctgagcagtattcctctggggcacagtctattcccagcactgttactgtgatcgcacctgctcaccactctgaaaacacaactgagagttggtctaattactataacaatcatagctcttccaattcttttggtcgaaacctaccaccaaagaggcgatgcagagattatgatgaaagaggattttgtgtacttggtgacctttgtcagtttgatcatggaaatgatcccctagttgttgatgaagttgctctgccaagtatgattcctttcccaccccctcctcctgggcttcctcctccaccacctcctggaatgttaatgcctccaatgccaggtccaggcccaggcccgggcccaggtccaggcccaggcccgggcccaggtccaggtcctggccatagtatgagacttcctgttccccaaggacatggtcagcctccaccatccgttgtgcttcccataccaagaccacctataacacaatcaagcttgataaacagccgtgaccagcctgggacaagtgcagtgcccaatcttgcatcagtgggaacaagactacctcctcctttaccccagaacctcctttacacagtatcagaacatacatatgaaccagatggttacaacccagaagctcctagtattactagttctggtagatctcagtacagacagttcttttcaagaactcagacacagcgtcccaatctgattggcctaacatctggagatatggatgtaaatccaagagctgctaacattgtgatccagactgaaccaccagttcctgtttcgattaatagcaacataaccagagtagttcttgaaccagatagtcgaaaaagagctatgagtggtttggaagggccactcacaaagaaaccttggctgggaaagcaaggaaataacaatcaaaataaaccagggttcttacgaaagaatcagtatacaaacaccaaattagaagtcaagaaaatccctcaggaattgaacaacattaccaagctcaatgaacacttcagcaaatttggaactattgttaatatccaggttgcttttaagggtgacccagaagcagccctaatccaatatcttaccaatgaggaggccaggaaagccatttctagcacagaagcagttctaaacaaccgattcattcgagtcttgtggcatagggaaaataatgagcaaccgacactacagtcctcagcacagctgctcctgcaacaacagcaaacacttagtcacctctcacagcagcaccatcacctgccacagcatctacatcagcagcaggtgctagtggcccagtctgctccttcaacagtgcacggaggtatccagaagatgatgagcaaaccacagacatcaggtgcatatgttcttaacaaagttcctgttaaacatcgtcttggacatgcaggtggtaaccagagtgatgcatcacatttgttgaatcagtctggtggtgctggagaagattgccagatattttcaactccaggccatccaaaaatgatttacagctcctcaaacttaaagacaccttcaaagctctgttcagggtctaaatctcatgatgttcaagaagtgcttaaaaaaaaacaggaagcaatgaagttacaacaagatatgaggaaaaaaagacaggaagtgttagaaaagcaaatagaatgccaaaagatgttaatatccaagttagaaaaaaacaaaaacatgaaaccagaagaaagagcaaatataatgaagactttgaaagagcttggagagaagatctcacaattaaaagatgaattaaaaacatcttctgcagtctccacaccatctaaagtgaagacaaaaacggaggcccagaaggagttattagatactgaactggacctccacaagaggctgtcctcaggagaagacaccacagaattacggaaaaaactcagtcagttacaggttgaggctgcacggttaggtattttacctgtgggtcgaggaaagaccatgtcctctcaaggtcgaggaagaggccgagggcgtggaggaagaggaaggggctcactaaatcacatggtggtggaccatcgtcccaaagcactaacagttggaggattcattgaggaagaaaaagaagacttgcttcagcatttctcaaccgcaaaccaagggccaaaatttaaagaccgtcggctacagatatcatggcacaagcccaaggtaccatctatatccactgagactgaagaagaagaagtcaaggaggaggaaacagaaacctcagatttgtttttgcctgatgatgacgatgaagatgaagatgaatatgagtctcgctcatggcgaagatgaaatctgatgctagctgtataatttttaggaatattgtttagaagaacaacttttaaaaattatttaaaagaagtcaatgagccaaaaaaaatttttttatttttcttttcaacacagtaggttcaagaacagcaagtttgctatttaaacacatctcataactgtacatgatattaaagcaccaaaggcctagtgacttttacacagttgtgaagatccacagcaatgacatggataatctctagagccttattttccacaccaccttttttttgttgctgttggtgttggattatgatgtaaatgacagggtgttcagaaattttattttggattataatctactgataaaatttaattaaatgtcaaaatcacctgtaatcttttaactctcagttgttatggatgggtcatcagacagtaggaaatatttgtaattaaaatacccttttgctttcaagagtggtcttggaagaaaaatatgtttattttaattttaatttttttttttttttactttggaggagcccaatttgtattcagtctaaatttgtttttcatggtttttatgtgtggtagtactagttcagtgaaaatcacaacaaactgtgtgttcttaaatgctacagcaatggtagctagctctatagtatttccattctcttgtcatatgaactcctggacttttcctgctactgattcttagtttgctttgatatttagtgagcgctggttcggctggtctttttaaaaatttttataactcagaatgtaaaaggctttcacctattgcccctttctcgtcccccttttcttcctcttgcctttctattaataggcctgacttagtcatcattgatataagtggttcatttgggcaaccgcaggcagtctccaataaaaggttcaaaccagcacctggataaataagtgatgttttgatgagaatgatggaaggattttggggagaagagaatcaccagctttattttttccctcttttgaagcttcagttcagtatagttacacagaagggtttaaaaatgtctgaaattcttttcctaaatttaaaccatgatggtgaggtgactggggggtggggggtggaggtgggagggggttgagggctgagtatgctagtaataaatgggagtcatatatgactttgttcagatgaccttattttttcataattttgtagcttgttgctatccatgaacatacgcatccctcagtagacagtttcctttactgtgtgcatttttactgtacactgtatagagtagagtatctgttaagtaaaatatatatgtaaatttatgtcttcgtgttctgaatgttagatggaaaagcagaggagcaacactacactgtactgacccctgggaaaataaaatgattaatgtacctaggctgtcactttttcaaggatatacacatctgtgtttttatatatgtgtggtatgaaaatttgaaacctcctgttgtctccaaaagggtcttggtgaccactatatcaaggattttgtttgctgaggtaaagaccgtcgggggatcgtctagag

SEQ ID NO: 434650 - DNA, 3462 bp, Homo sapiens
gtaagagtcgaggcctgagtcgcagtagaagccgaagtagggggcgcagcaaagaccgggatccaaataggaatgttgagcacagggaaagatcgaagtttaagagtgaaaggaatgacctggagagttcctatgtgcctgtgtctgcaccacctccaaactcttctgagcagtattcctctggggcacagtctattcccagcactgttactgtgatcgcacctgctcaccactctgaaaacacaactgagagttggtctaattactataacaatcatagctcttccaattcttttggtcgaaacctaccaccaaagaggcgatgcagagattatgatgaaagaggattttgtgtacttggtgacctttgtcagtttgatcatggaaatgatcccctagttgttgatgaagttgctctgccaagtatgattcctttcccaccccctcctcctgggcttcctcctccaccacctcctggaatgttaatgcctccaatgccaggtccaggcccaggcccgggcccaggtccaggcccaggcccgggcccaggtccaggtcctggccatagtatgagacttcctgttccccaaggacatggtcagcctccaccatccgttgtgcttcccataccaagaccacctataacacaatcaagcttgataaacagccgtgaccagcctgggacaagtgcagtgcccaatcttgcatcagtgggaacaagactacctcctcctttaccccagaacctcctttacacagtatcagaacatacatatgaaccagatggttacaacccagaagctcctagtattactagttctggtagatctcagtacagacagttcttttcaagaactcagacacagcgtcccaatctgattggcctaacatctggagatatggatgtaaatccaagagctgctaacattgtgatccagactgaaccaccagttcctgtttcgattaatagcaacataaccagagtagttcttgaaccagatagtcgaaaaagagctatgagtggtttggaagggccactcacaaagaaaccttggctgggaaagcaaggaaataacaatcaaaataaaccagggttcttacgaaagaatcagtatacaaacaccaaattagaagtcaagaaaatccctcaggaattgaacaacattaccaagctcaatgaacacttcagcaaatttggaactattgttaatatccaggttgcttttaagggtgacccagaagcagccctaatccaatatcttaccaatgaggaggccaggaaagccatttctagcacagaagcagttctaaacaaccgattcattcgagtcttgtggcatagggaaaataatgagcaaccgacactacagtcctcagcacagctgctcctgcaacaacagcaaacacttagtcacctctcacagcagcaccatcacctgccacagcatctacatcagcagcaggtgctagtggcccagtctgctccttcaacagtgcacggaggtatccagaagatgatgagcaaaccacagacatcaggtgcatatgttcttaacaaagttcctgttaaacatcgtcttggacatgcaggtggtaaccagagtgatgcatcacatttgttgaatcagtctggtggtgctggagaagattgccagatattttcaactccaggccatccaaaaatgatttacagctcctcaaacttaaagacaccttcaaagctctgttcagggtctaaatctcatgatgttcaagaagtgcttaaaaaaaaacaggaagcaatgaagttacaacaagatatgaggaaaaaaagacaggaagtgttagaaaagcaaatagaatgccaaaagatgttaatatccaagttagaaaaaaacaaaaacatgaaaccagaagaaagagcaaatataatgaagactttgaaagagcttggagagaagatctcacaattaaaagatgaattaaaaacatcttctgcagtctccacaccatctaaagtgaagacaaaaacggaggcccagaaggagttattagatactgaactggacctccacaagaggctgtcctcaggagaagacaccacagaattacggaaaaaactcagtcagttacaggttgaggctgcacggttaggtattttacctgtgggtcgaggaaagaccatgtcctctcaaggtcgaggaagaggccgagggcgtggaggaagaggaaggggctcactaaatcacatggtggtggaccatcgtcccaaagcactaacagttggaggattcattgaggaagaaaaagaagacttgcttcagcatttctcaatggagttttgctcttgttgcccaggctggagtgcaatggtgcgatctcggctcactgcaacctctgcctccctggttcaagtgattctcctgcctcagcctcccaagcagctgagattacaggagcgcgaagatgatggccatgaactccaagcagcctttcggcatgcacccggtgctgcaagaacccaaattctccagtctgcactctggctccgaggccatgcgccgagtctgtctcccagccccgcagctgcagggtaatatatttggaagctttgatgagagcctgctggcacgcgccgaagctctggcggcggtggatatcgtctcccacggcaagaaccatccgttcaagcccgacgccacctaccataccatgagcagcgtgccctgcacgtccacttcgtccaccgtgcccatctcccacccagctgcgctcacctcacaccctcaccacgccgtgcaccagggcctcgaaggcgacctgctggagcacatctcgcccacgctgagtgtgagcggcctgggcgctccggaacactcggtgatgcccgcacagatccatccacaccacctgggcgccatgggccacctgcaccaggccatgggcatgagtcacccgcacaccgtggcccctcatagcgccatgcctgcatgcctcagcgacgtggagtcagacccgcgcgagctggaagccttcgccgagcgcttcaagcagcggcgcatcaagctgggggtgacccaggcggacgtgggcgcggctctggctaatctcaagatccccggcgtgggctcgctgagccaaagcaccatctgcaggttcgagtctctcactctctcgcacaacaacatgatcgctctcaagccggtgctccaggcctggttggaggaggccgaggccgcctaccgagagaagaacagcaagccagagctcttcaacggcagcgaacggaagcgcaaacgcacgtccatcgcggcgccggagaagcgttcactcgaggcctatttcgctatccagccacgtccttcatctgagaagatcgcggccatcgctgagaaactggaccttaaaaagaacgtggtgagagtctggttctgcaaccagagacagaaacagaaacgaatgaagtattcggctgtccactga

SEQ ID NO: 434651 - DNA, 672 bp, Homo sapiens
caaggtaccatctatatccactgagactgaagaagaagaagtcaaggaggaggtaaatttagtggttggaaataagagttgaattagatcacttctcaattatgtattttttatgatattaaatagtataaattaaaaaatgctgggtttttctttcatgcatgcaaattaagacccgtttagatgtttattagagaattaaaacaggtctagagatataagaagctgtgttaggggttattttcttctgatataggaaagactgttcttttttgtttacatttatattggatttatttgagctctagaaatttttattctgatgaataaagtcagagattacataaatgaattaaactttaattggttggtttcactttttgtttattcaagttccatagtaatagatttgagtttcttattttccttctgtgtacaattggttaaaatcagagtgtgcagaagttgaacatagaggagagaattggaaaactaaagacctaaataataaaagtactgaataatcagcttcttaaaatatatgagaatttattttgcttttttactcctgttgtttatcattagtttatttagtgaacacttaggctatattgcgaggttttcctgatttatatgacaatcttggttttaaaagatacctagctagcattt

SEQ ID NO: 434652 - DNA, 478 bp, Homo sapiens
cgcccgcccgcgccccgaccagcccggcctcgggcagccactcaccggtgtccccgtccgcgtccttcctccccgggtcccggccatggcgctgagtgaacccatcctgccgtccttctccactttcgccagcccgtgccgcgagcgcggcctgcaggagcgctggccgcgcgccgaacccgagtccggcggcaccgacgacgacctcaacagcgtgctggacttcatcctgtccatggggctggatggcctgggcgccgaggccgccccggagccggcgtcaggcacatcattgaagtagatcctgacactaaggaaatgctgaagcttttggacttcgggagtctgtccaatgcttcaaggtttactcagctgtacgaagatgggatgaagtttcaagaagggctcgtcggtggacctgtttgaattgtttctgtagtggctgtattattttcgaataaatctgggacaacagcat

SEQ ID NO: 434653 - DNA, 2376 bp, Homo sapiens
cgcccgcccgcgccccgaccagcccggcctcgggcagccactcaccggtgtccccgtccgcgtccttcctccccgggtcccggccatggcgctgagtgaacccatcctgccgtccttctccactttcgccagcccgtgccgcgagcgcggcctgcaggagcgctggccgcgcgccgaacccgagtccggcggcaccgacgacgacctcaacagcgtgctggacttcatcctgtccatggggctggatggcctgggcgccgaggccgccccggagccgccgccgccgcccccgccgcctgcgttctattaccccgaacccggcgcgcccccgccctacagcgcccccgcgggtggcctggtgtctgagctgctgcgacccgagctggatgcgccgctggggcccgcactgcacggccgctttctgctggcgccgcccggccgcctggtcaaggccgagccccctgaagcggacggcggcggcggctacggctgcgcccccgggctgacccgtggaccgcgcggcctcaagcgcgagggcgccccgggcccggcggcttcgtgcatgcgaggtcccgggggccgccccccgccgccgcccgacacaccgccgctcagccccgacggccccgcgcgcctgcccgcgcccggtccgcgcgcctccttcccgccgcctttcggtggccctggtttcggcgcgcccgggcccggcctgcattacgcgccgcctgcgcccccagccttcggtctcttcgacgacgcggccgccgccgcggcagccctgggcctggcgccccccgccgcccgcggtctcctcacgccgcctgcgtccccgctggagctgctggaggccaagccaaagcgcggccgccgctcttggccccgcaaacgcaccgccactcacacctgcagctacgcgggctgcggcaagacctacaccaagagttcgcatctgaaggcgcatctgcgcacgcacacaggtgagaagccctaccactgcaactgggacggctgcggctggaagtttgcgcgctcagacgagctcacgcgccactaccgaaagcacacgggccaccggccattccagtgccatctgtgcgatcgtgccttctcgcgctccgatcacctggcgctgcacatgaaacggcacatgtagccgggacgcccccgcccacctgcgcgcggccgtggcgggtcccacgcgccgggcgcggccccctcccaaactgtgactggtatttattggacccagagaaccgggccgggcacagcgtggctacagagggtctccctcgatgacgacgacgacgacgccaccaccccagcccccgtctgtgactgaaggcccggtgggaaaagaccacgatcctccttgaccgagttttgtttttcaaaatggtgcaataatttaagtggcatcttctctcccaccgggtctacactagaggatcgaggcttgtgatgccttgtgagaaataagggccttaatttgtactgtctgcggcattttttataatattgtatatagtgactgacaaatattgtattactgtacatagagagacaggtgggcatttttgggctacctggttcgtttttataagattttgctgggttggttttttttttaattaaaaagttttgcatcttttaaaaaaaatcacagcactggtctggttgcttggaactggggccttggggcacttgggaggaggggggagcggagagtttgatggagggcagccccactaaagcatcgtgtgcagtgggtcctgcgtctgccagcaccgggactgccagctgctgtgcctgcctgccaggaacctgtgggtttttctgtaaatttagacactgcattttaggactgagggagggttattttaaggttgttctttgagccataaattgcctctttgccccacagctggggaaagtgctggtcccactgacgtggcctcctctacgttgaaaaaaataaaactacttacctcttcctggaagcctctgaggttttagccaaatttctggagtgccagctctatatttttatttttatttttaaagggggttaacctgctgagtttctggcatgttctgccctttactcgtctcgacatttagcaagtcttttcttaaggggtgagttccccattctgctagcggaaaacagtgaaacctgcattcgagggccatgcatgaagctcttttccagatgaggaaacggaggcccggagaggtagcggcagggtggtggagttgggttgttagcctgctctgtctgcctccaagggtccctgaaccccactggaagggagtggtagctttctacaatgacccacctgttgtgtgcattggaaggctaggagagcctcctcccct

SEQ ID NO: 434654 - DNA, 2123 bp, Homo sapiens
  misc_feature (1681)..(1681): n is a, c, g, or t
  misc_feature (1726)..(1726): n is a, c, g, or t
  misc_feature (1736)..(1736): n is a, c, g, or t
  misc_feature (1743)..(1745): n is a, c, g, or t
cgcccgcccgcgccccgaccagcccggcctcgggcagccactcaccggtgtccccgtccgcgtccttcctccccgggtcccggccatggcgctgagtgaacccatcctgccgtccttctccactttcgccagcccgtgccgcgagcgcggcctgcaggagcgctggccgcgcgccgaacccgagtccggcggcaccgacgacgacctcaacagcgtgctggacttcatcctgtccatggggctggatggcctgggcgccgaggccgccccggagccgccgccgccgcccccgccgcctgcgttctattaccccgaacccggcgcgcccccgccctacagcgcccccgcgggtggcctggtgtctgagctgctgcgacccgagctggatgcgccgctggggcccgcactgcacggccgctttctgctggcgccgcccggccgcctggtcaaggccgagccccctgaagcggacggcggcggcggctacggctgcgcccccgggctgacccgtggaccgcgcggcctcaagcgcgagggcgccccgggcccggcggcttcgtgcatgcgaggtcccgggggccgccccccgccgccgcccgacacaccgccgctcagccccgacggccccgcgcgcctgcccgcgcccggtccgcgcgcctccttcccgccgcctttcggtggccctggtttcggcgcgcccgggcccggcctgcattacgcgccgcctgcgcccccagccttcggtctcttcgacgacgcggccgccgccgcggcagccctgggcctggcgccccccgccgcccgcggtctcctcacgccgcctgcgtccccgctggagctgctggaggccaagccaaagcgcggccgccgctcttggccccgcaaacgcaccgccactcacacctgcagctacgcgggctgcggcaagacctacaccaagagttcgcatctgaaggcgcatctgcgcacgcacacaggtgagaagccctaccactgcaactgggacggctgcggctggaagtttgcgcgctcagacgagctcacgcgccactaccgaaagcacacgggccaccggccattccagtgccatctgtgcgatcgtgccttctcgcgctccgatcacctggcgctgcacatgaaacggcacatgtagccgggacgcccccgcccacctgcgcgcggccgtggcgggtcccacgcgccgggcgcggccccctcccaaactgtgactggtatttattggacccagagaaccgggccgggcacagcgtggctacagagggtctccctcgatgacgacgacgacgacgccaccaccccagcccccgtctgtgactgaaggcccggtgggaaaagaccacgatcctccttgaccgagttttgtttttcaaaatggtgcaataatttaagtggcatcttctctcccaccgggtctacactagaggatcgaggcttgtgatgccttgtgagaaataagggccttaatttgtactgtctgcggcattttttataatattgtatatagtgactgacaaatattgtattactgtacatagagagacaggtgggcatttttgggctacctggttcgtttttataagattttgctgggttggttttttttttaattaaaaagttttgcatcttttaaaaaaaaaaaaaaaaaaaaaaaaaaaaaaanaaaaaaaaaaaaaaaaaaaaaaaaaaaaaaaaaaaaaaccttttnaggccacctngccccannnccttttagatctcaccaagtttttcactggcggcgcgaatttcgggcccactggcccaattccccctatggggggggggtttacaattaaggggccggcggtaaaaacgtggggatgggaaaaaccttgggttaccaaacttatggctttggaaaaatccccttttcccagttgggggaataaccaaggggcccgaacggaggcccttccaaacatttcccctcccaaagggaaaggaaattttaaggctttaattttggtaaaatccggttaaattttggtaaccaatcttttttaaccaaaaggccaaatcgggaaaacccctttatataaaaaataacccccataggttgggggtgttccatttgagacaccctt

SEQ ID NO: 434655 - DNA, 1782 bp, Homo sapiens
  misc_feature (36)..(36): n is a, c, g, or t
taagggcctggggttaacccccccctcccgggttancgggctgcccgcgcccggtccgcgcgcctccttcccgccgcctttcggtggccctggtttcggcgcgcccgggcccggcctgcattacgcgccgcctgcgcccccagccttcggtctcttcgacgacgcggccgccgccgcggcagccctgggcctggcgccccccgccgcccgcggtctcctcacgccgcctgcgtccccgctggagctgctggaggccaagccaaagcgcggccgccgctcttggccccgcaaacgcaccgccactcacacctgcagctacgcgggctgcggcaagacctacaccaagagttcgcatctgaaggcgcatctgcgcacgcacacaggtgagaagccctaccactgcaactgggacggctgcggctggaagtttgcgcgctcagacgagctcacgcgccactaccgaaagcacacgggccaccggccattccagtgccatctgtgcgatcgtgccttctcgcgctccgatcacctggcgctgcacatgaaacggcacatgtagccgggacgcccccgcccacctgcgcgcggccgtggcgggtcccacgcgccgggcgcggccccctcccaaactgtgactggtatttattggacccagagaaccgggccgggcacagcgtggctacagagggtctccctcgatgacgacgacgacgacgccaccaccccagcccccgtctgtgactgaaggcccggtgggaaaagaccacgatcctccttgaccgagttttgtttttcaaaatggtgcaataatttaagtggcatcttctctcccaccgggtctacactagaggatcgaggcttgtgatgccttgtgagaaataagggccttaatttgtactgtctgcggcattttttataatattgtatatagtgactgacaaatattgtattactgtacatagagagacaggtgggcatttttgggctacctggttcgtttttataagattttgctgggttggttttttttttaattaaaaagttttgcatcttttaaaaaaaatcacagcactggtctggttgcttggaactggggccttggggcacttgggaggaggggggagcggagagtttgatggagggcagccccactaaagcatcgtgtgcagtgggtcctgcgtctgccagcaccgggactgccagctgctgtgcctgcctgccaggaacctgtgggtttttctgtaaatttagacactgcattttaggactgagggagggttattttaaggttgttctttgagccataaattgcctctttgccccacagctggggaaagtgctggtcccactgacgtggcctcctctacgttgaaaaaaataaaactacttacctcttcctggaagcctctgaggttttagccaaatttctggagtgccagctctatatttttatttttatttttaaagggggttaacctgctgagtttctggcatgttctgccctttactcgtctcgacatttagcaagtcttttcttaaggggtgagttccccattctgctagcggaaaacagtgaaacctgcattcgagggccatgcatgaagctcttttccagatgaggaaacggaggcccggagaggtagcggcagggtggtggagttgggttgttagcctgctctgtctgcctccaagggtccctgaaccccactggaagggagtggtagctttctacaatgacccacctgttgtgtgcattggaaggctaggagagcctcctcccct

SEQ ID NO: 434656 - DNA, 2208 bp, Homo sapiens
cgcccgcccgcgccccgaccagcccggcctcgggcagccactcaccggtgtccccgtccgcgtccttcctccccgggtcccggccatggcgctgagtgaacccatcctgccgtccttctccactttcgccagcccgtgccgcgagcgcggcctgcaggagcgctggccgcgcgccgaacccgagtccggcggcaccgacgacgacctcaacagcgtgctggacttcatcctgtccatggggctggatggcctgggcgccgaggccgccccggagccgccgccgccgcccccgccgcctgcgttctattaccccgaacccggcgcgcccccgccctacagcgcccccgcgggtggcctggtgtctgagctgctgcgacccgagctggatgcgccgctggggcccgcactgcacggccgctttctgctggcgccgcccggccgcctggtcaaggccgagccccctgaagcggacggcggcggcggctacggctgcgcccccgggctgacccgtggaccgcgcggcctcaagcgcgagggcgccccgggcccggcggcttcgtgcatgcgaggtcccgggggccgccccccgccgccgcccgacacaccgccgctcagccccgacggccccgcgcgcctgcccgcgcccggtccgcgcgcctccttcccgccgcctttcggtggccctggtttcggcgcgcccgggcccggcctgcattacgcgccgcctgcgcccccagccttcggtctcttcgacgacgcggccgccgccgcggcagccctgggcctggcgccccccgccgcccgcggtctcctcacgccgcctgcgtccccgctggagctgctggaggccaagccaaagcgcggccgccgctcttggccccgcaaacgcaccgccactcacacctgcagctacgcgggctgcggcaagacctacaccaagagttcgcatctgaaggcgcatctgcgcacgcacacaggtgagaagccctaccactgcaactgggacggctgcggctggaagtttgcgcgctcagacgagctcacgcgccactaccgaaagcacacgggccaccggccattccagtgccatctgtgcgatcgtgccttctcgcgctccgatcacctggcgctgcacatgaaacggcacatgtagccgggacgcccccgcccacctgcgcgcggccgtggcgggtcccacgcgccgggcgcggccccctcccaaactgtgactggtatttattggacccagagaaccgggccgggcacagcgtggctacagagggtctccctcgatgacgacgacgacgacgccaccaccccagcccccgtctgtgactgaaggcccggtgggaaaagaccacgatcctccttgaccgagttttgtttttcaaaatggtgcaataatttaagtggcatcttctctcccaccgggtctacactagaggatcgaggcttgtgatgccttgtgagaaataagggccttaatttgtactgtctgcggcattttttataatattgtatatagtgactgacaaatattgtattactgtacatagagagacaggagggcagccccactaaagcatcgtgtgcagtgggtcctgcgtctgccagcaccgggactgccagctgctgtgcctgcctgccaggaacctgtgggtttttctgtaaatttagacactgcattttaggactgagggagggttattttaaggttgttctttgagccataaattgcctctttgccccacagctggggaaagtgctggtcccactgacgtggcctcctctacgttgaaaaaaataaaactacttacctcttcctggaagcctctgaggttttagccaaatttctggagtgccagctctatatttttatttttatttttaaagggggttaacctgctgagtttctggcatgttctgccctttactcgtctcgacatttagcaagtcttttcttaaggggtgagttccccattctgctagcggaaaacagtgaaacctgcattcgagggccatgcatgaagctcttttccagatgaggaaacggaggcccggagaggtagcggcagggtggtggagttgggttgttagcctgctctgtctgcctccaagggtccctgaaccccactggaagggagtggtagctttctacaatgacccacctgttgtgtgcattggaaggctaggagagcctcctcccct

SEQ ID NO: 434657 - DNA, 2306 bp, Homo sapiens
cgcccgcccgcgccccgaccagcccggcctcgggcagccactcaccggtgtccccgtccgcgtccttcctccccgggtcccggccatggcgctgagtgaacccatcctgccgtccttctccactttcgccagcccgtgccgcgagcgcggcctgcaggagcgctggccgcgcgccgaacccgagtccggcggcaccgacgacgacctcaacagcgtgctggacttcatcctgtccatggggctggatggcctgggcgccgaggccgccccggagccgccgccgccgcccccgccgcctgcgttctattaccccgaacccggcgcgcccccgccctacagcgcccccgcgggtggcctggtgtctgagctgctgcgacccgagctggatgcgccgctggggcccgcactgcacggccgctttctgctggcgccgcccggccgcctggtcaaggccgagccccctgaagcggacggcggcggcggctacggctgcgcccccgggctgacccgtggaccgcgcggcctcaagcgcgagggcgccccgggcccggcggcttcgtgcatgcgaggtcccgggggccgccccccgccgccgcccgacacaccgccgctcagccccgacggccccgcgcgcctgcccgcgcccggtccgcgcgcctccttcccgccgcctttcggtggccctggtttcggcgcgcccgggcccggcctgcattacgcgccgcctgcgcccccagccttcggtctcttcgacgacgcggccgccgccgcggcagccctgggcctggcgccccccgccgctcttggccccgcaaacgcaccgccactcacacctgcagctacgcgggctgcggcaagacctacaccaagagttcgcatctgaaggcgcatctgcgcacgcacacaggtgagaagccctaccactgcaactgggacggctgcggctggaagtttgcgcgctcagacgagctcacgcgccactaccgaaagcacacgggccaccggccattccagtgccatctgtgcgatcgtgccttctcgcgctccgatcacctggcgctgcacatgaaacggcacatgtagccgggacgcccccgcccacctgcgcgcggccgtggcgggtcccacgcgccgggcgcggccccctcccaaactgtgactggtatttattggacccagagaaccgggccgggcacagcgtggctacagagggtctccctcgatgacgacgacgacgacgccaccaccccagcccccgtctgtgactgaaggcccggtgggaaaagaccacgatcctccttgaccgagttttgtttttcaaaatggtgcaataatttaagtggcatcttctctcccaccgggtctacactagaggatcgaggcttgtgatgccttgtgagaaataagggccttaatttgtactgtctgcggcattttttataatattgtatatagtgactgacaaatattgtattactgtacatagagagacaggtgggcatttttgggctacctggttcgtttttataagattttgctgggttggttttttttttaattaaaaagttttgcatcttttaaaaaaaatcacagcactggtctggttgcttggaactggggccttggggcacttgggaggaggggggagcggagagtttgatggagggcagccccactaaagcatcgtgtgcagtgggtcctgcgtctgccagcaccgggactgccagctgctgtgcctgcctgccaggaacctgtgggtttttctgtaaatttagacactgcattttaggactgagggagggttattttaaggttgttctttgagccataaattgcctctttgccccacagctggggaaagtgctggtcccactgacgtggcctcctctacgttgaaaaaaataaaactacttacctcttcctggaagcctctgaggttttagccaaatttctggagtgccagctctatatttttatttttatttttaaagggggttaacctgctgagtttctggcatgttctgccctttactcgtctcgacatttagcaagtcttttcttaaggggtgagttccccattctgctagcggaaaacagtgaaacctgcattcgagggccatgcatgaagctcttttccagatgaggaaacggaggcccggagaggtagcggcagggtggtggagttgggttgttagcctgctctgtctgcctccaagggtccctgaaccccactggaagggagtggtagctttctacaatgacccacctgttgtgtgcattggaaggctaggagagcctcctcccct

SEQ ID NO: 434658 - DNA, 2351 bp, Homo sapiens
cgcccgcccgcgccccgaccagcccggcctcgggcagccactcaccggtgtccccgtccgcgtccttcctccccgggtcccggccatggcgctgagtgaacccatcctgccgtccttctccactttcgccagcccgtgccgcgagcgcggcctgcaggagcgctggccgcgcgccgaacccgagtccggcggcaccgacgacgacctcaacagcgtgctggacttcatcctgtccatggggctggatggcctgggcgccgaggccgccccggagccgccgccgccgcccccgccgcctgcgttctattaccccgaacccggcgcgcccccgccctacagcgcccccgcgggtggcctggtgtctgagctgctgcgacccgagctggatgcgccgctggggcccgcactgcacggccgctttctgctggcgccgcccggccgcctggtcaaggccgagccccctgaagcggacggcggcggcggctacggctgcgcccccgggctgacccgtggaccgcgcggcctcaagcgcgagggcgccccgggcccggcggcttcgtgcatgcgaggtcccgggggccgccccccgccgccgcccgacacaccgccgctcagccccgacggccccgcgcgcctgcccgcgcccggtccgcgcgcctccttcccgccgcctttcggtggccctggtttcggcgcgcccgggcccggcctgcattacgcgccgcctgcgcccccagccttcggtctcttcgacgacgcggccgccgccgcggcagccctgggcctggcgccccccgccgcccgcggtctcctcacgccgcctgcgtccccgctggagctgctggaggccaagccaaagcgcggccgccgctcttggccccgcaaacgcaccgccactcacacctgcagctacgcgggctgcggcaagacctacaccaagagttcgcatctgaaggcgcatctgcgcacgcacacaggtgagaagccctaccactgcaactgggacggctgcggctggaagtttgcgcgctcagacgagctcacgcgccactaccgaaagcacacgggccaccggccattccagtgccatctgtgcgatcgtgccttctcgcgctccgatcacctggcgctgcacatgaaacggcacatgtagccgggacgcccccgcccacctgcgcgcggccgtggcggtcccaaactgtgactggtatttattggacccagagaaccgggccgggcacagcgtggctacagagggtctccctcgatgacgacgacgacgacgccaccaccccagcccccgtctgtgactgaaggcccggtgggaaaagaccacgatcctccttgaccgagttttgtttttcaaaatggtgcaataatttaagtggcatcttctctcccaccgggtctacactagaggatcgaggcttgtgatgccttgtgagaaataagggccttaatttgtactgtctgcggcattttttataatattgtatatagtgactgacaaatattgtattactgtacatagagagacaggtgggcatttttgggctacctggttcgtttttataagattttgctgggttggttttttttttaattaaaaagttttgcatcttttaaaaaaaatcacagcactggtctggttgcttggaactggggccttggggcacttgggaggaggggggagcggagagtttgatggagggcagccccactaaagcatcgtgtgcagtgggtcctgcgtctgccagcaccgggactgccagctgctgtgcctgcctgccaggaacctgtgggtttttctgtaaatttagacactgcattttaggactgagggagggttattttaaggttgttctttgagccataaattgcctctttgccccacagctggggaaagtgctggtcccactgacgtggcctcctctacgttgaaaaaaataaaactacttacctcttcctggaagcctctgaggttttagccaaatttctggagtgccagctctatatttttatttttatttttaaagggggttaacctgctgagtttctggcatgttctgccctttactcgtctcgacatttagcaagtcttttcttaaggggtgagttccccattctgctagcggaaaacagtgaaacctgcattcgagggccatgcatgaagctcttttccagatgaggaaacggaggcccggagaggtagcggcagggtggtggagttgggttgttagcctgctctgtctgcctccaagggtccctgaaccccactggaagggagtggtagctttctacaatgacccacctgttgtgtgcattggaaggctaggagagcctcctcccct

SEQ ID NO: 434659 - DNA, 2332 bp, Homo sapiens
cgcccgcccgcgccccgaccagcccggcctcgggcagccactcaccggtgtccccgtccgcgtccttcctccccgggtcccggccatggcgctgagtgaacccatcctgccgtccttctccactttcgccagcccgtgccgcgagcgcggcctgcaggagcgctggccgcgcgccgaacccgagtccggcggcaccgacgacgacctcaacagcgtgctggacttcatcctgtccatggggctggatggcctgggcgccgaggccgccccggagccgccgccgccgcccccgccgcctgcgttctattaccccgaacccggcgcgcccccgccctacagcgcccccgcgggtggcctggtgtctgagctgctgcgacccgagctggatgcgccgctggggcccgcactgcacggccgctttctgctggcgccgcccggccgcctggtcaaggccgagccccctgaagcggacggcggcggcggctacggctgcgcccccgggctgacccgtggaccgcgcggcctcaagcgcgagggcgccccgggcccggcggcttcgtgcatgcgaggtcccgggggccgccccccgccgccgcccgacacaccgccgctcagccccgacggccccgcgcgcctgcccgcgcccggtccgcgcgcctccttcccgccgcctttcggtggccctggtttcggcgcgcccgggcccggcctgcattacgcgccgcctgcgcccccagccttcggtctcttcgacgacgcggccgccgccgcggcagccctgggcctggcgccccccgccgcccgcggtctcctcacgccgcctgcgtccccgctggagctgctggaggccaagccaaagcgcggccgccgctcttggccccgcaaacgcaccgccactcacacctgcagctacgcgggctgcggcaagacctacaccaagagttcgcatctgaaggcgcatctgcgcacgcacacaggtgagaagccctaccactgcaactgggacggctgcggctggaagtttgcgcgctcagacgagctcacgcgccactaccgaaagcacacgggccaccggccattccagtgccatctgtgcgatcgtgccttctcgcgctccgatcacctggcgctgcacatgaaacggcacatgtagccgggacgcccccgcccactcccaaactgtgactggtatttattggacccagagaaccgggccgggcacagcgtggctacagagggtctccctcgatgacgacgacgacgacgccaccaccccagcccccgtctgtgactgaaggcccggtgggaaaagaccacgatcctccttgaccgagttttgtttttcaaaatggtgcaataatttaagtggcatcttctctcccaccgggtctacactagaggatcgaggcttgtgatgccttgtgagaaataagggccttaatttgtactgtctgcggcattttttataatattgtatatagtgactgacaaatattgtattactgtacatagagagacaggtgggcatttttgggctacctggttcgtttttataagattttgctgggttggttttttttttaattaaaaagttttgcatcttttaaaaaaaatcacagcactggtctggttgcttggaactggggccttggggcacttgggaggaggggggagcggagagtttgatggagggcagccccactaaagcatcgtgtgcagtgggtcctgcgtctgccagcaccgggactgccagctgctgtgcctgcctgccaggaacctgtgggtttttctgtaaatttagacactgcattttaggactgagggagggttattttaaggttgttctttgagccataaattgcctctttgccccacagctggggaaagtgctggtcccactgacgtggcctcctctacgttgaaaaaaataaaactacttacctcttcctggaagcctctgaggttttagccaaatttctggagtgccagctctatatttttatttttatttttaaagggggttaacctgctgagtttctggcatgttctgccctttactcgtctcgacatttagcaagtcttttcttaaggggtgagttccccattctgctagcggaaaacagtgaaacctgcattcgagggccatgcatgaagctcttttccagatgaggaaacggaggcccggagaggtagcggcagggtggtggagttgggttgttagcctgctctgtctgcctccaagggtccctgaaccccactggaagggagtggtagctttctacaatgacccacctgttgtgtgcattggaaggctaggagagcctcctcccct

SEQ ID NO: 434660 - DNA, 2337 bp, Homo sapiens
cgcccgcccgcgccccgaccagcccggcctcgggcagccactcaccggtgtccccgtccgcgtccttcctccccgggtcccggccatggcgctgagtgaacccatcctgccgtccttctccactttcgccagcccgtgccgcgagcgcggcctgcaggagcgctggccgcgcgccgaacccgagtccggcggcaccgacgacgacctcaacagcgtgctggacttcatcctgtccatggggctggatggcctgggcgccgaggccgccccggagccgccgccgccgcccccgccgcctgcgttctattaccccgaacccggcgcgcccccgccctacagcgcccccgcgggtggcctggtgtctgagctgctgcgacccgagctggatgcgccgctggggcccgcactgcacggccgctttctgctggcgccgcccggccgcctggtcaaggccgagccccctgaagcggacggcggcggcggctacggctgcgcccccgggctgacccgtggaccgcgcggcctcaagcgcgagggcgccccgggcccggcggcttcgtgcatgcgaggtcccgggggccgccccccgccgccgcccgacacaccgccgctcagccccgacggccccgcgcgcctgcccgcgcccggtccgcgcgcctccttcccgccgcctttcggtggccctggtttcggcgcgcccgggcccggcctgcattacgcgccgcctgcgcccccagccttcggtctcttcgacgacgcggccgccgccgcggcagccctgggcctggcgccccccgccgcccgcggtctcctcacgccgcctgcgtccccgctggagctgctggaggccaagccaaagcgcggccgccgctcttggccccgcaaacgcaccgccactcacacctgcagctacgcgggctgcggcaagacctacaccaagagttcgcatctgaaggcgcatctgcgcacgcacacaggtgagaagccctaccactgcaactgggacggctgcggctggaagtttgcgcgctcagacgagctcacgcgccatctgtgcgatcgtgccttctcgcgctccgatcacctggcgctgcacatgaaacggcacatgtagccgggacgcccccgcccacctgcgcgcggccgtggcgggtcccacgcgccgggcgcggccccctcccaaactgtgactggtatttattggacccagagaaccgggccgggcacagcgtggctacagagggtctccctcgatgacgacgacgacgacgccaccaccccagcccccgtctgtgactgaaggcccggtgggaaaagaccacgatcctccttgaccgagttttgtttttcaaaatggtgcaataatttaagtggcatcttctctcccaccgggtctacactagaggatcgaggcttgtgatgccttgtgagaaataagggccttaatttgtactgtctgcggcattttttataatattgtatatagtgactgacaaatattgtattactgtacatagagagacaggtgggcatttttgggctacctggttcgtttttataagattttgctgggttggttttttttttaattaaaaagttttgcatcttttaaaaaaaatcacagcactggtctggttgcttggaactggggccttggggcacttgggaggaggggggagcggagagtttgatggagggcagccccactaaagcatcgtgtgcagtgggtcctgcgtctgccagcaccgggactgccagctgctgtgcctgcctgccaggaacctgtgggtttttctgtaaatttagacactgcattttaggactgagggagggttattttaaggttgttctttgagccataaattgcctctttgccccacagctggggaaagtgctggtcccactgacgtggcctcctctacgttgaaaaaaataaaactacttacctcttcctggaagcctctgaggttttagccaaatttctggagtgccagctctatatttttatttttatttttaaagggggttaacctgctgagtttctggcatgttctgccctttactcgtctcgacatttagcaagtcttttcttaaggggtgagttccccattctgctagcggaaaacagtgaaacctgcattcgagggccatgcatgaagctcttttccagatgaggaaacggaggcccggagaggtagcggcagggtggtggagttgggttgttagcctgctctgtctgcctccaagggtccctgaaccccactggaagggagtggtagctttctacaatgacccacctgttgtgtgcattggaaggctaggagagcctcctcccct

SEQ ID NO: 434661 - DNA, 1252 bp, Homo sapiens
agttggggagggcgctcaggcttgggactcctctggggacaaggctcaggaccttggggagggagtgttcgctgggaaaccttgagagattccgtgtcttagaatgctggagagagggtgcatgcttaggacccgtcggggagccgtggctacagagggtctccctcgatgacgacgacgacgacgccaccaccccagcccccgtctgtgactgaaggcccggtgggaaaagaccacgatcctccttgaccgagttttgtttttcaaaatggtgcaataatttaagtggcatcttctctcccaccgggtctacactagaggatcgaggcttgtgatgccttgtgagaaataagggccttaatttgtactgtctgcggcattttttataatattgtatatagtgactgacaaatattgtattactgtacatagagagacaggtgggcatttttgggctacctggttcgtttttataagattttgctgggttggttttttttttaattaaaaagttttgcatcttttaaaaaaaatcacagcactggtctggttgcttggaactggggccttggggcacttgggaggaggggggagcggagagtttgatggagggcagccccactaaagcatcgtgtgcagtgggtcctgcgtctgccagcaccgggactgccagctgctgtgcctgcctgccaggaacctgtgggtttttctgtaaatttagacactgcattttaggactgagggagggttattttaaggttgttctttgagccataaattgcctctttgccccacagctggggaaagtgctggtcccactgacgtggcctcctctacgttgaaaaaaataaaactacttacctcttcctggaagcctctgaggttttagccaaatttctggagtgccagctctatatttttatttttatttttaaagggggttaacctgctgagtttctggcatgttctgccctttactcgtctcgacatttagcaagtcttttcttaaggggtgagttccccattctgctagcggaaaacagtgaaacctgcattcgagggccatgcatgaagctcttttccagatgaggaaacggaggcccggagaggtagcggcagggtggtggagttgggttgttagcctgctctgtctgcctccaagggtccctgaaccccactggaagggagtggtagctttctacaatgacccacctgttgtgtgcattggaaggctaggagagcctcctcccct

SEQ ID NO: 434662 - DNA, 1297 bp, Homo sapiens
cgcccgcccgcgccccgaccagcccggcctcgggcagccactcaccggtgtccccgtccgcgtccttcctccccgggtcccggccatggcgctgagtgaacccatcctgccgtccttctccactttcgccagcccgtgccgcgagcgcggcctgcaggagcgctggccgcgcgccgaacccgagtccggcggcaccgacgacgacctcaacagcgtgctggacttcatcctgtccatggggctggatggcctgggcgccgaggccgccccggagccgccgccgccgcccccgccgcctgcgttctattaccccgaacccggcgcgcccccgccctacagcgcccccgcgggtggcctggtgtctgagctgctgcgacccgagctggatgcgccgctggggcccgcactgcacggccgctttctgctggcgccgcccggccgcctggtcaaggccgagccccctgaagcggacggcggcggcggctacggctgcgcccccgggctgacccgtggaccgcgcggcctcaagcgcgagggcgccccgggcccggcggcttcgtgcatgcgaggtcccgggggccgccccccgccgccgcccgacacaccgccgctcagccccgacggccccgcgcgcctgcccgcgcccggtccgcgcgcctccttcccgccgcctttcggtggccctggtttcggcgcgcccgggcccggcctgcattacgcgccgcctgcgcccccagccttcggtctcttcgacgacgcggccgccgccgcggcagccctgggcctggcgccccccgccgcccgcggtctcctcacgccgcctgcgtccccgctggagctgctggaggccaagccaaagcgcggccgccgctcttggccccgcaaacgcaccgccactcacacctgcagctacgcgggctgcggcaagacctacaccaagagttcgcatctgaaggcgcatctgcgcacgcacacaggtgggcggcacgcacgagccaggagcgcaggcggggggacgcgggaggagaggtcggattcccagcgcgcgccagaaaatgaatttaggacctcccttggggcgtggctcagggggatctggcaggtggtgcacgcttaggactccccaggaggcgtggctcgggaggttggttgggggggcacacaggaacactccctaaggaagtgtgatccgagaggttggggtgggggcttgcacgcttaggacgaggggggcctccggaggttgggaagagcacttagaaaacctcctggaggcgtggctagggagacagtctca

SEQ ID NO: 434663 - DNA, 333 bp, Homo sapiens
ccacggggatcgcggacttagggtggtaaaaggcaagcagcgccccccgagccccgccgcccgctcacgcccattgccctgtcgcccgcagcgctggccgcgcgccgaacccgagtccggcggcaccgacgacgacctcaacagcgtgctggacttcatcctgtccatggggctggatggcctgggcgccgaggccgccccggagccgccgccgccgcccccgccgcctgcgttctattaccccgaacccggcgcgcccccgccctacagcgcccccgcgggtggcctggtgtctgagctgctgcgacccgagctggatgcgccgctggggcc

SEQ ID NO: 434664 - DNA, 300 bp, Homo sapiens
aagcggacggcggcggcggctacggctgcgcccccgggctgacccgtggaccgcgcggcctcaagcgcgagggcgccccgggcccggcggcttcgtgcatgcgaggtcccgggggccgccccccgccgccgcccgacacaccgccgctcagccccgacggccccgcgcgcctgcccgcgcccggtccgcgcgcctccttcccgccgcctttcggtggccctggtttcggcgcgcccgggcccggcctgcattacgcgccgcctgcgcccccagccttcggtctcttcgacgacgcggccg

SEQ ID NO: 434665 - DNA, 1797 bp, Homo sapiens
aaaaagaaaaaattgtcactggttatccttcaggtataaaaattacaattaaaattgtaatgttataaccttccattctttcccctatgaattaaaacttttttttttaacgagactaaaaaatcaagttgataaaatctatgccctgtgggaactggttaggtcaggctacccactccagatttccagcaggctggcctcagctctacctacagccagtagcttattaaggctctaggcgccagtgacaccttcagacaggtggttagtgcgccctaaggactctccgcagcgtcgctcaggttcacagaacacgcccaggggcgtgtccagctgtcgtcggggagagcccacctccccggggggtgtggctaagggacgaggcagttctcgtccagagcccaggtaatccgggcgggatcagctagcgtcgcgatgtgatgacgtcaggccccggccaggccgggagtggcgtgctgggcgtgcgcggctgcggtacggcgtgttggtcccagcggttcagctgaggtagggacgtgctgtaggccggaatgttaccggctgttggatctgtggatgaggaagaggatcctgcggaggaggattgtcctgaattggttcccattgagacgacgcaaagcgaggaggaggaaaagtctggcctcggcgccaagatcccagtcacaattatcaccgggtatttaggtgctgggaagacaacacttctgaactatattttgacagagcaacatagtaaaagagtagcggtcattttaaatgaatctggggaaggaagtgcgctggagaaatccttagctgtcagccaaggtggagagctctatgaagagtggctggaacttagaaacggttgcctctgctgttcagtgaagtgaggaatgtgtttactgtgtacatggtttactagaaatgtttattgattatatttccagctttaattttcttgagtaatttaactgaatttacacagtttgcttcattgtattttcaaacaaatagaaaataaacttattaggaagcattttcttaaagtgtttcttgctgtcttttctatctgctctaatgttttggtccttttattgagtttttattgcttttgatgtcagggcttatttaatctctagtgcatgaaagtctcatatgtaaaaaatgattattctgaatttaatctgtcattggtcatacttctaagtgttcaaccttataaaaaataaatgactatcaaaaaagaaaaaccttacattatgttctagtagttaagtttccaaggacagtgatcactagtctaccatagaccctagaagagttacccaacacatagtagcactcaaatatttgttgaatgaattataaaaatgactacttgtattgttaattttgtgtattctagtgaattaaatctcttcggcatcatttactcccttaggtatttgactttgtgtcaaatgttttggcaaggataaaattataacagactttcttgaacaaccaaaatgtaatctattaaggattttccttcacttttgataaaataagaaaaaaggaatttaaaaccttgcatcctaatgtaaaatagaattatatggtgtttaatatcagtgtccctttagctattatattaaactactatagttaataaattttatcattattttgtatgttggtttttaaaaatttcataaagctataaaaagatacttggtcagataaagtttcctctgcttttaattttaataaagtattattatgtatatgatttctttttacctattatatata

SEQ ID NO: 434666 - DNA, 1147 bp, Homo sapiens
agtcctttccccctcccgtcctgtccccatcagtgttgaaatgtatgctacagttattatggttgtaatttgttatgccatgttgatcttcttgtgcttttcatatcagaacaatgtatttttaacattctgactttctttttctctcaattggtaactgactatatagaaaatttatatttatggatactatttcttttttaataagttcaagggaaaacattgataaaggaaaatttatcctttcaactttctttaggtgccagcattattttcatattaggaagcaggagaaagttaaggaactctaagcaatactagaatggttatatatatatttaagtttgtattaaacctgttggaatggtaaagaaatttactgacatatttaaccatacaaaatagtgttgctaaaagactagtttttctctttattctgtgcatatgtatatatatgaatgtgtgtttttttaagaaattttaaaaaaacttaatctgccagcttttctctattggaatttgcgaacaacttgtaaaattggaattacagaatattagaatagtcagttatggaaagtcacttcattatccttgtgtcactaaataacgtataaagttaaatcagaagtgtattcatctctgaatttctaatcagttgtttttagtttgcagaaaaaacttcagcatgtgccaggaacacaacctcaccttgatcagagtattgttacaatcacatttgacgtaccaggaaatgcaaaggaagaacatcttaatatgtttattcagaatcttctgtgggaaaagaatgtgagaaacaaggacaatcactgcatggaggtcataaggctgaagggattggtgtcaatcaaagacaaatcacaacaagtgattgtccagggtgtccatgagctctatgatctggaggagactccagtgagctggaaggatgacactgagagaacaaatcgattggtcctcattggcagaaatttagataaggatatccttaaacagctgtttatagctactgtgacagaaacagaaaagcagtggacaacacatttcaaagaagatcaagtttgtacataacactagaggcatttcttatcaaaaggattggataataaaaataagtttctactgggta

SEQ ID NO: 434667 - DNA, 1077 bp, Homo sapiens
aaaaagaaaaaattgtcactggttatccttcaggtataaaaattacaattaaaattgtaatgttataaccttccattctttcccctatgaattaaaacttttttttttaacgagactaaaaaatcaagttgataaaatctatgccctgtgggaactggttaggtcaggctacccactccagatttccagcaggctggcctcagctctacctacagccagtagcttattaaggctctaggcgccagtgacaccttcagacaggtggttagtgcgccctaaggactctccgcagcgtcgctcaggttcacagaacacgcccaggggcgtgtccagctgtcgtcggggagagcccacctccccggggggtgtggctaagggacgaggcagttctcgtccagagcccaggtaatccgggcgggatcagctagcgtcgcgatgtgatgacgtcaggccccggccaggccgggagtggcgtgctgggcgtgcgcggctgcggtacggcgtgttggtcccagcggttcagctgaggtagggacgtgctgtaggccggaatgttaccggctgttggatctgtggatgaggaagaggatcctgcggaggaggattgtcctgaattggttcccattgagacgacgcaaagcgaggaggaggaaaagtctggcctcggcgccaagatcccagtcacaattatcaccgggtatttaggtgctgggaagacaacacttctgaactatattttgacagagcaacatagtaaaagagtagcggtcattttaaatgaatctggggaaggaagtgcgctggagaaatccttagctgtcagccaaggtggagagctctatgaagagtggctggaacttagaaacggttgcctctgctgttcagtgaagtgaggaatgtgtttactgtgtacatggtttactagaaatgtttattgattatatttccagctttaattttcttgagtaatttaactgaatttacacagtttgcttcattgtattttcaaacaaatagaaaataaacttattaggaagcataaaaaaaaccctttttggcccccttggccaataattt

SEQ ID NO: 434668 - DNA, 1262 bp, Homo sapiens
  misc_feature (1217)..(1218): n is a, c, g, or t
  misc_feature (1223)..(1223): n is a, c, g, or t
  misc_feature (1229)..(1229): n is a, c, g, or t
aaaaagaaaaaattgtcactggttatccttcaggtataaaaattacaattaaaattgtaatgttataaccttccattctttcccctatgaattaaaacttttttttttaacgagactaaaaaatcaagttgataaaatctatgccctgtgggaactggttaggtcaggctacccactccagatttccagcaggctggcctcagctctacctacagccagtagcttattaaggctctaggcgccagtgacaccttcagacaggtggttagtgcgccctaaggactctccgcagcgtcgctcaggttcacagaacacgcccaggggcgtgtccagctgtcgtcggggagagcccacctccccggggggtgtggctaagggacgaggcagttctcgtccagagcccaggtaatccgggcgggatcagctagcgtcgcgatgtgatgacgtcaggccccggccaggccgggagtggcgtgctgggcgtgcgcggctgcggtacggcgtgttggtcccagcggttcagctgaggtagggacgtgctgtaggccggaatgttaccggctgttggatctgtggatgaggaagaggatcctgcggaggaggattgtcctgaattggttcccattgagacgacgcaaagcgaggaggaggaaaagtctggcctcggcgccaagatcccagtcacaattatcaccgggtatttaggtgctgggaagacaacacttctgaactatattttgacagagcaacatagtaaaagagtagcggtcattttaaatgaatctggggaaggaagtgcgctggagaaatccttagctgtcagccaaggtggagagctctatgaagagtggctggaacttagaaacggttgcctctgctgttcagtgaaggacaatggccttagagctattgagaatttgatgcaaaagaaggggaaatttgatgacatactgttagagaccactggattagcagaccctggtgcagtggcttctatgtttgggttgatgctgaattagggagtgatatttaccttgatggtatcataactattgtggattcaaaatatggattaaaagtgaaataccactaaaggcagaagagaatgaaatcatcccaccactgacccgttcccaatctgagcatatggatagggcccaaagcacatttaacagaagagaaacctgatggccttatcaatgaagctactagagcanntgttnggaganatcatctcctataaaacgagttggtccaaaaag

SEQ ID NO: 434669 - DNA, 1300 bp, Homo sapiens
aaaaagaaaaaattgtcactggttatccttcaggtataaaaattacaattaaaattgtaatgttataaccttccattctttcccctatgaattaaaacttttttttttaacgagactaaaaaatcaagttgataaaatctatgccctgtgggaactggttaggtcaggctacccactccagatttccagcaggctggcctcagctctacctacagccagtagcttattaaggctctaggcgccagtgacaccttcagacaggtggttagtgcgccctaaggactctccgcagcgtcgctcaggttcacagaacacgcccaggggcgtgtccagctgtcgtcggggagagcccacctccccggggggtgtggctaagggacgaggcagttctcgtccagagcccaggtaatccgggcgggatcagctagcgtcgcgatgtgatgacgtcaggccccggccaggccgggagtggcgtgctgggcgtgcgcggctgcggtacggcgtgttggtcccagcggttcagctgaggtagggacgtgctgtaggccggaatgttaccggctgttggatctgtggatgaggaagaggatcctgcggaggaggattgtcctgaattggttcccattgagacgacgcaaagcgaggaggaggaaaagtctggcctcggcgccaagatcccagtcacaattatcaccgggtatttaggtgctgggaagacaacacttctgaactatattttgacagagcaacatagtaaaagagtagcggtcattttaaatgaatctggggaaggaagtgcgctggagaaatccttagctgtcagccaaggtggagagctctatgaagagtggctggaacttagaaacggttgcctctgctgttcagtgaaggacaatggccttagagctattgagaatttgatgcaaaagaaggggaaatttgatgacatactgttagagaccactggattagcagaccctggtatcataactattgtggattcaaaatatggattaaaagtgaaataccactaaaggcagaagagaatgaaatcatcccaccactgacccgttcccaatctgagcatatggatagggcccaaagcacatttgaagaagagaaactgatggcttatcaatgaagctactagggaggtgatagggagatatcatctcattagaaaagggtggtccggaagagtgtacatattggaggcactttgttttagggatgaaatggtgaaccaggaaaaatggccgtaaggcaaaagttgctggaagtgttggaatgcaaaaaaggg

SEQ ID NO: 434670 - DNA, 1304 bp, Homo sapiens
aaaaagaaaaaattgtcactggttatccttcaggtataaaaattacaattaaaattgtaatgttataaccttccattctttcccctatgaattaaaacttttttttttaacgagactaaaaaatcaagttgataaaatctatgccctgtgggaactggttaggtcaggctacccactccagatttccagcaggctggcctcagctctacctacagccagtagcttattaaggctctaggcgccagtgacaccttcagacaggtggttagtgcgccctaaggactctccgcagcgtcgctcaggttcacagaacacgcccaggggcgtgtccagctgtcgtcggggagagcccacctccccggggggtgtggctaagggacgaggcagttctcgtccagagcccaggtaatccgggcgggatcagctagcgtcgcgatgtgatgacgtcaggccccggccaggccgggagtggcgtgctgggcgtgcgcggctgcggtacggcgtgttggtcccagcggttcagctgaggtagggacgtgctgtaggccggaatgttaccggctgttggatctgtggatgaggaagaggatcctgcggaggaggattgtcctgaattggttcccattgagacgacgcaaagcgaggaggaggaaaagtctggcctcggcgccaagatcccagtcacaattatcaccgggtatttagttattcagaggctgctctactgagaagatgaacaaatttcttgtccaaaacaatgtatttcaaacgtgcccctcgggcctttcccgtgttgctcactggtgctgggaagacaacacttctgaactatattttgacagagcaacatagtaaaagagtagcggtcattttaaatgaatctggggaaggaagtgcgctggagaaatccttagctgtcagccaaggtggagagctctatgaagagtggctggaacttagaaacggttgcctctgctgttcagtgaagtgaggaatgtgtttactgtgtacatggtttactagaaatgtttattgattatatttccagctttaattttcttgagtaatttaactgaatttacacagtttgcttcattgtattttcaaacaaatagaaaataaacttattaggaagcatccaaaaaaaaaaaaaaaaaaaaaaaattttggggcgggggccggaaagttttaaaaccattggtggggcggggcatgggtaggaatggcaaggtcaaggaaacgggcggagggggttcccaaaaaccgggggggggttgaaaccgggtggggggcagggcgggcga

SEQ ID NO: 434671 - DNA, 522 bp, Homo sapiens
caaagtgaaaaatatatttgaaagggatatcatgtgccacttaaacagattaaccattcaggtcctcttttaaaactaaataagcttgtggtcaatgtttcatctttgtcacattacaacgttcgtaaaagcttgttaggacttttgttcttcttcaattttagaaaagtggttaatccaaggaccaatgtgactttgatgtactgacctggaaagttaaagatggaatcactcaattactattctttttgtaaatttttaaacaccataaagcatttaatgaactggaattgataggtgaactgtgtcattttaataagcataatgtaatcacgtcatattttgttttgtttgcaggcagaaatttagataaggatatccttaaacagctgtttatagctactgtgacagaaacagaaaagcagtggacaacacatttcaaagaagatcaagtttgtacataacactagaggcatttcttatcaaaaggattggataataaaaataagtttctactgggta

SEQ ID NO: 434672 - DNA, 2246 bp, Homo sapiens
aaaaagaaaaaattgtcactggttatccttcaggtataaaaattacaattaaaattgtaatgttataaccttccattctttcccctatgaattaaaacttttttttttaacgagactaaaaaatcaagttgataaaatctatgccctgtgggaactggttaggtcaggctacccactccagatttccagcaggctggcctcagctctacctacagccagtagcttattaaggctctaggcgccagtgacaccttcagacaggtggttagtgcgccctaaggactctccgcagcgtcgctcaggttcacagaacacgcccaggggcgtgtccagctgtcgtcggggagagcccacctccccggggggtgtggctaagggacgaggcagttctcgtccagagcccaggtaatccgggcgggatcagctagcgtcgcgatgtgatgacgtcaggccccggccaggccgggagtggcgtgctgggcgtgcgcggctgcggtacggcgtgttggtcccagcggttcagctgaggtagggacgtgctgtaggccggaatgttaccggctgttggatctgtggatgaggaagaggatcctgcggaggaggattgtcctgaattggttcccattgagacgacgcaaagcgaggaggaggaaaagtctggcctcggcgccaagatcccagtcacaattatcaccgggtatttaggtgctgggaagacaacacttctgaactatattttgacagagcaacatagtaaaagagtagcggtcattttaaatgaatctggggaaggaagtgcgctggagaaatccttagctgtcagccaaggtggagagctctatgaagagtggctggaacttagaaacggttgcctctgctgttcagtgaaggacaatggccttagagctattgagaatttgatgcaaaagaaggggaaatttgatgacatactgttagagaccactggattagcagaccctggtgcagtggcttctatgtttgggttgatgctgaattagggagtgatatttaccttgatggtatcataactattgtggattcaaaatatggattaaaacatttaacagaagagaaacctgatggccttatcaatgaagctactaggcaagttgctttggcagatatcattctcattaataaaacagacttggttccagaagaagatgtaaagaaattaagaacgacacttagatccataaatggactaggacaaatcttagaaacacaaagatcaagagttgatctctctaatgtattagatcttcatgcctttgatagtctctctggaataagtttgcagaaaaaacttcagcatgtgccaggaacacaacctcaccttgatcagagtattgttacaatcacatttgacgtaccaggaaatgcaaaggaagaacatcttaatatgtttattcagaatcttctgtgggaaaagaatgtgagaaacaaggacaatcactgcatggaggtcataaggctgaagggattggtgtcaatcaaagacaaatcacaacaagtgattgtccagggtgtccatgagctctatgatctggaggagactccagtgagctggaaggatgacactgagagaacaaatcgattggtcctcattggcagaaatttagataaggatatccttaaacagctgtttatagctactgtgacagaaacagaaaagcagtggacaacacatttcaaagaagatcaagtttgtacataacactagaggcatttcttatcaaaaggattggataataaaaataagtttctactgggtatatttcaagcatttatttattactttagttacgaattccaatatactttaaaatggtatttgttttacagcatacataaaatgtagcaaatcagtactgtaaaacatttaacattcatacaattatatataatatccttttttttaaagaatggtatttcacaaaaatatcttttgaaattggctttggagtttacatatactgaacatgaaagtttataataatgatgatacaactttcaacattgtcattttttcttagaacttcagctgattgcagagatataatgattacattgttattaaatttttttaacacaagtaagtgtcaccattttatgacatgaaataaaaggttatgactgttaaaaaaaaaaatggcctcttggccctacggtgggtctcggcccttcctttatgggggtattcatgaccctctccttgccccgca

SEQ ID NO: 434673 - DNA, 1737 bp, Homo sapiens
aaaaagaaaaaattgtcactggttatccttcaggtataaaaattacaattaaaattgtaatgttataaccttccattctttcccctatgaattaaaacttttttttttaacgagactaaaaaatcaagttgataaaatctatgccctgtgggaactggttaggtcaggctacccactccagatttccagcaggctggcctcagctctacctacagccagtagcttattaaggctctaggcgccagtgacaccttcagacaggtggttagtgcgccctaaggactctccgcagcgtcgctcaggttcacagaacacgcccaggggcgtgtccagctgtcgtcggggagagcccacctccccggggggtgtggctaagggacgaggcagttctcgtccagagcccaggtaatccgggcgggatcagctagcgtcgcgatgtgatgacgtcaggccccggccaggccgggagtggcgtgctgggcgtgcgcggctgcggtacggcgtgttggtcccagcggttcagctgaggtagggacgtgctgtaggccggaatgttaccggctgttggatctgtggatgaggaagaggatcctgcggaggaggattgtcctgaattggttcccattgagacgacgcaaagcgaggaggaggaaaagtctggcctcggcgccaagatcccagtcacaattatcaccgggtatttaggtgctgggaagacaacacttctgaactatattttgacagagcaacatagtaaaagagtagcggtcattttaaatgaatctggggaaggaagtgcgctggagaaatccttagctgtcagccaaggtggagagctctatgaagagtggctggaacttagaaacggttgcctctgctgttcagtgaaggacaatggccttagagctattgagaatttgatgcaaaagaaggggaaatttgatgacatactgttagagaccactggattagcagaccctggtatcataactattgtggattcaaaatatggattaaaacatttaacagaagagaaacctgatggccttatcaatgaagctactaggcaagttgctttggcagatatcattctcattaataaaacagacttggttccagaagaagatgtaaagaaattaagaacgacacttagatccataaatggactaggacaaatcttagaaacacaaagatcaagagttgatctctctaatgtattagatcttcatgcctttgatagtctctctggaataagtttgcagaaaaaacttcagcatgtgccaggaacacaacctcaccttgatcagagtattgttacaatcacatttgacgtaccaggaaatgcaaaggaagaacatcttaatatgtttattcagaatcttctgtgggaaaagaatgtgagaaacaaggacaatcactgcatggaggtcataaggctgaagggattggtgtcaatcaaagacaaatcacaacaagtgattgtccagggtgtccatgagctctatgatctggaggagactccagtgagctggaaggatgacactgagagaacaaatcgattggtcctcattggcagaaatttagataaggatatccttaaacagctgtttatagctactgtgacagaaacagaaaagcagtggacaacacatttcaaagaagatcaagtttgtacataacactagaggcatttcttatcaaaaggattggataataaaaataagtttctactgggta

SEQ ID NO: 434674 - DNA, 1775 bp, Homo sapiens
aaaaagaaaaaattgtcactggttatccttcaggtataaaaattacaattaaaattgtaatgttataaccttccattctttcccctatgaattaaaacttttttttttaacgagactaaaaaatcaagttgataaaatctatgccctgtgggaactggttaggtcaggctacccactccagatttccagcaggctggcctcagctctacctacagccagtagcttattaaggctctaggcgccagtgacaccttcagacaggtggttagtgcgccctaaggactctccgcagcgtcgctcaggttcacagaacacgcccaggggcgtgtccagctgtcgtcggggagagcccacctccccggggggtgtggctaagggacgaggcagttctcgtccagagcccaggtaatccgggcgggatcagctagcgtcgcgatgtgatgacgtcaggccccggccaggccgggagtggcgtgctgggcgtgcgcggctgcggtacggcgtgttggtcccagcggttcagctgaggtagggacgtgctgtaggccggaatgttaccggctgttggatctgtggatgaggaagaggatcctgcggaggaggattgtcctgaattggttcccattgagacgacgcaaagcgaggaggaggaaaagtctggcctcggcgccaagatcccagtcacaattatcaccgggtatttaggtgctgggaagacaacacttctgaactatattttgacagagcaacatagtaaaagagtagcggtcattttaaatgaatctggggaaggaagtgcgctggagaaatccttagctgtcagccaaggtggagagctctatgaagagtggctggaacttagaaacggttgcctctgctgttcagtgaaggacaatggccttagagctattgagaatttgatgcaaaagaaggggaaatttgatgacatactgttagagaccactggattagcagaccctggtatcataactattgtggattcaaaatatggattaaaaccgttcccaatctgagcatatggatagggcccaaagcacatttaacagaagagaaacctgatggccttatcaatgaagctactaggcaagttgctttggcagatatcattctcattaataaaacagacttggttccagaagaagatgtaaagaaattaagaacgacacttagatccataaatggactaggacaaatcttagaaacacaaagatcaagagttgatctctctaatgtattagatcttcatgcctttgatagtctctctggaataagtttgcagaaaaaacttcagcatgtgccaggaacacaacctcaccttgatcagagtattgttacaatcacatttgacgtaccaggaaatgcaaaggaagaacatcttaatatgtttattcagaatcttctgtgggaaaagaatgtgagaaacaaggacaatcactgcatggaggtcataaggctgaagggattggtgtcaatcaaagacaaatcacaacaagtgattgtccagggtgtccatgagctctatgatctggaggagactccagtgagctggaaggatgacactgagagaacaaatcgattggtcctcattggcagaaatttagataaggatatccttaaacagctgtttatagctactgtgacagaaacagaaaagcagtggacaacacatttcaaagaagatcaagtttgtacataacactagaggcatttcttatcaaaaggattggataataaaaataagtttctactgggta

SEQ ID NO: 434675 - DNA, 2100 bp, Homo sapiens
aaaaagaaaaaattgtcactggttatccttcaggtataaaaattacaattaaaattgtaatgttataaccttccattctttcccctatgaattaaaacttttttttttaacgagactaaaaaatcaagttgataaaatctatgccctgtgggaactggttaggtcaggctacccactccagatttccagcaggctggcctcagctctacctacagccagtagcttattaaggctctaggcgccagtgacaccttcagacaggtggttagtgcgccctaaggactctccgcagcgtcgctcaggttcacagaacacgcccaggggcgtgtccagctgtcgtcggggagagcccacctccccggggggtgtggctaagggacgaggcagttctcgtccagagcccaggtaatccgggcgggatcagctagcgtcgcgatgtgatgacgtcaggccccggccaggccgggagtggcgtgctgggcgtgcgcggctgcggtacggcgtgttggtcccagcggttcagctgaggtagggacgtgctgtaggccggaatgttaccggctgttggatctgtggatgaggaagaggatcctgcggaggaggattgtcctgaattggttcccattgagacgacgcaaagcgaggaggaggaaaagtctggcctcggcgccaagatcccagtcacaattatcaccgggtatttaggtgctgggaagacaacacttctgaactatattttgacagagcaacatagtaaaagagtagcggtcattttaaatgaatctggggaaggaagtgcgctggagaaatccttagctgtcagccaaggtggagagctctatgaagagtggctggaacttagaaacggttgcctctgctgttcagtgaaggacaatggccttagagctattgagaatttgatgcaaaagaaggggaaatttgatgacatactgttagagaccactggattagcagaccctggtatcataactattgtggattcaaaatatggattaaaacatttaacagaagagaaacctgatggccttatcaatgaagctactagatccataaatggactaggacaaatcttagaaacacaaagatcaagagttgatctctctaatgtattagatcttcatgcctttgatagtctctctggaataagtttgcagaaaaaacttcagcatgtgccaggaacacaacctcaccttgatcagagtattgttacaatcacatttgacgtaccaggaaatgcaaaggaagaacatcttaatatgtttattcagaatcttctgtgggaaaagaatgtgagaaacaaggacaatcactgcatggaggtcataaggctgaagggattggtgtcaatcaaagacaaatcacaacaagtgattgtccagggtgtccatgagctctatgatctggaggagactccagtgagctggaaggatgacactgagagaacaaatcgattggtcctcattggcagaaatttagataaggatatccttaaacagctgtttatagctactgtgacagaaacagaaaagcagtggacaacacatttcaaagaagatcaagtttgtacataacactagaggcatttcttatcaaaaggattggataataaaaataagtttctactgggtatatttcaagcatttatttattactttagttacgaattccaatatactttaaaatggtatttgttttacagcatacataaaatgtagcaaatcagtactgtaaaacatttaacattcatacaattatatataatatccttttttttaaagaatggtatttcacaaaaatatcttttgaaattggctttggagtttacatatactgaacatgaaagtttataataatgatgatacaactttcaacattgtcattttttcttagaacttcagctgattgcagagatataatgattacattgttattaaatttttttaacacaagtaagtgtcaccattttatgacatgaaataaaaggttatgactgttaaaaaaaaaaatggcctcttggccctacggtgggtctcggcccttcctttatgggggtattcatgaccctctccttgccccgca

SEQ ID NO: 434676 - DNA, 1894 bp, Homo sapiens
aaaaagaaaaaattgtcactggttatccttcaggtataaaaattacaattaaaattgtaatgttataaccttccattctttcccctatgaattaaaacttttttttttaacgagactaaaaaatcaagttgataaaatctatgccctgtgggaactggttaggtcaggctacccactccagatttccagcaggctggcctcagctctacctacagccagtagcttattaaggctctaggcgccagtgacaccttcagacaggtggttagtgcgccctaaggactctccgcagcgtcgctcaggttcacagaacacgcccaggggcgtgtccagctgtcgtcggggagagcccacctccccggggggtgtggctaagggacgaggcagttctcgtccagagcccaggtaatccgggcgggatcagctagcgtcgcgatgtgatgacgtcaggccccggccaggccgggagtggcgtgctgggcgtgcgcggctgcggtacggcgtgttggtcccagcggttcagctgaggtagggacgtgctgtaggccggaatgttaccggctgttggatctgtggatgaggaagaggatcctgcggaggaggattgtcctgaattggttcccattgagacgacgcaaagcgaggaggaggaaaagtctggcctcggcgccaagatcccagtcacaattatcaccgggtatttagttattcagaggctgctctactgagaagatgaacaaatttcttgtccaaaacaatgtatttcaaacgtgcccctcgggcctttcccgtgttgctcactggtgctgggaagacaacacttctgaactatattttgacagagcaacatagtaaaagagtagcggtcattttaaatgaatctggggaaggaagtgcgctggagaaatccttagctgtcagccaaggtggagagctctatgaagagtggctggaacttagaaacggttgcctctgctgttcagtgaaggacaatggccttagagctattgagaatttgatgcaaaagaaggggaaatttgatgacatactgttagagaccactggattagcagaccctggtgcagtggcttctatgtttgggttgatgctgaattagggagtgatatttaccttgatggtatcataactattgtggattcaaaatatggattaaaacatttaacagaagagaaacctgatggccttatcaatgaagctactaggcaagttgctttggcagatatcattctcattaataaaacagacttggttccagaagaagatgtaaagaaattaagaacgacacttagatccataaatggactaggacaaatcttagaaacacaaagatcaagagttgatctctctaatgtattagatcttcatgcctttgatagtctctctggaataagtttgcagaaaaaacttcagcatgtgccaggaacacaacctcaccttgatcagagtattgttacaatcacatttgacgtaccaggaaatgcaaaggaagaacatcttaatatgtttattcagaatcttctgtgggaaaagaatgtgagaaacaaggacaatcactgcatggaggtcataaggctgaagggattggtgtcaatcaaagacaaatcacaacaagtgattgtccagggtgtccatgagctctatgatctggaggagactccagtgagctggaaggatgacactgagagaacaaatcgattggtcctcattggcagaaatttagataaggatatccttaaacagctgtttatagctactgtgacagaaacagaaaagcagtggacaacacatttcaaagaagatcaagtttgtacataacactagaggcatttcttatcaaaaggattggataataaaaataagtttctactgggta

SEQ ID NO: 434677 - DNA, 1597 bp, Homo sapiens
agtcctttccccctcccgtcctgtccccatcagtgttgaaatgtatgctacagttattatggttgtaatttgttatgccatgttgatcttcttgtgcttttcatatcagaacaatgtatttttaacattctgactttctttttctctcaattggtaactgactatatagaaaatttatatttatggatactatttcttttttaataagttcaagggaaaacattgataaaggaaaatttatcctttcaactttctttaggtgccagcattattttcatattaggaagcaggagaaagttaaggaactctaagcaatactagaatggttatatatatatttaagtttgtattaaacctgttggaatggtaaagaaatttactgacatatttaaccatacaaaatagtgttgctaaaagactagtttttctctttattctgtgcatatgtatatatatgaatgtgtgtttttttaagaaattttaaaaaaacttaatctgccagcttttctctattggaatttgcgaacaacttgtaaaattggaattacagaatattagaatagtcagttatggaaagtcacttcattatccttgtgtcactaaataacgtataaagttaaatcagaagtgtattcatctctgaatttctaatcagttgtttttagtttgcagaaaaaacttcagcatgtgccaggaacacaacctcaccttgatcagagtattgttacaatcacatttgacgtaccaggaaatgcaaaggaagaacatcttaatatgtttattcagaatcttctgtgggaaaagaatgtgagaaacaaggacaatcactgcatggaggtcataaggctgaagggattggtgtcaatcaaagacaaatcacaacaagtgattgtccagggtgtccatgagctctatgatctggaggagactccagtgagctggaaggatgacactgagagaacaaatcgattggtcctcattggcagaaatttagataaggatatccttaaacagctgtttatagctactgtgacagaaacagaaaagcagtggacaacacatttcaaagaagatcaagtttgtacataacactagaggcatttcttatcaaaaggattggataataaaaataagtttctactgggtatatttcaagcatttatttattactttagttacgaattccaatatactttaaaatggtatttgttttacagcatacataaaatgtagcaaatcagtactgtaaaacatttaacattcatacaattatatataatatccttttttttaaagaatggtatttcacaaaaatatcttttgaaattggctttggagtttacatatactgaacatgaaagtttataataatgatgatacaactttcaacattgtcattttttcttagaacttcagctgattgcagagatataatgattacattgttattaaatttttttaacacaagtaagtgtcaccattttatgacatgaaataaaaggttatgactgttaaaaaaaaaaatggcctcttggccctacggtgggtctcggcccttcctttatgggggtattcatgaccctctccttgccccgca

SEQ ID NO: 434678 - DNA, 1895 bp, Homo sapiens
aaaaagaaaaaattgtcactggttatccttcaggtataaaaattacaattaaaattgtaatgttataaccttccattctttcccctatgaattaaaacttttttttttaacgagactaaaaaatcaagttgataaaatctatgccctgtgggaactggttaggtcaggctacccactccagatttccagcaggctggcctcagctctacctacagccagtagcttattaaggctctaggcgccagtgacaccttcagacaggtggttagtgcgccctaaggactctccgcagcgtcgctcaggttcacagaacacgcccaggggcgtgtccagctgtcgtcggggagagcccacctccccggggggtgtggctaagggacgaggcagttctcgtccagagcccaggtaatccgggcgggatcagctagcgtcgcgatgtgatgacgtcaggccccggccaggccgggagtggcgtgctgggcgtgcgcggctgcggtacggcgtgttggtcccagcggttcagctgaggtagggacgtgctgtaggccggaatgttaccggctgttggatctgtggatgaggaagaggatcctgcggaggaggattgtcctgaattggttcccattgagacgacgcaaagcgaggaggaggaaaagtctggcctcggcgccaagatcccagtcacaattatcaccgggtatttagttattcagaggctgctctactgagaagatgaacaaatttcttgtccaaaacaatgtatttcaaacgtgcccctcgggcctttcccgtgttgctcactggtgctgggaagacaacacttctgaactatattttgacagagcaacatagtaaaagagtagcggtcattttaaatgaatctggggaaggaagtgcgctggagaaatccttagctgtcagccaaggtggagagctctatgaagagtggctggaacttagaaacggttgcctctgctgttcagtgaagtgaggaatgtgtttactgtgtacatggtttactagaaatgtttattgattatatttccagctttaattttcttgagtaatttaactgaatttacacagtttgcttcattgtattttcaaacaaatagaaaataaacttattaggaagcattttcttaaagtgtttcttgctgtcttttctatctgctctaatgttttggtccttttattgagtttttattgcttttgatgtcagggcttatttaatctctagtgcatgaaagtctcatatgtaaaaaatgattattctgaatttaatctgtcattggtcatacttctaagtgttcaaccttataaaaaataaatgactatcaaaaaagaaaaaccttacattatgttctagtagttaagtttccaaggacagtgatcactagtctaccatagaccctagaagagttacccaacacatagtagcactcaaatatttgttgaatgaattataaaaatgactacttgtattgttaattttgtgtattctagtgaattaaatctcttcggcatcatttactcccttaggtatttgactttgtgtcaaatgttttggcaaggataaaattataacagactttcttgaacaaccaaaatgtaatctattaaggattttccttcacttttgataaaataagaaaaaaggaatttaaaaccttgcatcctaatgtaaaatagaattatatggtgtttaatatcagtgtccctttagctattatattaaactactatagttaataaattttatcattattttgtatgttggtttttaaaaatttcataaagctataaaaagatacttggtcagataaagtttcctctgcttttaattttaataaagtattattatgtatatgatttctttttacctattatatata

SEQ ID NO: 434679 - DNA, 927 bp, Homo sapiens
aggaagaagtaaggaaaagagcaatatggatgtttaaaaatgagaagagtattgttacaatcacatttgacgtaccaggaaatgcaaaggaagaacatcttaatatgtttattcagaatcttctgtgggaaaagaatgtgagaaacaaggacaatcactgcatggaggtcataaggctgaagggattggtgtcaatcaaagacaaatcacaacaagtgattgtccagggtgtccatgagctctatgatctggaggagactccagtgagctggaaggatgacactgagagaacaaatcgattggtcctcattggcagaaatttagataaggatatccttaaacagctgtttatagctactgtgacagaaacagaaaagcagtggacaacacatttcaaagaagatcaagtttgtacataacactagaggcatttcttatcaaaaggattggataataaaaataagtttctactgggtatatttcaagcatttatttattactttagttacgaattccaatatactttaaaatggtatttgttttacagcatacataaaatgtagcaaatcagtactgtaaaacatttaacattcatacaattatatataatatccttttttttaaagaatggtatttcacaaaaatatcttttgaaattggctttggagtttacatatactgaacatgaaagtttataataatgatgatacaactttcaacattgtcattttttcttagaacttcagctgattgcagagatataatgattacattgttattaaatttttttaacacaagtaagtgtcaccattttatgacatgaaataaaaggttatgactgttaaaaaaaaaaatggcctcttggccctacggtgggtctcggcccttcctttatgggggtattcatgaccctctccttgccccgca

SEQ ID NO: 434680 - DNA, 1524 bp, Homo sapiens
ggctttgttgggtgagcttgtttgtgtccctgtgggtggacgtggttggtgattggcaggatcctggtatccgctaacaggtcaaaatgcagatcttcgtgaaaacccttaccggcaagaccatcacccttgaggtggagcccagtgacaccatcgaaaatgtgaaggccaagatccaggataaggaaggcattccccccgaccagcagaggctcatctttgcaggcaagcagctggaagatggccgtactctttctgactacaacatccagaaggagtcgaccctgcacctggtcctgcgtctgagaggtggtatgcagatcttcgtgaagaccctgaccggcaagaccatcaccctggaagtggagcccagtgacaccatcgaaaatgtgaaggccaagatcccagtcacaattatcaccgggtatttaggtgctgggaagacaacacttctgaactatattttgacagagcaacatagtaaaagagtagcggtcattttaaatgaatctggggaaggaagtgcgctggagaaatccttagctgtcagccaaggtggagagctctatgaagagtggctggaacttagaaacggttgcctctgctgttcagtgaagtgaggaatgtgtttactgtgtacatggtttactagaaatgtttattgattatatttccagctttaattttcttgagtaatttaactgaatttacacagtttgcttcattgtattttcaaacaaatagaaaataaacttattaggaagcattttcttaaagtgtttcttgctgtcttttctatctgctctaatgttttggtccttttattgagtttttattgcttttgatgtcagggcttatttaatctctagtgcatgaaagtctcatatgtaaaaaatgattattctgaatttaatctgtcattggtcatacttctaagtgttcaaccttataaaaaataaatgactatcaaaaaagaaaaaccttacattatgttctagtagttaagtttccaaggacagtgatcactagtctaccatagaccctagaagagttacccaacacatagtagcactcaaatatttgttgaatgaattataaaaatgactacttgtattgttaattttgtgtattctagtgaattaaatctcttcggcatcatttactcccttaggtatttgactttgtgtcaaatgttttggcaaggataaaattataacagactttcttgaacaaccaaaatgtaatctattaaggattttccttcacttttgataaaataagaaaaaaggaatttaaaaccttgcatcctaatgtaaaatagaattatatggtgtttaatatcagtgtccctttagctattatattaaactactatagttaataaattttatcattattttgtatgttggtttttaaaaatttcataaagctataaaaagatacttggtcagataaagtttcctctgcttttaattttaataaagtattattatgtatatgatttctttttacctattatatata

SEQ ID NO: 434681 - DNA, 972 bp, Homo sapiens
caaagtgaaaaatatatttgaaagggatatcatgtgccacttaaacagattaaccattcaggtcctcttttaaaactaaataagcttgtggtcaatgtttcatctttgtcacattacaacgttcgtaaaagcttgttaggacttttgttcttcttcaattttagaaaagtggttaatccaaggaccaatgtgactttgatgtactgacctggaaagttaaagatggaatcactcaattactattctttttgtaaatttttaaacaccataaagcatttaatgaactggaattgataggtgaactgtgtcattttaataagcataatgtaatcacgtcatattttgttttgtttgcaggcagaaatttagataaggatatccttaaacagctgtttatagctactgtgacagaaacagaaaagcagtggacaacacatttcaaagaagatcaagtttgtacataacactagaggcatttcttatcaaaaggattggataataaaaataagtttctactgggtatatttcaagcatttatttattactttagttacgaattccaatatactttaaaatggtatttgttttacagcatacataaaatgtagcaaatcagtactgtaaaacatttaacattcatacaattatatataatatccttttttttaaagaatggtatttcacaaaaatatcttttgaaattggctttggagtttacatatactgaacatgaaagtttataataatgatgatacaactttcaacattgtcattttttcttagaacttcagctgattgcagagatataatgattacattgttattaaatttttttaacacaagtaagtgtcaccattttatgacatgaaataaaaggttatgactgttaaaaaaaaaaatggcctcttggccctacggtgggtctcggcccttcctttatgggggtattcatgaccctctccttgccccgca

SEQ ID NO: 434682 - DNA, 521 bp, Homo sapiens
aatttcataaagctataaaaagatacttggtcagataaagtttcctctgcttttaattttaataaagtattattatgtatatgatttctttttacctattatatatatgcatctattgttttctcactggtaaatatgggacagacattttgttagaaggttagaagtgagttaaattttcacattcctaaggatacttttgtctcgggttgttgaatacattttaaagtgtttataataatcacttcaaaatatttaggtaattaactgtaaattatgttttggtattctccagggacaatggccttagagctattgagaatttgatgcaaaagaaggggaaatttgatgacatactgttagagaccactggattagcagaccctggtaagaagtgagattattaataaccagaatatagttctgtgatatattgtaaatagatgtattagaggaatatctaaaatgagtattaaagcttttgttagtattaaaccaaaaactttttttggtttaaaaga

SEQ ID NO: 434683 - DNA, 621 bp, Homo sapiens
cttggagtaatttgatcgtctgaagccttcttctctcagctcgtcaaagtcattctccgtccagctttgttccgttgctggtgaggagctgcgtttctttggaggaggagaggcgctgcgttcctttggaggaggagagtttgcagaaaaaacttcagcatgtgccaggaacacaacctcaccttgatcagagtattgttacaatcacatttgacgtaccaggaaatgcaaaggaagaacatcttaatatgtttattcagaatcttctgtgggaaaagaatgtgagaaacaaggacaatcactgcatggaggtcataaggctgaagggattggtgtcaatcaaagacaaatcacaacaagtgattgtccagggtgtccatgagctctatgatctggaggagactccagtgagctggaaggatgacactgagagaacaaatcgattggtcctcattggcagaaatttagataaggatatccttaaacagctgtttatagctactgtgacagaaacagaaaagcagtggacaacacatttcaaagaagatcaagtttgtacataacactagaggcatttcttatcaaaaggattggataataaaaataagtttctactgggta

SEQ ID NO: 434684 - DNA, 1417 bp, Homo sapiens
aaaaagaaaaaattgtcactggttatccttcaggtataaaaattacaattaaaattgtaatgttataaccttccattctttcccctatgaattaaaacttttttttttaacgagactaaaaaatcaagttgataaaatctatgccctgtgggaactggttaggtcaggctacccactccagatttccagcaggctggcctcagctctacctacagccagtagcttattaaggctctaggcgccagtgacaccttcagacaggtggttagtgcgccctaaggactctccgcagcgtcgctcaggttcacagaacacgcccaggggcgtgtccagctgtcgtcggggagagcccacctccccggggggtgtggctaagggacgaggcagttctcgtccagagcccaggtaatccgggcgggatcagctagcgtcgcgatgtgatgacgtcaggccccggccaggccgggagtggcgtgctgggcgtgcgcggctgcggtacggcgtgttggtcccagcggttcagctgaggtagggacgtgctgtaggccggaatgttaccggctgttggatctgtggatgaggaagaggatcctgcggaggaggattgtcctgaattggttcccattgagacgacgcaaagcgaggaggaggaaaagtctggcctcggcgccaagatcccagtcacaattatcaccgggtatttaggtgctgggaagacaacacttctgaactatattttgacagagcaacatagtaaaagagtagcggtcattttaaatgaatctggggaaggaagtgcgctggagaaatccttagctgtcagccaaggtggagagctctatgaagagtggctggaacttagaaacggttgcctctgctgttcagtgaaggacaatggccttagagctattgagaatttgatgcaaaagaaggggaaatttgatgacatactgttagagaccactggattagcagaccctggtatcataactattgtggattcaaaatatggattaaaagtgaaataccactaaaggcagaagagaatgaaatcatcccaccactgacccgttcccaatctgagcatatggatagggcccaaagcagcaaagaattggacaacttaaaatgacagctctctattctgaggacttgacacccgggctactgacattgttcttttcagttctacaaatgtgacagcatttaatgcaatagaagcaatgaatgaagttacccagagaagcattaacagaagagaagactgaatgggctctctcaatggaagctactagatccattactggactcggaccaatctagaaacacaagatccaggtcaggcagcgatagaatcagcacacggagcaggacttcgaggccacagttgcagctagtccaccagctctctcgacaa

SEQ ID NO: 434685 - DNA, 1796 bp, Homo sapiens
aaaaagaaaaaattgtcactggttatccttcaggtataaaaattacaattaaaattgtaatgttataaccttccattctttcccctatgaattaaaacttttttttttaacgagactaaaaaatcaagttgataaaatctatgccctgtgggaactggttaggtcaggctacccactccagatttccagcaggctggcctcagctctacctacagccagtagcttattaaggctctaggcgccagtgacaccttcagacaggtggttagtgcgccctaaggactctccgcagcgtcgctcaggttcacagaacacgcccaggggcgtgtccagctgtcgtcggggagagcccacctccccggggggtgtggctaagggacgaggcagttctcgtccagagcccaggtaatccgggcgggatcagctagcgtcgcgatgtgatgacgtcaggccccggccaggccgggagtggcgtgctgggcgtgcgcggctgcggtacggcgtgttggtcccagcggttcagctgaggtagggacgtgctgtaggccggaatgttaccggctgttggatctgtggatgaggaagaggatcctgcggaggaggattgtcctgaattggttcccattgagacgacgcaaagcgaggaggaggaaaagtctggcctcggcgccaagatcccagtcacaattatcaccgggtatttaggtgctgggaagacaacacttctgaactatattttgacagagcaacatagtaaaagagtagcggtcattttaaatgaatctggggaaggaagtgcgctggagaaatccttagctgtcagccaaggtggagagctctatgaagagtggctggaacttagaaacggttgcctctgctgttcagtgaaggacaatggccttagagctattgagaatttgatgcaaaagaaggggaaatttgatgacatactgttagagaccactggattagcagaccctggtgcagtggcttctatgtttgggttgatgctgaattagggagtgatatttaccttgatggtatcataactattgtggattcaaaatatggattaaaacatttaacagaagagaaacctgatggccttatcaatgaagctactaggcaagttgctttggcagatatcattctcattaataaaacagacttggttccagaagaagatgtaaagaaattaagaacgacacttagatccataaatggactaggacaaatcttagaaacacaaagatcaagagttgatctctctaatgtattagatcttcatgcctttgatagtctctctggaataagtttgcagaaaaaacttcagcatgtgccaggaacacaacctcaccttgatcagagtattgttacaatcacatttgacgtaccaggaaatgcaaaggaagaacatcttaatatgtttattcagaatcttctgtgggaaaagaatgtgagaaacaaggacaatcactgcatggaggtcataaggctgaagggattggtgtcaatcaaagacaaatcacaacaagtgattgtccagggtgtccatgagctctatgatctggaggagactccagtgagctggaaggatgacactgagagaacaaatcgattggtcctcattggcagaaatttagataaggatatccttaaacagctgtttatagctactgtgacagaaacagaaaagcagtggacaacacatttcaaagaagatcaagtttgtacataacactagaggcatttcttatcaaaaggattggataataaaaataagtttctactgggta

SEQ ID NO: 434686 - DNA, 2198 bp, Homo sapiens
aaaaagaaaaaattgtcactggttatccttcaggtataaaaattacaattaaaattgtaatgttataaccttccattctttcccctatgaattaaaacttttttttttaacgagactaaaaaatcaagttgataaaatctatgccctgtgggaactggttaggtcaggctacccactccagatttccagcaggctggcctcagctctacctacagccagtagcttattaaggctctaggcgccagtgacaccttcagacaggtggttagtgcgccctaaggactctccgcagcgtcgctcaggttcacagaacacgcccaggggcgtgtccagctgtcgtcggggagagcccacctccccggggggtgtggctaagggacgaggcagttctcgtccagagcccaggtaatccgggcgggatcagctagcgtcgcgatgtgatgacgtcaggccccggccaggccgggagtggcgtgctgggcgtgcgcggctgcggtacggcgtgttggtcccagcggttcagctgaggtagggacgtgctgtaggccggaatgttaccggctgttggatctgtggatgaggaagaggatcctgcggaggaggattgtcctgaattggttcccattgagacgacgcaaagcgaggaggaggaaaagtctggcctcggcgccaagatcccagtcacaattatcaccgggtatttaggtgctgggaagacaacacttctgaactatattttgacagagcaacatagtaaaagagtagcggtcattttaaatgaatctggggaaggaagtgcgctggagaaatccttagctgtcagccaaggtggagagctctatgaagagtggctggaacttagaaacggttgcctctgctgttcagtgaaggacaatggccttagagctattgagaatttgatgcaaaagaaggggaaatttgatgacatactgttagagaccactggattagcagaccctggtgcagtggcttctatgtttgggttgatgctgaattagggagtgatatttaccttgatggtatcataactattgtggattcaaaatatggattaaaacatttaacagaagagaaacctgatggccttatcaatgaagctactaggcaagttgctttggcagatatcattctcattaataaaacagacttggttccagaagaagatgtaaagaaattaagaacgacacttagatccataaatggactaggacaaatcttagaaacacaaagatcaagagttgatctctctaatgtattagatcttcatgcctttgatagtctctctggaataagtttgcagaaaaaacttcagcatgtgccaggaacacaacctcaccttgatcagagtattgttacaatcacatttgacgtaccaggaaatgcaaaggaagaacatcttaatatgtttattcagaatcttctgtgggaaaagaatgtgagaaacaaggacaatcactgcatggaggtcataaggctgaagggattggtgtcaatcaaagacaaatcacaacaagtgattgtccagggtgtccatgagctctatgatctggaggagactccagtgagctggaaggatgacactgagagaacaaatcgattggtcctcattggcagaaatttagataaggatatccttaaacagctgtttatagctactgtgacagaaacagaaaagcagtggacaacacatttcaaagaagatcaagtttgtacataacactagaggcatttcttatcaaaaggattggataataaaaataagtttctactgggtatatttcaagcatttatttattactttagttacgaattccaatatactttaaaatggtatttgttttacagcatacataaaatgtagcaaatcagtactgtaaaacatttaacattcatacaattatatataatatccttttttttaaagaatggtatttcacaaaaatatcttttgaaattggctttggagtttacatatactgaacatgaaagtttataataatgatgatacaactttcaacattgtcattttttcttagaacttcagctgattgcagagatataatgattacattgttattaaatttttttaacacaagtaagtgtcaccattttatgacatgaaataaaaggttatgactgttaggcctcgttggcctcagcggtggagctctcaggcg

SEQ ID NO: 434687 - DNA, 1824 bp, Homo sapiens
aaaaagaaaaaattgtcactggttatccttcaggtataaaaattacaattaaaattgtaatgttataaccttccattctttcccctatgaattaaaacttttttttttaacgagactaaaaaatcaagttgataaaatctatgccctgtgggaactggttaggtcaggctacccactccagatttccagcaggctggcctcagctctacctacagccagtagcttattaaggctctaggcgccagtgacaccttcagacaggtggttagtgcgccctaaggactctccgcagcgtcgctcaggttcacagaacacgcccaggggcgtgtccagctgtcgtcggggagagcccacctccccggggggtgtggctaagggacgaggcagttctcgtccagagcccaggtaatccgggcgggatcagctagcgtcgcgatgtgatgacgtcaggccccggccaggccgggagtggcgtgctgggcgtgcgcggctgcggtacggcgtgttggtcccagcggttcagctgaggtagggacgtgctgtaggccggaatgttaccggctgttggatctgtggatgaggaagaggatcctgcggaggaggattgtcctgaattggttcccattgagacgacgcaaagcgaggaggaggaaaagtctggcctcggcgccaagatcccagtcacaattatcaccgggtatttaggtgctgggaagacaacacttctgaactatattttgacagagcaacatagtaaaagagtagcggtcattttaaatgaatctggggaaggaagtgcgctggagaaatccttagctgtcagccaaggtggagagctctatgaagagtggctggaacttagaaacggttgcctctgctgttcagtgaaggacaatggccttagagctattgagaatttgatgcaaaagaaggggaaatttgatgacatactgttagagaccactggattagcagaccctggtatcataactattgtggattcaaaatatggattaaaagtgaaataccactaaaggcagaagagaatgaaatcatcccaccactgacccgttcccaatctgagcatatggatagggcccaaagcacatttaacagaagagaaacctgatggccttatcaatgaagctactaggcaagttgctttggcagatatcattctcattaataaaacagacttggttccagaagaagatgtaaagaaattaagaacgacacttagatccataaatggactaggacaaatcttagaaacacaaagatcaagagttgatctctctaatgtattagatcttcatgcctttgatagtctctctggaataagtttgcagaaaaaacttcagcatgtgccaggaacacaacctcaccttgatcagagtattgttacaatcacatttgacgtaccaggaaatgcaaaggaagaacatcttaatatgtttattcagaatcttctgtgggaaaagaatgtgagaaacaaggacaatcactgcatggaggtcataaggctgaagggattggtgtcaatcaaagacaaatcacaacaagtgattgtccagggtgtccatgagctctatgatctggaggagactccagtgagctggaaggatgacactgagagaacaaatcgattggtcctcattggcagaaatttagataaggatatccttaaacagctgtttatagctactgtgacagaaacagaaaagcagtggacaacacatttcaaagaagatcaagtttgtacataacactagaggcatttcttatcaaaaggattggataataaaaataagtttctactgggta

SEQ ID NO: 434688 - DNA, 1998 bp, Homo sapiens
aaaaagaaaaaattgtcactggttatccttcaggtataaaaattacaattaaaattgtaatgttataaccttccattctttcccctatgaattaaaacttttttttttaacgagactaaaaaatcaagttgataaaatctatgccctgtgggaactggttaggtcaggctacccactccagatttccagcaggctggcctcagctctacctacagccagtagcttattaaggctctaggcgccagtgacaccttcagacaggtggttagtgcgccctaaggactctccgcagcgtcgctcaggttcacagaacacgcccaggggcgtgtccagctgtcgtcggggagagcccacctccccggggggtgtggctaagggacgaggcagttctcgtccagagcccaggtaatccgggcgggatcagctagcgtcgcgatgtgatgacgtcaggccccggccaggccgggagtggcgtgctgggcgtgcgcggctgcggtacggcgtgttggtcccagcggttcagctgaggtagggacgtgctgtaggccggaatgttaccggctgttggatctgtggatgaggaagaggatcctgcggaggaggattgtcctgaattggttcccattgagacgacgcaaagcgaggaggaggaaaagtctggcctcggcgccaagatcccagtcacaattatcaccgggtatttaggtgctgggaagacaacacttctgaactatattttgacagagcaacatagtaaaagagtagcggtcattttaaatgaatctggggaaggaagtgcgctggagaaatccttagctgtcagccaaggtggagagctctatgaagagtggctggaacttagaaacggttgcctctgctgttcagtgaaggacaatggccttagagctattgagaatttgatgcaaaagaaggggaaatttgatgacatactgttagagaccactggattagcagaccctggtatcataactattgtggattcaaaatatggattaaaacatttaacagaagagaaacctgatggccttatcaatgaagctactagtttgcagaaaaaacttcagcatgtgccaggaacacaacctcaccttgatcagagtattgttacaatcacatttgacgtaccaggaaatgcaaaggaagaacatcttaatatgtttattcagaatcttctgtgggaaaagaatgtgagaaacaaggacaatcactgcatggaggtcataaggctgaagggattggtgtcaatcaaagacaaatcacaacaagtgattgtccagggtgtccatgagctctatgatctggaggagactccagtgagctggaaggatgacactgagagaacaaatcgattggtcctcattggcagaaatttagataaggatatccttaaacagctgtttatagctactgtgacagaaacagaaaagcagtggacaacacatttcaaagaagatcaagtttgtacataacactagaggcatttcttatcaaaaggattggataataaaaataagtttctactgggtatatttcaagcatttatttattactttagttacgaattccaatatactttaaaatggtatttgttttacagcatacataaaatgtagcaaatcagtactgtaaaacatttaacattcatacaattatatataatatccttttttttaaagaatggtatttcacaaaaatatcttttgaaattggctttggagtttacatatactgaacatgaaagtttataataatgatgatacaactttcaacattgtcattttttcttagaacttcagctgattgcagagatataatgattacattgttattaaatttttttaacacaagtaagtgtcaccattttatgacatgaaataaaaggttatgactgttaaaaaaaaaaatggcctcttggccctacggtgggtctcggcccttcctttatgggggtattcatgaccctctccttgccccgca

SEQ ID NO: 434689 - DNA, 1641 bp, Homo sapiens
aaaaagaaaaaattgtcactggttatccttcaggtataaaaattacaattaaaattgtaatgttataaccttccattctttcccctatgaattaaaacttttttttttaacgagactaaaaaatcaagttgataaaatctatgccctgtgggaactggttaggtcaggctacccactccagatttccagcaggctggcctcagctctacctacagccagtagcttattaaggctctaggcgccagtgacaccttcagacaggtggttagtgcgccctaaggactctccgcagcgtcgctcaggttcacagaacacgcccaggggcgtgtccagctgtcgtcggggagagcccacctccccggggggtgtggctaagggacgaggcagttctcgtccagagcccaggtaatccgggcgggatcagctagcgtcgcgatgtgatgacgtcaggccccggccaggccgggagtggcgtgctgggcgtgcgcggctgcggtacggcgtgttggtcccagcggttcagctgaggtagggacgtgctgtaggccggaatgttaccggctgttggatctgtggatgaggaagaggatcctgcggaggaggattgtcctgaattggttcccattgagacgacgcaaagcgaggaggaggaaaagtctggcctcggcgccaagatcccagtcacaattatcaccgggtatttaggtgctgggaagacaacacttctgaactatattttgacagagcaacatagtaaaagagtagcggtcattttaaatgaatctggggaaggaagtgcgctggagaaatccttagctgtcagccaaggtggagagctctatgaagagtggctggaacttagaaacggttgcctctgctgttcagtgaaggacaatggccttagagctattgagaatttgatgcaaaagaaggggaaatttgatgacatactgttagagaccactggattagcagaccctggtgcagtggcttctatgtttgggttgatgctgaattagggagtgatatttaccttgatggtatcataactattgtggattcaaaatatggattaaaacatttaacagaagagaaacctgatggccttatcaatgaagctactaggcaagttgctttggcagatatcattctcattaataaaacagacttggttccagaagaagatgtaaagaaattaagaacgacacttagatccataaatggactaggacaaatcttagaaacacaaagatcaaggtactttaaaaaagctattcctattaataacaaatcattttagttattaataataaacattaagtaattgacaaatatgcttgattctgatataagaaagatctaagtgcatttaaaaagatttggatccaaaatgttgtttggaatgctcttaataagttagtttggcatatttgactagtacatttgcctgtcttcaaaactaagattacaaagccatgataacactgtgtaagtgtttgcttaatgaggaagaaaagacttccaaacactcgagagggtaactcagtacagaaatctgaagtatattgaggaatcttaatttgaagtgtttaaatggctttttaatatttaaaaagccttcttagtgttttatagttgcca

SEQ ID NO: 434690 - DNA, 7003 bp, Homo sapiens
gaggaggagccggaggaagagggctgcctccgaagaaaggagaatggcgttcagtaaaggattccggatctatcacaaattggatcccccacctttcagcctcatagtggaaactaggcataaggaagaatgtctcatgttcgagtctggggctgtcgctgtgctctcatctgcagaaaaagaggcaatcaagggtacatactccaaagtactggatgcatatggactcttaggtgttctgcggttaaatcttggtgatactatgttacattatctggtcctagtcactggatgtatgtctgttggaaaaattcaagaatctgaagttttccgagttacttccactgagtttatatcactgcgaatcgattcttcagatgaggatcgcatttcagaagtgcggaaagttttgaattcaggaaacttttattttgcatggtctgcatctggcatcagtttagatttgagtcttaatgcgcatcgtagcatgcaagaacagacaactgataatagatttttctggaatcagtctttgcatttgcatctcaaacactatggcgtgaattgtgatgactggttattacgtcttatgtgtggaggagtagaaatcagaacaatttatgctgctcataaacaggcgaaggcttgcctcatttcaagattaagctgtgaacgagctgggaccaggtttaatgtccggggaacaaatgatgatggtcatgttgccaattttgtagaaacagaacaggttgtgtacttagatgactcagtttcttccttcatacaaatccgaggatctgttccattgttctgggagcaaccagggttgcaagtgggatctcatcgtgtccgtatgtcaaggggatttgaagccaatgcacctgcttttgacaggcattttagaacacttaagaacttatatggtagacaaataatagtaaatttgcttggatctaaggaaggtgaacatatgctaagtaaagctttccagagtcatttgaaagcttctgaacatgctgctgatatccagatggtgaattttgactatcatcaaatggttaagggaggaaaggcagaaaaattacatagtgttcttaaacctcaagtccagaagtttctagattatggatttttttatttcaatggaagtgaagttcaaagatgccagagtggtacagttcgaacaaactgcttggattgtcttgatagaacaaatagtgtgcaggcatttcttggcttagagatgctagctaaacagttggaagctcttggtttagctgaaaagcctcagttggtgactcgctttcaagaagtttttcggtcaatgtggtccgtgaatggtgattcaatcagtaagatatatgcaggaactggagctcttgaagggaaagcgaagttaaaagatggtgctcgctctgttacccgaacaattcagaataacttctttgacagctccaagcaagaggccattgatgttttgctactgggaaatactctgaatagtgatttagctgacaaagctcgagcacttttaactactggaagtttgcgtgtttctgagcagacattacagtcagcatcttctaaagtactaaagagcatgtgtgagaatttctacaaatattcaaagcctaagaaaattcgagtatgtgtcggaacctggaatgtgaatggtgggaagcaatttcgcagcatagcttttaagaatcagacactcactgactggcttcttgatgcacccaagttagctggcatccaggagtttcaagataaaagaagtaagccaactgatatatttgcaattggttttgaagaaatggtagaattgaatgctggaaacattgtgagtgcaagcacaacaaatcagaagctctgggctgtagaacttcagaagacaatctccagagacaacaagtatgtgctgctggcttctgaacagttggtgggcgtctgtttgtttgtttttatcagaccacagcatgctccttttatcagggatgttgcagttgatactgtgaagactggaatgggaggtgcaactggaaataagggagcagttgcaatccgaatgctcttccatacaaccagcctttgcttcgtctgtagccactttgctgcagggcagtcacaagtcaaagaaagaaatgaagattttatagaaatagcacgaaaattgagttttcctatgggaaggatgctattttcccatgactatgtattttggtgtggtgatttcaactatcgaatcgatctccctaacgaagaagttaaagagctcataagacagcaaaattgggattctcttatagcaggagatcaacttatcaatcagaaaaatgctggacaggtttttagaggatttttagaaggaaaggtaacctttgctccgacatataagtatgacttgttttctgacgactatgacaccagtgaaaagtgccgcacccctgcctggacagaccgtgtcctttggagaaggaggaaatggccttttgatagatcagctgaagatctagatcttctaaatgctagttttcaagatgaaagcaaaattctgtacacgtggactccaggcactttgctgcactatggaagagctgagctgaagacttctgaccacaggcctgtcgttgccctgattgatatagatatatttgaagttgaagctgaagagaggcaaaacatttataaagaagtaattgcagttcagggtccaccagatggtacagtattggtctcaatcaaaagttctttaccagaaaataatttttttgatgatgccttgattgatgagcttctgcagcagtttgcaagttttggtgaagttatacttataagatttgtagaagataaaatgtgggttacatttttggagggaagctctgccttgaatgttctgagcctaaatggtaaagagttattgaatcggactataactattgctttaaaaagtccagactggatcaaaaatttggaagaagaaatgagtttagagaaaattagcattgcattgccatcatcaacaagctctaccctgcttggtgaagatgcagaggttgcagcagattttgatatggaaggtgatgttgatgactatagtgctgaagtggaggaacttcttcctcagcatctccagccatcttcaagttccggccttggtacttcccccagctcttcaccccgaactagtccctgccagtcacctacaatatcagagggtcctgtaccttcccttcccatcagaccaagccgagcaccgtcaagaactcctgggcctcccagtgcacagagttctcctattgacgcgcagccagcaacgccgctgccgcagaaagaccccgcccagcccttggagcccaagcggccgccgccgccccgcccggtcgcccctcccacacgcccggctcccccacagagacctcctccgccttcaggggctaggagtcctgcacccactagaaaggaatttggaggtattggagcccctcccagtcctggggtagctaggagagagatggaagcacccaaaagccctggaacaacaaggaaagataatataggacgcagtcagccttcacctcaagcaggacttgcaggcccaggacctgctggatacagtacagccagaccgacgattcctcctcgtgctggagttatcagtgccccacagagccacgcgcgggcatctgctggaagactgactcctgaaagccaaagcaaaacatcagaaacgtcgaaaggttcaactttccttcctgaaccactgaagcctcaggctgcttttcctccgcagtcttctttgcccccgcctgctcaaaggttgcaagagcctcttgtccctgtggcagcacctatgcctcagtctggcccccagccaaatttggaaaccccaccacaaccaccacctcgaagcaggtcatcccatagcttgccttcagaagcttcctcacaaccgcaagtaaaaacaaatggaatctctgatggcaaaagagaatcaccattaaagattgacccatttgaagatctgtcatttaatctgcttgctgtatcaaaggctcagctatctgttcaaacgtcacctgttcccaccccagacccaaagaggttgattcagttgccttctgcaacgcaaagtaatgttaatactttgagttctgtaagttgcatgccaacaatgcctccaattccagctcggagtcaatcccaggaaaatatgcgaagttctccaaacccatttattactggcttgaccaggacaaatcctttcagtgacaggactgctgctcctggaaacccatttagagccaagtctgaagaatcagaggcaacttcatggttctccaaagaagagcccgttactatcagtcctttcccttctctgcagcctcttggtcataacaaaagcagggcttcatcttcacttgatggctttaaggacagttttgatctacagggccagtctacattaaaaattagcaacccgaaaggatgggtaaccttcgaggaagaagaggattttggtgtgaaagggaagtcaaagtcagcttgttcagacttactgggtaatcagccaagttcattttctggctccaacctgacattgaatgatgactggaataaaggtacaaatgtctccttctgtgtgttgccgtcaagaagacctcctccacctcctgtccctctgctcccgcccggcaccagccctccagtagatcctttcacgaccttggcctctaaggcttcacccacactggactttacagaaagataacgccatgcaatagaaaacagtgggtacttgcttttggcaggatagagctaagagaattgggcattagtatttcattatgtgcaataagtcattgtaagtgcactgatatcttcacaaaacaccactatttgatgtgtacagagttggactatgtgtatattggaaataaggaaaaacccttctcattgttaactggagttttgatgtatttctctttggatgaataggagacagtagtagccataaaaagtacttatactttagaaaacagtccttattcagaaacttttcggtcagtcttctgaagaatctcaaaaagcccacccaactttcagctgacatttccaccagccctctcatacttgttaacaattggtatctttgagtatttaccaaagagctgccaaggttacagtgaacagagttttgaaaggcattgctttaaaggaaaaaagtataggtatgtgtacatatataatacatacaaacacatgtacttctgtatacatttacatatttttacaattcatactttaatttctaggctataactcagaccaaattatacctaaaagttccaacaaagtccctttttcaatatcacattaccaaaaagatggctgcaaatgtaatttggacctttcattaattttgttttcaaaactagaataatctcaccacagaatcagaattttctaccgttccacacccaaccccttcaaatacacacaaccttgttacttttcactccagcaccttcatacgcttttctccaggaggaggttcttgcagctggaaacagcctattttgtggtcactgtcaagtggatggatattctagcgctcccaaaaaagcactatggccttatatgcagggaaggcacataccaccaagttcaatgagaaatattagagctaaccgtactctcttctctgcgtacgttcgagtatacgttgcccatatccctcccatattttctttttgctgcttttgctctggaactttgcttttagcagggaaagcagctgtcccctgagtgctttgaattgggaatatacccagtgtgtgttctcccccctcttacgaggctacataacacatctatgatgctgctttaagtttttagaggctatacctcaaagtagctgcggattttgtctcctgcactgccaatatgcaactgatcccgcttttattaattttttgaagaagtacacagaatttttacagaatgtagtattttgatatcattaagtaaaccaatcagaaaactccttgagcaatagttgtttctttgtcagtttcagttacaatcatctttacccattaagacttacattaacattccttttatataaagagttgtatatgtccacctaaattcctatgtccacacttaacctttaaagatgtacattgagggaatatcaaaaaatagcgttcatggctacgaatatgtagaatgttaaaagcacagcaaactgcactgcacttataaagcaaatctattagaaaaaaagcatttttctaaatgctcaaatgttatcaaaatactatatttatagaagtaatcttctctgttaacagccaagatttgctgttagaaataactcttgtgagttttatattgtgctttttggaggttctaatcatttcagcagtagcgtcttaaacagcagtattactataagcagttgcttcaaaatgtgaattaacttgttgaaactgtggctttaacatccatgtgactagtgtatatggtatttgctctccattagcaaaataattcattgttaggtaaacttcattagtgcaaattgcagatctgtgagcaatgtttcctattgaatataaactactgtctaaaatatacatatcagcagcccagcctttatcaggaaaattatacttggcaagttgctgaaaatgcacaaagttatgaaagttaaaggtatgctgcaaataactagccattattctatgtattattaaatatttactagttctgttaaaagcagagcagaagttagacactaaggatctctttgtgaactctgtgttctctatattagattgctgtttatatgtaagaattttattgcttatgtggcatacaatatttataactataaactttatagaagtacagtattaaagtcagtggtacacagacattctgtacatatcctgtgaaacgtgctgtcatatgaaataaatatatctgtctttac

SEQ ID NO: 434691 - DNA, 6949 bp, Homo sapiens
gaggaggagccggaggaagagggctgcctccgaagaaaggagaatggcgttcagtaaaggattccggatctatcacaaattggatcccccacctttcagcctcatagtggaaactaggcataaggaagaatgtctcatgttcgagtctggggctgtcgctgtgctctcatctgcagaaaaagaggcaatcaagggtacatactccaaagtactggatgcatatggactcttaggtgttctgcggttaaatcttggtgatactatgttacattatctggtcctagtcactggatgtatgtctgttggaaaaattcaagaatctgaagttttccgagttacttccactgagtttatatcactgcgaatcgattcttcagatgaggatcgcatttcagaagtgcggaaagttttgaattcaggaaacttttattttgcatggtctgcatctggcatcagtttagatttgagtcttaatgcgcatcgtagcatgcaagaacagacaactgataatagatttttctggaatcagtctttgcatttgcatctcaaacactatggcgtgaattgtgatgactggttattacgtcttatgtgtggaggagtagaaatcagaacaatttatgctgctcataaacaggcgaaggcttgcctcatttcaagattaagctgtgaacgagctgggaccaggtttaatgtccggggaacaaatgatgatggtcatgttgccaattttgtagaaacagaacaggttgtgtacttagatgactcagtttcttccttcatacaaatccgaggatctgttccattgttctgggagcaaccagggttgcaagtgggatctcatcgtgtccgtatgtcaaggggatttgaagccaatgcacctgcttttgacaggcattttagaacacttaagaacttatatggtagacaaataatagtaaatttgcttggatctaaggaaggtgaacatatgctaagtaaagctttccagagtcatttgaaagcttctgaacatgctgctgatatccagatggtgaattttgactatcatcaaatggttaagggaggaaaggcagaaaaattacatagtgttcttaaacctcaagtccagaagtttctagattatggatttttttatttcaatggaagtgaagttcaaagatgccagagtggtacagttcgaacaaactgcttggattgtcttgatagaacaaatagtgtgcaggcatttcttggcttagagatgctagctaaacagttggaagctcttggtttagctgaaaagcctcagttggtgactcgctttcaagaagtttttcggtcaatgtggtccgtgaatggtgattcaatcagtaagatatatgcaggaactggagctcttgaagggaaagcgaagttaaaagatggtgctcgctctgttacccgaacaattcagaataacttctttgacagctccaagcaagaggccattgatgttttgctactgggaaatactctgaatagtgatttagctgacaaagctcgagcacttttaactactggaagtttgcgtgtttctgagcagacattacagtcagcatcttctaaagtactaaagagcatgtgtgagaatttctacaaatattcaaagcctaagaaaattcgagtatgtgtcggaacctggaatgtgaatggtgggaagcaatttcgcagcatagcttttaagaatcagacactcactgactggcttcttgatgcacccaagttagctggcatccaggagtttcaagataaaagaagtaagccaactgatatatttgcaattggttttgaagaaatggtagaattgaatgctggaaacattgtgagtgcaagcacaacaaatcagaagctctgggctgtagaacttcagaagacaatctccagagacaacaagtatgtgctgctggcttctgaacagttggtgggcgtctgtttgtttgtttttatcagaccacagcatgctccttttatcagggatgttgcagttgatactgtgaagactggaatgggaggtgcaactggaaataagggagcagttgcaatccgaatgctcttccatacaaccagcctttgcttcgtctgtagccactttgctgcagggcagtcacaagtcaaagaaagaaatgaagattttatagaaatagcacgaaaattgagttttcctatgggaaggatgctattttcccatgactatgtattttggtgtggtgatttcaactatcgaatcgatctccctaacgaagaagttaaagagctcataagacagcaaaattgggattctcttatagcaggagatcaacttatcaatcagaaaaatgctggacaggtttttagaggatttttagaaggaaaggtaacctttgctccgacatataagtatgacttgttttctgacgactatgacaccagtgaaaagtgccgcacccctgcctggacagaccgtgtcctttggagaaggaggaaatggccttttgatagatcagctgaagatctagatcttctaaatgctagttttcaagatgaaagcaaaattctgtacacgtggactccaggcactttgctgcactatggaagagctgagctgaagacttctgaccacaggcctgtcgttgccctgattgatatagatatatttgaagttgaagctgaagagaggcaaaacatttataaagaagtaattgcagttcagggtccaccagatggtacagtattggtctcaatcaaaagttctttaccagaaaataatttttttgatgatgccttgattgatgagcttctgcagcagtttgcaagttttggtgaagttatacttataagatttgtagaagataaaatgtgggttacatttttggagggaagctctgccttgaatgttctgagcctaaatggtaaagagttattgaatcggactataactattgctttaaaaagtccagactggatcaaaaatttggaagaagaaatgagtttagagaaaattagcattgcattgccatcatcaacaagctctaccctgcttggtgaagatgcagaggttgcagcagattttgatatggaaggtgatgttgatgactatagtgctgaagtggaggaacttcttcctcagcatctccagccatcttcaagttccggccttggtacttcccccagctcttcaccccgaactagtccctgccagtcacctacaatatcagagggtcctgtaccttcccttcccatcagaccaagccgagcaccgtcaagaactcctgggcctcccagtgcacagagttctcctattgacgcgcagccagcaacgccgctgccgcagaaagaccccgcccagcccttggagcccaagcggccgccgccgccccgcccggtcgcccctcccacacgcccggctcccccacagagacctcctccgccttcaggggctaggagtcctgcacccactagaaaggaatttggaggtattggagcccctcccagtcctggggtagctaggagagagatggaagcacccaaaagccctggaacaacaaggaaagataatataggacgcagtcagccttcacctcaagcaggacttgcaggcccaggacctgctggatacagtacagccagaccgacgattcctcctcgtgctggagttatcagtgccccacagagccacgcgcgggcatctgctggaagactgactcctgaaagccaaagcaaaacatcagaaacgtcgaaaggttcaactttccttcctgaaccactgaagcctcaggctgcttttcctccgcagtcttctttgcccccgcctgctcaaaggttgcaagagcctcttgtccctgtggcagcacctatgcctcagtctggcccccagccaaatttggaaaccccaccacaaccaccacctcgaagcaggtcatcccatagcttgccttcagaagcttcctcacaaccgcaagtaaaaacaaatggaatctctgatggcaaaagagaatcaccattaaagattgacccatttgaagatctgtcatttaatctgcttgctgtatcaaaggctcagctatctgttcaaacgtcacctgttcccaccccagacccaaagaggttgattcagttgccttctgcaacgcaaagtaatgttaatactttgagttctgtaagttgcatgccaacaatgcctccaattccagctcggagtcaatcccaggaaaatatgcgaagttctccaaacccatttattactggcttgaccaggacaaatcctttcagtgacaggactgctgctcctggaaacccatttagagccaagtctgaagaatcagaggcaacttcatggttctccaaagaagagcccgttactatcagtcctttcccttctctgcagcctcttggtcataacaaaagcagggcttcatcttcacttgatggctttaaggacagttttgatctacagggccagtctacattaaaaattagcaacccgaaaggatgggtaaccttcgaggaagaagaggattttggtgtgaaagggaagtcaaagtcagcttgttcagacttactgggtaatcagccaagttcattttctggctccaacctgacattgaatgatgactggaataaaggtacaaatgtctccttctgtgtgttgccgtcaagaagacctcctccacctcctgtccctctgctcccgcccggcaccagccctccagtagatcctttcacgaccttggcctctaaggcttcacccacactggactttacagaaagataacgccatgcaatagaaaacagtgggtacttgcttttggcaggatagagctaagagaattgggcattagtatttcattatgtgcaataagtcattgtaagtgcactgatatcttcacaaaacaccactatttgatgtgtacagagttggactatgtgtatattggaaataaggaaaaacccttctcattgttaactggagttttgatgtatttctctttggatgaataggagacagtagtagccataaaaagtacttatactttagaaaacagtccttattcagaaacttttcggtcagtcttctgaagaatctcaaaaagcccacccaactttcagctgacatttccaccagccctctcatacttgttaacaattggtatctttgagtatttaccaaagagctgccaaggttacagtgaacagagttttgaaaggcattgctttaaaggaaaaaagtataggtatgtgtacatatataatacatacaaacacatgtacttctgtatacatttacatatttttacaattcatactttaatttctaggctataactcagaccaaattatacctaaaagttccaacaaagtccctttttcaatatcacattaccaaaaagatggctgcaaatgtaatttggacctttcattaattttgttttcaaaactagaataatctcaccacagaatcagaattttctaccgttccacacccaaccccttcaaatacacacaaccttgttacttttcactccagcaccttcatacgcttttctccaggaggaggttcttgcagctggaaacagcctattttgtggtcactgtcaagtggatggatattctagcgctcccaaaaatattagagctaaccgtactctcttctctgcgtacgttcgagtatacgttgcccatatccctcccatattttctttttgctgcttttgctctggaactttgcttttagcagggaaagcagctgtcccctgagtgctttgaattgggaatatacccagtgtgtgttctcccccctcttacgaggctacataacacatctatgatgctgctttaagtttttagaggctatacctcaaagtagctgcggattttgtctcctgcactgccaatatgcaactgatcccgcttttattaattttttgaagaagtacacagaatttttacagaatgtagtattttgatatcattaagtaaaccaatcagaaaactccttgagcaatagttgtttctttgtcagtttcagttacaatcatctttacccattaagacttacattaacattccttttatataaagagttgtatatgtccacctaaattcctatgtccacacttaacctttaaagatgtacattgagggaatatcaaaaaatagcgttcatggctacgaatatgtagaatgttaaaagcacagcaaactgcactgcacttataaagcaaatctattagaaaaaaagcatttttctaaatgctcaaatgttatcaaaatactatatttatagaagtaatcttctctgttaacagccaagatttgctgttagaaataactcttgtgagttttatattgtgctttttggaggttctaatcatttcagcagtagcgtcttaaacagcagtattactataagcagttgcttcaaaatgtgaattaacttgttgaaactgtggctttaacatccatgtgactagtgtatatggtatttgctctccattagcaaaataattcattgttaggtaaacttcattagtgcaaattgcagatctgtgagcaatgtttcctattgaatataaactactgtctaaaatatacatatcagcagcccagcctttatcaggaaaattatacttggcaagttgctgaaaatgcacaaagttatgaaagttaaaggtatgctgcaaataactagccattattctatgtattattaaatatttactagttctgttaaaagcagagcagaagttagacactaaggatctctttgtgaactctgtgttctctatattagattgctgtttatatgtaagaattttattgcttatgtggcatacaatatttataactataaactttatagaagtacagtattaaagtcagtggtacacagacattctgtacatatcctgtgaaacgtgctgtcatatgaaataaatatatctgtctttac

SEQ ID NO: 434692 - DNA, 6483 bp, Homo sapiens
gaggaggagccggaggaagagggctgcctccgaagaaaggagaatggcgttcagtaaaggattccggatctatcacaaattggatcccccacctttcagcctcatagtggaaactaggcataaggaagaatgtctcatgttcgagtctggggctgtcgctgtgctctcatctgcagaaaaagaggcaatcaagggtacatactccaaagtactggatgcatatggactcttaggtgttctgcggttaaatcttggtgatactatgttacattatctggtcctagtcactggatgtatgtctgttggaaaaattcaagaatctgaagttttccgagttacttccactgagtttatatcactgcgaatcgattcttcagatgaggatcgcatttcagaagtgcggaaagttttgaattcaggaaacttttattttgcatggtctgcatctggcatcagtttagatttgagtcttaatgcgcatcgtagcatgcaagaacagacaactgataatagatttttctggaatcagtctttgcatttgcatctcaaacactatggcgtgaattgtgatgactggttattacgtcttatgtgtggaggagtagaaatcagaacaatttatgctgctcataaacaggcgaaggcttgcctcatttcaagattaagctgtgaacgagctgggaccaggtttaatgtccggggaacaaatgatgatggtcatgttgccaattttgtagaaacagaacaggttgtgtacttagatgactcagtttcttccttcatacaaatccgaggatctgttccattgttctgggagcaaccagggttgcaagtgggatctcatcgtgtccgtatgtcaaggggatttgaagccaatgcacctgcttttgacaggcattttagaacacttaagaacttatatggtagacaaataatagtaaatttgcttggatctaaggaaggtgaacatatgctaagtaaagctttccagagtcatttgaaagcttctgaacatgctgctgatatccagatggtgaattttgactatcatcaaatggttaagggaggaaaggcagaaaaattacatagtgttcttaaacctcaagtccagaagtttctagattatggatttttttatttcaatggaagtgaagttcaaagatgccagagtggtacagttcgaacaaactgcttggattgtcttgatagaacaaatagtgtgcaggcatttcttggcttagagatgctagctaaacagttggaagctcttggtttagctgaaaagcctcagttggtgactcgctttcaagaagtttttcggtcaatgtggtccgtgaatggtgattcaatcagtaagatatatgcaggaactggagctcttgaagggaaagcgaagttaaaagatggtgctcgctctgttacccgaacaattcagaataacttctttgacagctccaagcaagaggccattgatgttttgctactgggaaatactctgaatagtgatttagctgacaaagctcgagcacttttaactactggaagtttgcgtgtttctgagcagacattacagtcagcatcttctaaagtactaaagagcatgtgtgagaatttctacaaatattcaaagcctaagaaaattcgagtatgtgtcggaacctggaatgtgaatggtgggaagcaatttcgcagcatagcttttaagaatcagacactcactgactggcttcttgatgcacccaagttagctggcatccaggagtttcaagataaaagaagtaagccaactgatatatttgcaattggttttgaagaaatggtagaattgaatgctggaaacattgtgagtgcaagcacaacaaatcagaagctctgggctgtagaacttcagaagacaatctccagagacaacaagtatgtgctgctggcttctgaacagttggtgggcgtctgtttgtttgtttttatcagaccacagcatgctccttttatcagggatgttgcagttgatactgtgaagactggaatgggaggtgcaactggaaataagggagcagttgcaatccgaatgctcttccatacaaccagcctttgcttcgtctgtagccactttgctgcagggcagtcacaagtcaaagaaagaaatgaagattttatagaaatagcacgaaaattgagttttcctatgggaaggatgctattttcccatgactatgtattttggtgtggtgatttcaactatcgaatcgatctccctaacgaagaagttaaagagctcataagacagcaaaattgggattctcttatagcaggagatcaacttatcaatcagaaaaatgctggacaggtttttagaggatttttagaaggaaaggtaacctttgctccgacatataagtatgacttgttttctgacgactatgacaccagtgaaaagtgccgcacccctgcctggacagaccgtgtcctttggagaaggaggaaatggccttttgatagatcagctgaagatctagatcttctaaatgctagttttcaagatgaaagcaaaattctgtacacgtggactccaggcactttgctgcactatggaagagctgagctgaagacttctgaccacaggcctgtcgttgccctgattgatatagatatatttgaagttgaagctgaagagaggcaaaacatttataaagaagtaattgcagttcagggtccaccagatggtacagtattggtctcaatcaaaagttctttaccagaaaataatttttttgatgatgccttgattgatgagcttctgcagcagtttgcaagttttggtgaagttatacttataagatttgtagaagataaaatgtgggttacatttttggagggaagctctgccttgaatgttctgagcctaaatggtaaagagttattgaatcggactataactattgctttaaaaagtccagactggatcaaaaatttggaagaagaaatgagtttagagaaaattagcattgcattgccatcatcaacaagctctaccctgcttggtgaagatgcagaggttgcagcagattttgatatggaaggtgatgttgatgactatagtgctgaagtggaggaacttcttcctcagcatctccagccatcttcaagttccggccttggtacttcccccagctcttcaccccgaactagtccctgccagtcacctacaatatcagagggtcctgtaccttcccttcccatcagaccaagccgagcaccgtcaagaactcctgggcctcccagtgcacagagttctcctattgacgcgcagccagcaacgccgctgccgcagaaagaccccgcccagcccttggagcccaagcggccgccgccgccccgcccggtcgcccctcccacacgcccggctcccccacagagacctcctccgccttcaggggctaggagtcctgcacccactagaaaggaatttggaggtattggagcccctcccagtcctggggtagctaggagagagatggaagcacccaaaagccctggaacaacaaggaaagataatataggacgcagtcagccttcacctcaagcaggacttgcaggcccaggacctgctggatacagtacagccagaccgacgattcctcctcgtgctggagttatcagtgccccacagagccacgcgcgggcatctgctggaagactgactcctgaaagccaaagcaaaacatcagaaacgtcgaaaggttcaactttccttcctgaaccactgaagcctcaggctgcttttcctccgcagtcttctttgcccccgcctgctcaaaggttgcaagagcctcttgtccctgtggcagcacctatgcctcagtctggcccccagccaaatttggaaaccccaccacaaccaccacctcgaagcaggtcatcccatagcttgccttcagaagcttcctcacaaccgcaagtaaaaacaaatggaatctctgatggcaaaagagaatcaccattaaagattgacccatttgaagatctgtcatttaatctgcttgctgtatcaaaggctcagctatctgttcaaacgtcacctgttcccaccccagacccaaagaggttgattcagttgccttctgcaacgcaaagtaatgttaatactttgagttctgtaagttgcatgccaacaatgcctccaattccagctcggagtcaatcccaggaaaatatgcgaagttctccaaacccatttattactggcttgaccaggacaaatcctttcagtgacaggactgctgctcctggaaacccatttagagccaagtctgaagaatcagaggcaacttcatggttctccaaagaagagcccgttactatcagtcctttcccttctctgcagcctcttggtcataacaaaagcagggcttcatcttcacttgatggctttaaggacagttttgatctacagggccagtctacattaaaaattagcaacccgaaaggatgggtaaccttcgaggaagaagaggattttggtgtgaaagggaagtcaaagtcagcttgttcagacttactgggtaatcagccaagttcattttctggctccaacctgacattgaatgatgactggaataaaggtacaaatgtctccttctgtgtgttgccgtcaagaagacctcctccacctcctgtccctctgctcccgcccggcaccagccctccagtagatcctttcacgaccttggcctctaaggcttcacccacactggactttacagaaagataacgccatgcaatagaaaacagtgggtacttgcttttggcaggatagagctaagagaattgggcattagtatttcattatgtgcaataagtcattgtaagtgcactgatatcttcacaaaacaccactatttgatgtgtacagagttggactatgtgtatattggaaataaggaaaaacccttctcattgttaactggagttttgatgtatttctctttggatgaataggagacagtagtagccataaaaagtacttatactttagaaaacagtccttattcagaaacttttcggtcagtcttctgaagaatctcaaaaagcccacccaactttcagctgacatttccaccagccctctcatacttgttaacaattggtatctttgagtatttaccaaagagctgccaaggttacagtgaacagagttttgaaaggcattgctttaaaggaaaaaagtataggtatgtgtacatatataatacatacaaacacatgtacttctgtatacatttacatatttttacaattcatactttaatttctaggctataactcagaccaaattatacctaaaagttccaacaaagtccctttttcaatatcacattaccaaaaagatggctgcaaatgtaatttggacctttcattaattttgttttcaaaactagaataatctcaccacagaatcagaattttctaccgttccacacccaaccccttcaaatacacacaaccttgttacttttcactccagcaccttcatacgcttttctccaggaggaggttcttgcagctggaaacagcctattttgtggtcactgtcaagtggatggatattctagcgctcccaaaaaagcactatggccttatatgcagggaaggcacataccaccaagttcaatgagaaatattagagctaaccgtactctcttctctgcgtacgttcgagtatacgttgcccatatccctcccatattttctttttgctgcttttgctctggaactttgcttttagcagggaaagcagctgtcccctgagtgctttgaattgggaatatacccagtgtgtgttctcccccctcttacgaggctacataacacatctatgatgctgctttaagtttttagaggctatacctcaaagtagctgcggattttgtctcctgcactgccaatatgcaactgatcccgcttttattaattttttgaagaagtacacagaatttttacagaatgtagtattttgatatcattaagtaaaccaatcagaaaactccttgagcaatagttgtttctttgtcagtttcagttacaatcatctttacccattaagacttacattaacattccttttatataaagagttgtatatgtccacctaaattcctatgtccacacttaacctttaaagatgtacattgagggaatatcaaaaaatagcgttcatggctacgaatatgtagaatgttaaaagcacagcaaactgcactgcacttataaagcaaatcccttcgacaccagcatgtcctaactgcccaatgttttccagtacttattcgtgccgtgaccctcctgtaacagccagattgcggtcgcaatacccgggggtaacaatggcccggggggccaacacaccacggcttacaccagaacccggctccaggagtcgcgacgcgctcccgcatatctatacacccaccaagtccccgccgg

SEQ ID NO: 434693 - DNA, 6994 bp, Homo sapiens
gagctgctgcggccagacccacgggcagccgggcgggcggacgcctccaagaccagtctctgcctccgcagcgtcagcgggagcgggctgcctccgaagaaaggagaatggcgttcagtaaaggattccggatctatcacaaattggatcccccacctttcagcctcatagtggaaactaggcataaggaagaatgtctcatgttcgagtctggggctgtcgctgtgctctcatctgcagaaaaagaggcaatcaagggtacatactccaaagtactggatgcatatggactcttaggtgttctgcggttaaatcttggtgatactatgttacattatctggtcctagtcactggatgtatgtctgttggaaaaattcaagaatctgaagttttccgagttacttccactgagtttatatcactgcgaatcgattcttcagatgaggatcgcatttcagaagtgcggaaagttttgaattcaggaaacttttattttgcatggtctgcatctggcatcagtttagatttgagtcttaatgcgcatcgtagcatgcaagaacagacaactgataatagatttttctggaatcagtctttgcatttgcatctcaaacactatggcgtgaattgtgatgactggttattacgtcttatgtgtggaggagtagaaatcagaacaatttatgctgctcataaacaggcgaaggcttgcctcatttcaagattaagctgtgaacgagctgggaccaggtttaatgtccggggaacaaatgatgatggtcatgttgccaattttgtagaaacagaacaggttgtgtacttagatgactcagtttcttccttcatacaaatccgaggatctgttccattgttctgggagcaaccagggttgcaagtgggatctcatcgtgtccgtatgtcaaggggatttgaagccaatgcacctgcttttgacaggcattttagaacacttaagaacttatatggtagacaaataatagtaaatttgcttggatctaaggaaggtgaacatatgctaagtaaagctttccagagtcatttgaaagcttctgaacatgctgctgatatccagatggtgaattttgactatcatcaaatggttaagggaggaaaggcagaaaaattacatagtgttcttaaacctcaagtccagaagtttctagattatggatttttttatttcaatggaagtgaagttcaaagatgccagagtggtacagttcgaacaaactgcttggattgtcttgatagaacaaatagtgtgcaggcatttcttggcttagagatgctagctaaacagttggaagctcttggtttagctgaaaagcctcagttggtgactcgctttcaagaagtttttcggtcaatgtggtccgtgaatggtgattcaatcagtaagatatatgcaggaactggagctcttgaagggaaagcgaagttaaaagatggtgctcgctctgttacccgaacaattcagaataacttctttgacagctccaagcaagaggccattgatgttttgctactgggaaatactctgaatagtgatttagctgacaaagctcgagcacttttaactactggaagtttgcgtgtttctgagcagacattacagtcagcatcttctaaagtactaaagagcatgtgtgagaatttctacaaatattcaaagcctaagaaaattcgagtatgtgtcggaacctggaatgtgaatggtgggaagcaatttcgcagcatagcttttaagaatcagacactcactgactggcttcttgatgcacccaagttagctggcatccaggagtttcaagataaaagaagtaagccaactgatatatttgcaattggttttgaagaaatggtagaattgaatgctggaaacattgtgagtgcaagcacaacaaatcagaagctctgggctgtagaacttcagaagacaatctccagagacaacaagtatgtgctgctggcttctgaacagttggtgggcgtctgtttgtttgtttttatcagaccacagcatgctccttttatcagggatgttgcagttgatactgtgaagactggaatgggaggtgcaactggaaataagggagcagttgcaatccgaatgctcttccatacaaccagcctttgcttcgtctgtagccactttgctgcagggcagtcacaagtcaaagaaagaaatgaagattttatagaaatagcacgaaaattgagttttcctatgggaaggatgctattttcccatgactatgtattttggtgtggtgatttcaactatcgaatcgatctccctaacgaagaagttaaagagctcataagacagcaaaattgggattctcttatagcaggagatcaacttatcaatcagaaaaatgctggacaggtttttagaggatttttagaaggaaaggtaacctttgctccgacatataagtatgacttgttttctgacgactatgacaccagtgaaaagtgccgcacccctgcctggacagaccgtgtcctttggagaaggaggaaatggccttttgatagatcagctgaagatctagatcttctaaatgctagttttcaagatgaaagcaaaattctgtacacgtggactccaggcactttgctgcactatggaagagctgagctgaagacttctgaccacaggcctgtcgttgccctgattgatatagatatatttgaagttgaagctgaagagaggcaaaacatttataaagaagtaattgcagttcagggtccaccagatggtacagtattggtctcaatcaaaagttctttaccagaaaataatttttttgatgatgccttgattgatgagcttctgcagcagtttgcaagttttggtgaagttatacttataagatttgtagaagataaaatgtgggttacatttttggagggaagctctgccttgaatgttctgagcctaaatggtaaagagttattgaatcggactataactattgctttaaaaagtccagactggatcaaaaatttggaagaagaaatgagtttagagaaaattagcattgcattgccatcatcaacaagctctaccctgcttggtgaagatgcagaggttgcagcagattttgatatggaaggtgatgttgatgactatagtgctgaagtggaggaacttcttcctcagcatctccagccatcttcaagttccggccttggtacttcccccagctcttcaccccgaactagtccctgccagtcacctacaatatcagagggtcctgtaccttcccttcccatcagaccaagccgagcaccgtcaagaactcctgggcctcccagtgcacagagttctcctattgacgcgcagccagcaacgccgcgccccgcccggtcgcccctcccacacgcccggctcccccacagagacctcctccgccttcaggggctaggagtcctgcacccactagaaaggaatttggagcacccaaaagccctggaacaacaaggaaagataatataggacgcagtcagccttcacctcaagcaggacttgcaggcccaggacctgctggatacagtacagccagaccgacgattcctcctcgtgctggagttatcagtgccccacagagccacgcgcgggcatctgctggaagactgactcctgaaagccaaagcaaaacatcagaaacgtcgaaaggttcaactttccttcctgaaccactgaagcctcaggctgcttttcctccgcagtcttctttgcccccgcctgctcaaaggttgcaagagcctcttgtccctgtggcagcacctatgcctcagtctggcccccagccaaatttggaaaccccaccacaaccaccacctcgaagcaggtcatcccatagcttgccttcagaagcttcctcacaaccgcaacaggagcaaccatcagggtaacaggtaaaaacaaatggaatctctgatggcaaaagagaatcaccattaaagattgacccatttgaagatctgtcatttaatctgcttgctgtatcaaaggctcagctatctgttcaaacgtcacctgttcccaccccagacccaaagaggttgattcagttgccttctgcaacgcaaagtaatgttaatactttgagttctgtaagttgcatgccaacaatgcctccaattccagctcggagtcaatcccaggaaaatatgcgaagttctccaaacccatttattactggcttgaccaggacaaatcctttcagtgacaggactgctgctcctggaaacccatttagagccaagtctgaagaatcagaggcaacttcatggttctccaaagaagagcccgttactatcagtcctttcccttctctgcagcctcttggtcataacaaaagcagggcttcatcttcacttgatggctttaaggacagttttgatctacagggccagtctacattaaaaattagcaacccgaaaggatgggtaaccttcgaggaagaagaggattttggtgtgaaagggaagtcaaagtcagcttgttcagacttactgggtaatcagccaagttcattttctggctccaacctgacattgaatgatgactggaataaaggtacaaatgtctccttctgtgtgttgccgtcaagaagacctcctccacctcctgtccctctgctcccgcccggcaccagccctccagtagatcctttcacgaccttggcctctaaggcttcacccacactggactttacagaaagataacgccatgcaatagaaaacagtgggtacttgcttttggcaggatagagctaagagaattgggcattagtatttcattatgtgcaataagtcattgtaagtgcactgatatcttcacaaaacaccactatttgatgtgtacagagttggactatgtgtatattggaaataaggaaaaacccttctcattgttaactggagttttgatgtatttctctttggatgaataggagacagtagtagccataaaaagtacttatactttagaaaacagtccttattcagaaacttttcggtcagtcttctgaagaatctcaaaaagcccacccaactttcagctgacatttccaccagccctctcatacttgttaacaattggtatctttgagtatttaccaaagagctgccaaggttacagtgaacagagttttgaaaggcattgctttaaaggaaaaaagtataggtatgtgtacatatataatacatacaaacacatgtacttctgtatacatttacatatttttacaattcatactttaatttctaggctataactcagaccaaattatacctaaaagttccaacaaagtccctttttcaatatcacattaccaaaaagatggctgcaaatgtaatttggacctttcattaattttgttttcaaaactagaataatctcaccacagaatcagaattttctaccgttccacacccaaccccttcaaatacacacaaccttgttacttttcactccagcaccttcatacgcttttctccaggaggaggttcttgcagctggaaacagcctattttgtggtcactgtcaagtggatggatattctagcgctcccaaaaaagcactatggccttatatgcagggaaggcacataccaccaagttcaatgagaaatattagagctaaccgtactctcttctctgcgtacgttcgagtatacgttgcccatatccctcccatattttctttttgctgcttttgctctggaactttgcttttagcagggaaagcagctgtcccctgagtgctttgaattgggaatatacccagtgtgtgttctcccccctcttacgaggctacataacacatctatgatgctgctttaagtttttagaggctatacctcaaagtagctgcggattttgtctcctgcactgccaatatgcaactgatcccgcttttattaattttttgaagaagtacacagaatttttacagaatgtagtattttgatatcattaagtaaaccaatcagaaaactccttgagcaatagttgtttctttgtcagtttcagttacaatcatctttacccattaagacttacattaacattccttttatataaagagttgtatatgtccacctaaattcctatgtccacacttaacctttaaagatgtacattgagggaatatcaaaaaatagcgttcatggctacgaatatgtagaatgttaaaagcacagcaaactgcactgcacttataaagcaaatctattagaaaaaaagcatttttctaaatgctcaaatgttatcaaaatactatatttatagaagtaatcttctctgttaacagccaagatttgctgttagaaataactcttgtgagttttatattgtgctttttggaggttctaatcatttcagcagtagcgtcttaaacagcagtattactataagcagttgcttcaaaatgtgaattaacttgttgaaactgtggctttaacatccatgtgactagtgtatatggtatttgctctccattagcaaaataattcattgttaggtaaacttcattagtgcaaattgcagatctgtgagcaatgtttcctattgaatataaactactgtctaaaatatacatatcagcagcccagcctttatcaggaaaattatacttggcaagttgctgaaaatgcacaaagttatgaaagttaaaggtatgctgcaaataactagccattattctatgtattattaaatatttactagttctgttaaaagcagagcagaagttagacactaaggatctctttgtgaactctgtgttctctatattagattgctgtttatatgtaagaattttattgcttatgtggcatacaatatttataactataaactttatagaagtacagtattaaagtcagtggtacacagacattctgtacatatcctgtgaaacgtgctgtcatatgaaataaatatatctgtctttac

SEQ ID NO: 434694 - DNA, 7027 bp, Homo sapiens
gaggaggagccggaggaagagggctgcctccgaagaaaggagaatggcgttcagtaaaggattccggatctatcacaaattggatcccccacctttcagcctcatagtggaaactaggcataaggaagaatgtctcatgttcgagtctggggctgtcgctgtgctctcatctgcagaaaaagaggcaatcaagggtacatactccaaagtactggatgcatatggactcttaggtgttctgcggttaaatcttggtgatactatgttacattatctggtcctagtcactggatgtatgtctgttggaaaaattcaagaatctgaagttttccgagttacttccactgagtttatatcactgcgaatcgattcttcagatgaggatcgcatttcagaagtgcggaaagttttgaattcaggaaacttttattttgcatggtctgcatctggcatcagtttagatttgagtcttaatgcgcatcgtagcatgcaagaacagacaactgataatagatttttctggaatcagtctttgcatttgcatctcaaacactatggcgtgaattgtgatgactggttattacgtcttatgtgtggaggagtagaaatcagaacaatttatgctgctcataaacaggcgaaggcttgcctcatttcaagattaagctgtgaacgagctgggaccaggtttaatgtccggggaacaaatgatgatggtcatgttgccaattttgtagaaacagaacaggttgtgtacttagatgactcagtttcttccttcatacaaatccgaggatctgttccattgttctgggagcaaccagggttgcaagtgggatctcatcgtgtccgtatgtcaaggggatttgaagccaatgcacctgcttttgacaggcattttagaacacttaagaacttatatggtagacaaataatagtaaatttgcttggatctaaggaaggtgaacatatgctaagtaaagctttccagagtcatttgaaagcttctgaacatgctgctgatatccagatggtgaattttgactatcatcaaatggttaagggaggaaaggcagaaaaattacatagtgttcttaaacctcaagtccagaagtttctagattatggatttttttatttcaatggaagtgaagttcaaagatgccagagtggtacagttcgaacaaactgcttggattgtcttgatagaacaaatagtgtgcaggcatttcttggcttagagatgctagctaaacagttggaagctcttggtttagctgaaaagcctcagttggtgactcgctttcaagaagtttttcggtcaatgtggtccgtgaatggtgattcaatcagtaagatatatgcaggaactggagctcttgaagggaaagcgaagttaaaagatggtgctcgctctgttacccgaacaattcagaataacttctttgacagctccaagcaagaggccattgatgttttgctactgggaaatactctgaatagtgatttagctgacaaagctcgagcacttttaactactggaagtttgcgtgtttctgagcagacattacagtcagcatcttctaaagtactaaagagcatgtgtgagaatttctacaaatattcaaagcctaagaaaattcgagtatgtgtcggaacctggaatgtgaatggtgggaagcaatttcgcagcatagcttttaagaatcagacactcactgactggcttcttgatgcacccaagttagctggcatccaggagtttcaagataaaagaagtaagccaactgatatatttgcaattggttttgaagaaatggtagaattgaatgctggaaacattgtgagtgcaagcacaacaaatcagaagctctgggctgtagaacttcagaagacaatctccagagacaacaagtatgtgctgctggcttctgaacagttggtgggcgtctgtttgtttgtttttatcagaccacagcatgctccttttatcagggatgttgcagttgatactgtgaagactggaatgggaggtgcaactggaaataagggagcagttgcaatccgaatgctcttccatacaaccagcctttgcttcgtctgtagccactttgctgcagggcagtcacaagtcaaagaaagaaatgaagattttatagaaatagcacgaaaattgagttttcctatgggaaggatgctattttcccatgactatgtattttggtgtggtgatttcaactatcgaatcgatctccctaacgaagaagttaaagagctcataagacagcaaaattgggattctcttatagcaggagatcaacttatcaatcagaaaaatgctggacaggtttttagaggatttttagaaggaaaggtaacctttgctccgacatataagtatgacttgttttctgacgactatgacaccagtgaaaagtgccgcacccctgcctggacagaccgtgtcctttggagaaggaggaaatggccttttgatagatcagctgaagatctagatcttctaaatgctagttttcaagatgaaagcaaaattctgtacacgtggactccaggcactttgctgcactatggaagagctgagctgaagacttctgaccacaggcctgtcgttgccctgattgatatagatatatttgaagttgaagctgaagagaggcaaaacatttataaagaagtaattgcagttcagggtccaccagatggtacagtattggtctcaatcaaaagttctttaccagaaaataatttttttgatgatgccttgattgatgagcttctgcagcagtttgcaagttttggtgaagttatacttataagatttgtagaagataaaatgtgggttacatttttggagggaagctctgccttgaatgttctgagcctaaatggtaaagagttattgaatcggactataactattgctttaaaaagtccagactggatcaaaaatttggaagaagaaatgagtttagagaaaattagcattgcattgccatcatcaacaagctctaccctgcttggtgaagatgcagaggttgcagcagattttgatatggaaggtgatgttgatgactatagtgctgaagtggaggaacttcttcctcagcatctccagccatcttcaagttccggccttggtacttcccccagctcttcaccccgaactagtccctgccagtcacctacaatatcagagggtcctgtaccttcccttcccatcagaccaagccgagcaccgtcaagaactcctgggcctcccagtgcacagagttctcctattgacgcgcagccagcaacgccgctgccgcagaaagaccccgcccagcccttggagcccaagcggccgccgccgccccgcccggtcgcccctcccacacgcccggctcccccacagagacctcctccgccttcaggggctaggagtcctgcacccactagaaaggaatttggaggtattggagcccctcccagtcctggggtagctaggagagagatggaagcacccaaaagccctggaacaacaaggaaagataatataggacgcagtcagccttcacctcaagcaggacttgcaggcccaggacctgctggatacagtacagccagaccgacgattcctcctcgtgctggagttatcagtgccccacagagccacgcgcgggcatctgctggaagactgactcctgaaagccaaagcaaaacatcagaaacgtcgaaaggttcaactttccttcctgaaccactgaagcctcaggctgcttttcctccgcagtcttctttgcccccgcctgctcaaaggttgcaagagcctcttgtccctgtggcagcacctatgcctcagtctggcccccagccaaatttggaaaccccaccacaaccaccacctcgaagcaggtcatcccatagcttgccttcagaagcttcctcacaaccgcaacaggagcaaccatcagggtaacaggtaaaaacaaatggaatctctgatggcaaaagagaatcaccattaaagattgacccatttgaagatctgtcatttaatctgcttgctgtatcaaaggctcagctatctgttcaaacgtcacctgttcccaccccagacccaaagaggttgattcagttgccttctgcaacgcaaagtaatgttaatactttgagttctgtaagttgcatgccaacaatgcctccaattccagctcggagtcaatcccaggaaaatatgcgaagttctccaaacccatttattactggcttgaccaggacaaatcctttcagtgacaggactgctgctcctggaaacccatttagagccaagtctgaagaatcagaggcaacttcatggttctccaaagaagagcccgttactatcagtcctttcccttctctgcagcctcttggtcataacaaaagcagggcttcatcttcacttgatggctttaaggacagttttgatctacagggccagtctacattaaaaattagcaacccgaaaggatgggtaaccttcgaggaagaagaggattttggtgtgaaagggaagtcaaagtcagcttgttcagacttactgggtaatcagccaagttcattttctggctccaacctgacattgaatgatgactggaataaaggtacaaatgtctccttctgtgtgttgccgtcaagaagacctcctccacctcctgtccctctgctcccgcccggcaccagccctccagtagatcctttcacgaccttggcctctaaggcttcacccacactggactttacagaaagataacgccatgcaatagaaaacagtgggtacttgcttttggcaggatagagctaagagaattgggcattagtatttcattatgtgcaataagtcattgtaagtgcactgatatcttcacaaaacaccactatttgatgtgtacagagttggactatgtgtatattggaaataaggaaaaacccttctcattgttaactggagttttgatgtatttctctttggatgaataggagacagtagtagccataaaaagtacttatactttagaaaacagtccttattcagaaacttttcggtcagtcttctgaagaatctcaaaaagcccacccaactttcagctgacatttccaccagccctctcatacttgttaacaattggtatctttgagtatttaccaaagagctgccaaggttacagtgaacagagttttgaaaggcattgctttaaaggaaaaaagtataggtatgtgtacatatataatacatacaaacacatgtacttctgtatacatttacatatttttacaattcatactttaatttctaggctataactcagaccaaattatacctaaaagttccaacaaagtccctttttcaatatcacattaccaaaaagatggctgcaaatgtaatttggacctttcattaattttgttttcaaaactagaataatctcaccacagaatcagaattttctaccgttccacacccaaccccttcaaatacacacaaccttgttacttttcactccagcaccttcatacgcttttctccaggaggaggttcttgcagctggaaacagcctattttgtggtcactgtcaagtggatggatattctagcgctcccaaaaaagcactatggccttatatgcagggaaggcacataccaccaagttcaatgagaaatattagagctaaccgtactctcttctctgcgtacgttcgagtatacgttgcccatatccctcccatattttctttttgctgcttttgctctggaactttgcttttagcagggaaagcagctgtcccctgagtgctttgaattgggaatatacccagtgtgtgttctcccccctcttacgaggctacataacacatctatgatgctgctttaagtttttagaggctatacctcaaagtagctgcggattttgtctcctgcactgccaatatgcaactgatcccgcttttattaattttttgaagaagtacacagaatttttacagaatgtagtattttgatatcattaagtaaaccaatcagaaaactccttgagcaatagttgtttctttgtcagtttcagttacaatcatctttacccattaagacttacattaacattccttttatataaagagttgtatatgtccacctaaattcctatgtccacacttaacctttaaagatgtacattgagggaatatcaaaaaatagcgttcatggctacgaatatgtagaatgttaaaagcacagcaaactgcactgcacttataaagcaaatctattagaaaaaaagcatttttctaaatgctcaaatgttatcaaaatactatatttatagaagtaatcttctctgttaacagccaagatttgctgttagaaataactcttgtgagttttatattgtgctttttggaggttctaatcatttcagcagtagcgtcttaaacagcagtattactataagcagttgcttcaaaatgtgaattaacttgttgaaactgtggctttaacatccatgtgactagtgtatatggtatttgctctccattagcaaaataattcattgttaggtaaacttcattagtgcaaattgcagatctgtgagcaatgtttcctattgaatataaactactgtctaaaatatacatatcagcagcccagcctttatcaggaaaattatacttggcaagttgctgaaaatgcacaaagttatgaaagttaaaggtatgctgcaaataactagccattattctatgtattattaaatatttactagttctgttaaaagcagagcagaagttagacactaaggatctctttgtgaactctgtgttctctatattagattgctgtttatatgtaagaattttattgcttatgtggcatacaatatttataactataaactttatagaagtacagtattaaagtcagtggtacacagacattctgtacatatcctgtgaaacgtgctgtcatatgaaataaatatatctgtctttac

SEQ ID NO: 434695 - DNA, 7658 bp, Homo sapiens
gagctgctgcggccagacccacgggcagccgggcgggcggacgcctccaagaccagtctctgcctccgcagcgtcagcgggagcgggctgcctccgaagaaaggagaatggcgttcagtaaaggattccggatctatcacaaattggatcccccacctttcagcctcatagtggaaactaggcataaggaagaatgtctcatgttcgagtctggggctgtcgctgtgctctcatctgcagaaaaagaggcaatcaagggtacatactccaaagtactggatgcatatggactcttaggtgttctgcggttaaatcttggtgatactatgttacattatctggtcctagtcactggatgtatgtctgttggaaaaattcaagaatctgaagttttccgagttacttccactgagtttatatcactgcgaatcgattcttcagatgaggatcgcatttcagaagtgcggaaagttttgaattcaggaaacttttattttgcatggtctgcatctggcatcagtttagatttgagtcttaatgcgcatcgtagcatgcaagaacagacaactgataatagatttttctggaatcagtctttgcatttgcatctcaaacactatggcgtgaattgtgatgactggttattacgtcttatgtgtggaggagtagaaatcagaacaatttatgctgctcataaacaggcgaaggcttgcctcatttcaagattaagctgtgaacgagctgggaccaggtttaatgtccggggaacaaatgatgatggtcatgttgccaattttgtagaaacagaacaggttgtgtacttagatgactcagtttcttccttcatacaaatccgaggatctgttccattgttctgggagcaaccagggttgcaagtgggatctcatcgtgtccgtatgtcaaggggatttgaagccaatgcacctgcttttgacaggcattttagaacacttaagaacttatatggtagacaaataatagtaaatttgcttggatctaaggaaggtgaacatatgctaagtaaagctttccagagtcatttgaaagcttctgaacatgctgctgatatccagatggtgaattttgactatcatcaaatggttaagggaggaaaggcagaaaaattacatagtgttcttaaacctcaagtccagaagtttctagattatggatttttttatttcaatggaagtgaagttcaaagatgccagagtggtacagttcgaacaaactgcttggattgtcttgatagaacaaatagtgtgcaggcatttcttggcttagagatgctagctaaacagttggaagctcttggtttagctgaaaagcctcagttggtgactcgctttcaagaagtttttcggtcaatgtggtccgtgaatggtgattcaatcagtaagatatatgcaggaactggagctcttgaagggaaagcgaagttaaaagatggtgctcgctctgttacccgaacaattcagaataacttctttgacagctccaagcaagaggccattgatgttttgctactgggaaatactctgaatagtgatttagctgacaaagctcgagcacttttaactactggaagtttgcgtgtttctgagcagacattacagtcagcatcttctaaagtactaaagagcatgtgtgagaatttctacaaatattcaaagcctaagaaaattcgagtatgtgtcggaacctggaatgtgaatggtgggaagcaatttcgcagcatagcttttaagaatcagacactcactgactggcttcttgatgcacccaagttagctggcatccaggagtttcaagataaaagaagtaagccaactgatatatttgcaattggttttgaagaaatggtagaattgaatgctggaaacattgtgagtgcaagcacaacaaatcagaagctctgggctgtagaacttcagaagacaatctccagagacaacaagtatgtgctgctggcttctgaacagttggtgggcgtctgtttgtttgtttttatcagaccacagcatgctccttttatcagggatgttgcagttgatactgtgaagactggaatgggaggtgcaactggaaataagggagcagttgcaatccgaatgctcttccatacaaccagcctttgcttcgtctgtagccactttgctgcagggcagtcacaagtcaaagaaagaaatgaagattttatagaaatagcacgaaaattgagttttcctatgggaaggatgctattttcccatgactatgtattttggtgtggtgatttcaactatcgaatcgatctccctaacgaagaagttaaagagctcataagacagcaaaattgggattctcttatagcaggagatcaacttatcaatcagaaaaatgctggacaggtttttagaggatttttagaaggaaaggtaacctttgctccgacatataagtatgacttgttttctgacgactatgacaccagtgaaaagtgccgcacccctgcctggacagaccgtgtcctttggagaaggaggaaatggccttttgatagatcagctgaagatctagatcttctaaatgctagttttcaagatgaaagcaaaattctgtacacgtggactccaggcactttgctgcactatggaagagctgagctgaagacttctgaccacaggcctgtcgttgccctgattgatatagatatatttgaagttgaagctgaagagaggcaaaacatttataaagaagtaattgcagttcagggtccaccagatggtacagtattggtctcaatcaaaagttctttaccagaaaataatttttttgatgatgccttgattgatgagcttctgcagcagtttgcaagttttggtgaagttatacttataagatttgtagaagataaaatgtgggttacatttttggagggaagctctgccttgaatgttctgagcctaaatggtaaagagttattgaatcggactataactattgctttaaaaagtccagactggatcaaaaatttggaagaagaaatgagtttagagaaaattagcattgcattgccatcatcaacaagctctaccctgcttggtgaagatgcagaggttgcagcagattttgatatggaaggtgatgttgatgactatagtgctgaagtggaggaacttcttcctcagcatctccagccatcttcaagttccggccttggtacttcccccagctcttcaccccgaactagtccctgccagtcacctacaatatcagagggtcctgtaccttcccttcccatcagaccaagccgagcaccgtcaagaactcctgggcctcccagtgcacagagttctcctattgacgcgcagccagcaacgccgctgccgcagaaagaccccgcccagcccttggagcccaagcggccgccgccgccccgcccggtcgcccctcccacacgcccggctcccccacagagacctcctccgccttcaggtgacaaccttttatttccatttctgctagatgtaaaattcttcactctattttaaaatgttttgcatgttttccaatctctagcttctggattttactgttttttctatcattattgctatttcttagcttttctctaaagaacatggtaggcgcaacagacaaggtagagtgtttgcagagtagattcctctaaggtgttttcacagctgcctttagctgccttctcaccagccagccagagaggtttattttgtttttgctaatttgatctagttaggcatgtaaactgttcttaggtaaaattaggtttaatttttttcaaaatcctcatttctggatgatttataagcataaaataattaaaatgtactaatttctgtaaaagtataataaaactggagagcatacgtattaatgtacaattgtatgtatttgtttaatgttcttttaaattaaatatagtgctgttacttcaattataagcatatgcattgaataatagtttttgtagtacgtagataatatgtaattcctgcatgatacttgatgtcatggatactatagcaatctttgacatttcacttctgtatttaatgtcatttcctttctgctgcctattttcttatgaactataaggggctaggagtcctgcacccactagaaaggaatttggagcacccaaaagccctggaacaacaaggaaagataatataggacgcagtcagccttcacctcaagcaggacttgcaggcccaggacctgctggatacagtacagccagaccgacgattcctcctcgtgctggagttatcagtgccccacagagccacgcgcgggcatctgctggaagactgactcctgaaagccaaagcaaaacatcagaaacgtcgaaaggttcaactttccttcctgaaccactgaagcctcaggctgcttttcctccgcagtcttctttgcccccgcctgctcaaaggttgcaagagcctcttgtccctgtggcagcacctatgcctcagtctggcccccagccaaatttggaaaccccaccacaaccaccacctcgaagcaggtcatcccatagcttgccttcagaagcttcctcacaaccgcaagtaaaaacaaatggaatctctgatggcaaaagagaatcaccattaaagattgacccatttgaagatctgtcatttaatctgcttgctgtatcaaaggctcagctatctgttcaaacgtcacctgttcccaccccagacccaaagaggttgattcagttgccttctgcaacgcaaagtaatgttaatactttgagttctgtaagttgcatgccaacaatgcctccaattccagctcggagtcaatcccaggaaaatatgcgaagttctccaaacccatttattactggcttgaccaggacaaatcctttcagtgacaggactgctgctcctggaaacccatttagagccaagtctgaagaatcagaggcaacttcatggttctccaaagaagagcccgttactatcagtcctttcccttctctgcagcctcttggtcataacaaaagcagggcttcatcttcacttgatggctttaaggacagttttgatctacagggccagtctacattaaaaattagcaacccgaaaggatgggtaaccttcgaggaagaagaggattttggtgtgaaagggaagtcaaagtcagcttgttcagacttactgggtaatcagccaagttcattttctggctccaacctgacattgaatgatgactggaataaaggtacaaatgtctccttctgtgtgttgccgtcaagaagacctcctccacctcctgtccctctgctcccgcccggcaccagccctccagtagatcctttcacgaccttggcctctaaggcttcacccacactggactttacagaaagataacgccatgcaatagaaaacagtgggtacttgcttttggcaggatagagctaagagaattgggcattagtatttcattatgtgcaataagtcattgtaagtgcactgatatcttcacaaaacaccactatttgatgtgtacagagttggactatgtgtatattggaaataaggaaaaacccttctcattgttaactggagttttgatgtatttctctttggatgaataggagacagtagtagccataaaaagtacttatactttagaaaacagtccttattcagaaacttttcggtcagtcttctgaagaatctcaaaaagcccacccaactttcagctgacatttccaccagccctctcatacttgttaacaattggtatctttgagtatttaccaaagagctgccaaggttacagtgaacagagttttgaaaggcattgctttaaaggaaaaaagtataggtatgtgtacatatataatacatacaaacacatgtacttctgtatacatttacatatttttacaattcatactttaatttctaggctataactcagaccaaattatacctaaaagttccaacaaagtccctttttcaatatcacattaccaaaaagatggctgcaaatgtaatttggacctttcattaattttgttttcaaaactagaataatctcaccacagaatcagaattttctaccgttccacacccaaccccttcaaatacacacaaccttgttacttttcactccagcaccttcatacgcttttctccaggaggaggttcttgcagctggaaacagcctattttgtggtcactgtcaagtggatggatattctagcgctcccaaaaaagcactatggccttatatgcagggaaggcacataccaccaagttcaatgagaaatattagagctaaccgtactctcttctctgcgtacgttcgagtatacgttgcccatatccctcccatattttctttttgctgcttttgctctggaactttgcttttagcagggaaagcagctgtcccctgagtgctttgaattgggaatatacccagtgtgtgttctcccccctcttacgaggctacataacacatctatgatgctgctttaagtttttagaggctatacctcaaagtagctgcggattttgtctcctgcactgccaatatgcaactgatcccgcttttattaattttttgaagaagtacacagaatttttacagaatgtagtattttgatatcattaagtaaaccaatcagaaaactccttgagcaatagttgtttctttgtcagtttcagttacaatcatctttacccattaagacttacattaacattccttttatataaagagttgtatatgtccacctaaattcctatgtccacacttaacctttaaagatgtacattgagggaatatcaaaaaatagcgttcatggctacgaatatgtagaatgttaaaagcacagcaaactgcactgcacttataaagcaaatctattagaaaaaaagcatttttctaaatgctcaaatgttatcaaaatactatatttatagaagtaatcttctctgttaacagccaagatttgctgttagaaataactcttgtgagttttatattgtgctttttggaggttctaatcatttcagcagtagcgtcttaaacagcagtattactataagcagttgcttcaaaatgtgaattaacttgttgaaactgtggctttaacatccatgtgactagtgtatatggtatttgctctccattagcaaaataattcattgttaggtaaacttcattagtgcaaattgcagatctgtgagcaatgtttcctattgaatataaactactgtctaaaatatacatatcagcagcccagcctttatcaggaaaattatacttggcaagttgctgaaaatgcacaaagttatgaaagttaaaggtatgctgcaaataactagccattattctatgtattattaaatatttactagttctgttaaaagcagagcagaagttagacactaaggatctctttgtgaactctgtgttctctatattagattgctgtttatatgtaagaattttattgcttatgtggcatacaatatttataactataaactttatagaagtacagtattaaagtcagtggtacacagacattctgtacatatcctgtgaaacgtgctgtcatatgaaataaatatatctgtctttac

SEQ ID NO: 434696 - DNA, 5449 bp, Homo sapiens
gagctgctgcggccagacccacgggcagccgggcgggcggacgcctccaagaccagtctctgcctccgcagcgtcagcgggagcgggctgcctccgaagaaaggagaatggcgttcagtaaaggattccggatctatcacaaattggatcccccacctttcagcctcatagtggaaactaggcataaggaagaatgtctcatgttcgagtctggggctgtcgctgtgctctcatctgcagaaaaagaggcaatcaagggtacatactccaaagtactggatgcatatggactcttaggtgttctgcggttaaatcttggtgatactatgttacattatctggtcctagtcactggatgtatgtctgttggaaaaattcaagaatctgaagttttccgagttacttccactgagtttatatcactgcgaatcgattcttcagatgaggatcgcatttcagaagtgcggaaagttttgaattcaggaaacttttattttgcatggtctgcatctggcatcagtttagatttgagtcttaatgcgcatcgtagcatgcaagaacagacaactgataatagatttttctggaatcagtctttgcatttgcatctcaaacactatggcgtgaattgtgatgactggttattacgtcttatgtgtggaggagtagaaatcagaacaatttatgctgctcataaacaggcgaaggcttgcctcatttcaagattaagctgtgaacgagctgggaccaggtttaatgtccggggaacaaatgatgatggtcatgttgccaattttgtagaaacagaacaggttgtgtacttagatgactcagtttcttccttcatacaaatccgaggatctgttccattgttctgggagcaaccagggttgcaagtgggatctcatcgtgtccgtatgtcaaggggatttgaagccaatgcacctgcttttgacaggcattttagaacacttaagaacttatatggtagacaaataatagtaaatttgcttggatctaaggaaggtgaacatatgctaagtaaagctttccagagtcatttgaaagcttctgaacatgctgctgatatccagatggtgaattttgactatcatcaaatggttaagggaggaaaggcagaaaaattacatagtgttcttaaacctcaagtccagaagtttctagattatggatttttttatttcaatggaagtgaagttcaaagatgccagagtggtacagttcgaacaaactgcttggattgtcttgatagaacaaatagtgtgcaggcatttcttggcttagagatgctagctaaacagttggaagctcttggtttagctgaaaagcctcagttggtgactcgctttcaagaagtttttcggtcaatgtggtccgtgaatggtgattcaatcagtaagatatatgcaggaactggagctcttgaagggaaagcgaagttaaaagatggtgctcgctctgttacccgaacaattcagaataacttctttgacagctccaagcaagaggccattgatgttttgctactgggaaatactctgaatagtgatttagctgacaaagctcgagcacttttaactactggaagtttgcgtgtttctgagcagacattacagtcagcatcttctaaagtactaaagagcatgtgtgagaatttctacaaatattcaaagcctaagaaaattcgagtatgtgtcggaacctggaatgtgaatggtgggaagcaatttcgcagcatagcttttaagaatcagacactcactgactggcttcttgatgcacccaagttagctggcatccaggagtttcaagataaaagaagtaagccaactgatatatttgcaattggttttgaagaaatggtagaattgaatgctggaaacattgtgagtgcaagcacaacaaatcagaagctctgggctgtagaacttcagaagacaatctccagagacaacaagtatgtgctgctggcttctgaacagttggtgggcgtctgtttgtttgtttttatcagaccacagcatgctccttttatcagggatgttgcagttgatactgtgaagactggaatgggaggtgcaactggaaataagggagcagttgcaatccgaatgctcttccatacaaccagcctttgcttcgtctgtagccactttgctgcagggcagtcacaagtcaaagaaagaaatgaagattttatagaaatagcacgaaaattgagttttcctatgggaaggatgctattttcccatgactatgtattttggtgtggtgatttcaactatcgaatcgatctccctaacgaagaagttaaagagctcataagacagcaaaattgggattctcttatagcaggagatcaacttatcaatcagaaaaatgctggacaggtttttagaggatttttagaaggaaaggtaacctttgctccgacatataagtatgacttgttttctgacgactatgacaccagtgaaaagtgccgcacccctgcctggacagaccgtgtcctttggagaaggaggaaatggccttttgatagatcagctgaagatctagatcttctaaatgctagttttcaagatgaaagcaaaattctgtacacgtggactccaggcactttgctgcactatggaagagctgagctgaagacttctgaccacaggcctgtcgttgccctgattgatatagatatatttgaagttgaagctgaagagaggcaaaacatttataaagaagtaattgcagttcagggtccaccagatggtacagtattggtctcaatcaaaagttctttaccagaaaataatttttttgatgatgccttgattgatgagcttctgcagcagtttgcaagttttggtgaagttatacttataagatttgtagaagataaaatgtgggttacatttttggagggaagctctgccttgaatgttctgagcctaaatggtaaagagttattgaatcggactataactattgctttaaaaagtccagactggatcaaaaatttggaagaagaaatgagtttagagaaaattagcattgcattgccatcatcaacaagctctaccctgcttggtgaagatgcagaggttgcagcagattttgatatggaaggtgatgttgatgactatagtgctgaagtggaggaacttcttcctcagcatctccagccatcttcaagttccggccttggtacttcccccagctcttcaccccgaactagtccctgccagtcacctacaatatcagagggtcctgtaccttcccttcccatcagaccaagccgagcaccgtcaagaactcctgggcctcccagtgcacagagttctcctattgacgcgcagccagcaacgccgctgccgcagaaagaccccgcccagcccttggagcccaagcggccgccgccgccccgcccggtcgcccctcccacacgcccggctcccccacagagacctcctccgccttcaggtgacaaccttttatttccatttctgctagatgtaaaattcttcactctattttaaaatgttttgcatgttttccaatctctagcttctggattttactgttttttctatcattattgctatttcttagcttttctctaaagaacatggtaggcgcaacagacaaggtagagtgtttgcagagtagattcctctaaggtgttttcacagctgcctttagctgccttctcaccagccagccagagaggtttattttgtttttgctaatttgatctagttaggcatgtaaactgttcttaggtaaaattaggtttaatttttttcaaaatcctcatttctggatgatttataagcataaaataattaaaatgtactaatttctgtaaaagtataataaaactggagagcatacgtattaatgtacaattgtatgtatttgtttaatgttcttttaaattaaatatagtgctgttacttcaattataagcatatgcattgaataatagtttttgtagtacgtagataatatgtaattcctgcatgatacttgatgtcatggatactatagcaatctttgacatttcacttctgtatttaatgtcatttcctttctgctgcctattttcttatgaactataaggggctaggagtcctgcacccactagaaaggaatttggaggtaaccatttacatttgttagcatgtgtgaatcgtggttcattaatgttttacacctgaaagacattttagatttgtttgataaaagtcaaaatgaatgacattctagtttaaaactaatccacaaataaaactaataaaggctttcatttcccaggtaggctgggattgttcatcaggcctaatttttttttaataaatgtggtcgattcatttacaaagatttaatacccaaaagttatattaattttaaaagtcattcaggtacagtaaatacagaacatttcccaagtatctgattagtgatacatttattttctagtggaaaagcttttggattagcaaagaactgtatgattttcttttcctttcttcataaggaaatttttattcacaaagggtcactttttgtttgaagtatagtttatttggtttacatgaaaactcacagagctcagttggagttatacatttgacaagtttatttaatctaaatctcaagaaaagatgagatgagttttcacaattcctcagaagaacttttacaaatccagtgttactaaggctcactgtgcatgtgtagcctggtctgtttctattgtagcttgcctagtgacatggctgagcaattcaggtcttactacagactgactttgcctgtgtgtagatcttaatgactgcgtgtgataagaatagctaaattatttcagcattacagcttctgccgaatacagctaagtgatcatttctccattgacctacagaaaacatttaatttttcccttttcaagctcctgcttttatagaaaacatttaatttttcccttttcaagctcctgcttttatttaaatttccatgataatttttgcttatcttctgctttaattaggaaaacatcctgtagaaaataaatttaaaatgaatctgtcaaaagttaggcaagccagtggattacagtgaaatctgtcttaattttaaaaattgctccccttcataattcttttgtaagtagtgtttgcaacatgttttttcatcctataaacaataattcctttacgtcattatagtacattagagtttttaaaattaatgcatcaaaaactaacttcaaaagacttacgtagtctcatagaaatttatgatttctttccttttgactatcaaatatcagagtttttacttgctctggatataaggagtaagatgatttttaaagcaaaggtcttcattaaacatattttttaaattccctactggtagtaattgcatacat

SEQ ID NO: 434697 - DNA, 305 bp, Homo sapiens
tgacttaagtgaggtcttctcaaaatgttttgtcactatactcaacattttaattgtaacttgtttttactaatgattctttgttttcttcttgttgcatccatagtttctgagcagacattacagtcaggtacagtatagaaaatcaatctataaataaaagcaattttttcttattttttctgaagtcgatattgtaaacaaataaagccatataattggaaactttctcattttgccatcagatcctaacaggataaattgatatcttgttttaatctgagaaaagaatttcaagcttgaga

SEQ ID NO: 434698 - DNA, 414 bp, Homo sapiens
aaggcttgccctcaaagtaccataccatgtgtacttaaatgattatgtatattcctcatttcctatgcacatggaactcttgaaatttcaaatctgcgatttagaattctttgtttcaaagggatgttgcagttgatactgtgaagactggaatgggaggtgcaactggaaataagggagcagttgcaatccgaatgctcttccatacaaccagcctttgcttcgtctgtagccactttgctgcagggcagtcacaagtcaaagaaagaaatgaagattttatagaaatagcacgaaaattgagttttcctatggtaagctcttgctgcttgttcttgaagataaagctttgaaatatattttaatttgccccaaattctacatcaatgtttttggaaatttaagatagttcct

SEQ ID NO: 434699 - DNA, 800 bp, Homo sapiens
ttctttacaaaaaggagagtttatttaagatgctgcccttgatagtcactcctactccttttggctccaagagtaatttatttcattttatccttcagctacctttctaatgagtttgaacatatttttaacactgtcttccataaggcagatatttggtaataacatatgcctgtcttctgtcttaatgatgggattttgttatagaaatccgaaagatctcatcataagataaccttatccacagtgacatctacagcgtgaagccctaaagtattgctactaggagcctcttgtgtaatttgacaaatgcagtcctgtctgttgctcagaagccacttgtctgccagactctaaggggcagcagtgccgcatcttgtgaccattcacacagctgactgtatgttttcaaggttcacgagagagttctatggggaatgccaccctaaaagtggtcccatgagtgagatatcaaactaaagtcaccacttgtctcccataaaggtctatctaaatattgtaatttttctctcttttggagtatttcattcaggactgataatacccttcatcattatacaaagcaaagtgctttgttttgttaccatctcatgcccccatttctgctggtaatgaagcagaacagcaagctgatgttatgcaatattgcttaattgttaacttacaactaatttttttttcccttcttgcttcaaagcacccaaaagccctggaacaacaaggaaagataatataggtaaaaacacttgaatgtagctattcacccttaaaactggacc

SEQ ID NO: 434700 - DNA, 6941 bp, Homo sapiens
gagctgctgcggccagacccacgggcagccgggcgggcggacgcctccaagaccagtctctgcctccgcagcgtcagcgggagcgggctgcctccgaagaaaggagaatggcgttcagtaaaggattccggatctatcacaaattggatcccccacctttcagcctcatagtggaaactaggcataaggaagaatgtctcatgttcgagtctggggctgtcgctgtgctctcatctgcagaaaaagaggcaatcaagggtacatactccaaagtactggatgcatatggactcttaggtgttctgcggttaaatcttggtgatactatgttacattatctggtcctagtcactggatgtatgtctgttggaaaaattcaagaatctgaagttttccgagttacttccactgagtttatatcactgcgaatcgattcttcagatgaggatcgcatttcagaagtgcggaaagttttgaattcaggaaacttttattttgcatggtctgcatctggcatcagtttagatttgagtcttaatgcgcatcgtagcatgcaagaacagacaactgataatagatttttctggaatcagtctttgcatttgcatctcaaacactatggcgtgaattgtgatgactggttattacgtcttatgtgtggaggagtagaaatcagaacaatttatgctgctcataaacaggcgaaggcttgcctcatttcaagattaagctgtgaacgagctgggaccaggtttaatgtccggggaacaaatgatgatggtcatgttgccaattttgtagaaacagaacaggttgtgtacttagatgactcagtttcttccttcatacaaatccgaggatctgttccattgttctgggagcaaccagggttgcaagtgggatctcatcgtgtccgtatgtcaaggggatttgaagccaatgcacctgcttttgacaggcattttagaacacttaagaacttatatggtagacaaataatagtaaatttgcttggatctaaggaaggtgaacatatgctaagtaaagctttccagagtcatttgaaagcttctgaacatgctgctgatatccagatggtgaattttgactatcatcaaatggttaagggaggaaaggcagaaaaattacatagtgttcttaaacctcaagtccagaagtttctagattatggatttttttatttcaatggaagtgaagttcaaagatgccagagtggtacagttcgaacaaactgcttggattgtcttgatagaacaaatagtgtgcaggcatttcttggcttagagatgctagctaaacagttggaagctcttggtttagctgaaaagcctcagttggtgactcgctttcaagaagtttttcggtcaatgtggtccgtgaatggtgattcaatcagtaagatatatgcaggaactggagctcttgaagggaaagcgaagttaaaagatggtgctcgctctgttacccgaacaattcagaataacttctttgacagctccaagcaagaggccattgatgttttgctactgggaaatactctgaatagtgatttagctgacaaagctcgagcacttttaactactggaagtttgcgtgtttctgagcagacattacagtcagcatcttctaaagtactaaagagcatgtgtgagaatttctacaaatattcaaagcctaagaaaattcgagtatgtgtcggaacctggaatgtgaatggtgggaagcaatttcgcagcatagcttttaagaatcagacactcactgactggcttcttgatgcacccaagttagctggcatccaggagtttcaagataaaagaagtaagccaactgatatatttgcaattggttttgaagaaatggtagaattgaatgctggaaacattgtgagtgcaagcacaacaaatcagaagctctgggctgtagaacttcagaagacaatctccagagacaacaagtatgtgctgctggcttctgaacagttggtgggcgtctgtttgtttgtttttatcagaccacagcatgctccttttatcagggatgttgcagttgatactgtgaagactggaatgggaggtgcaactggaaataagggagcagttgcaatccgaatgctcttccatacaaccagcctttgcttcgtctgtagccactttgctgcagggcagtcacaagtcaaagaaagaaatgaagattttatagaaatagcacgaaaattgagttttcctatgggaaggatgctattttcccatgactatgtattttggtgtggtgatttcaactatcgaatcgatctccctaacgaagaagttaaagagctcataagacagcaaaattgggattctcttatagcaggagatcaacttatcaatcagaaaaatgctggacaggtttttagaggatttttagaaggaaaggtaacctttgctccgacatataagtatgacttgttttctgacgactatgacaccagtgaaaagtgccgcacccctgcctggacagaccgtgtcctttggagaaggaggaaatggccttttgatagatcagctgaagatctagatcttctaaatgctagttttcaagatgaaagcaaaattctgtacacgtggactccaggcactttgctgcactatggaagagctgagctgaagacttctgaccacaggcctgtcgttgccctgattgatatagatatatttgaagttgaagctgaagagaggcaaaacatttataaagaagtaattgcagttcagggtccaccagatggtacagtattggtctcaatcaaaagttctttaccagaaaataatttttttgatgatgccttgattgatgagcttctgcagcagtttgcaagttttggtgaagttatacttataagatttgtagaagataaaatgtgggttacatttttggagggaagctctgccttgaatgttctgagcctaaatggtaaagagttattgaatcggactataactattgctttaaaaagtccagactggatcaaaaatttggaagaagaaatgagtttagagaaaattagcattgcattgccatcatcaacaagctctaccctgcttggtgaagatgcagaggttgcagcagattttgatatggaaggtgatgttgatgactatagtgctgaagtggaggaacttcttcctcagcatctccagccatcttcaagttccggccttggtacttcccccagctcttcaccccgaactagtccctgccagtcacctacaatatcagagggtcctgtaccttcccttcccatcagaccaagccgagcaccgtcaagaactcctgggcctcccagtgcacagagttctcctattgacgcgcagccagcaacgccgctgccgcagaaagaccccgcccagcccttggagcccaagcggccgccgccgccccgcccggtcgcccctcccacacgcccggctcccccacagagacctcctccgccttcaggacgcagtcagccttcacctcaagcaggacttgcaggcccaggacctgctggatacagtacagccagaccgacgattcctcctcgtgctggagttatcagtgccccacagagccacgcgcgggcatctgctggaagactgactcctgaaagccaaagcaaaacatcagaaacgtcgaaaggttcaactttccttcctgaaccactgaagcctcaggctgcttttcctccgcagtcttctttgcccccgcctgctcaaaggttgcaagagcctcttgtccctgtggcagcacctatgcctcagtctggcccccagccaaatttggaaaccccaccacaaccaccacctcgaagcaggtcatcccatagcttgccttcagaagcttcctcacaaccgcaagtaaaaacaaatggaatctctgatggcaaaagagaatcaccattaaagattgacccatttgaagatctgtcatttaatctgcttgctgtatcaaaggctcagctatctgttcaaacgtcacctgttcccaccccagacccaaagaggttgattcagttgccttctgcaacgcaaagtaatgttaatactttgagttctgtaagttgcatgccaacaatgcctccaattccagctcggagtcaatcccaggaaaatatgcgaagttctccaaacccatttattactggcttgaccaggacaaatcctttcagtgacaggactgctgctcctggaaacccatttagagccaagtctgaagaatcagaggcaacttcatggttctccaaagaagagcccgttactatcagtcctttcccttctctgcagcctcttggtcataacaaaagcagggcttcatcttcacttgatggctttaaggacagttttgatctacagggccagtctacattaaaaattagcaacccgaaaggatgggtaaccttcgaggaagaagaggattttggtgtgaaagggaagtcaaagtcagcttgttcagacttactgggtaatcagccaagttcattttctggctccaacctgacattgaatgatgactggaataaaggtacaaatgtctccttctgtgtgttgccgtcaagaagacctcctccacctcctgtccctctgctcccgcccggcaccagccctccagtagatcctttcacgaccttggcctctaaggcttcacccacactggactttacagaaagataacgccatgcaatagaaaacagtgggtacttgcttttggcaggatagagctaagagaattgggcattagtatttcattatgtgcaataagtcattgtaagtgcactgatatcttcacaaaacaccactatttgatgtgtacagagttggactatgtgtatattggaaataaggaaaaacccttctcattgttaactggagttttgatgtatttctctttggatgaataggagacagtagtagccataaaaagtacttatactttagaaaacagtccttattcagaaacttttcggtcagtcttctgaagaatctcaaaaagcccacccaactttcagctgacatttccaccagccctctcatacttgttaacaattggtatctttgagtatttaccaaagagctgccaaggttacagtgaacagagttttgaaaggcattgctttaaaggaaaaaagtataggtatgtgtacatatataatacatacaaacacatgtacttctgtatacatttacatatttttacaattcatactttaatttctaggctataactcagaccaaattatacctaaaagttccaacaaagtccctttttcaatatcacattaccaaaaagatggctgcaaatgtaatttggacctttcattaattttgttttcaaaactagaataatctcaccacagaatcagaattttctaccgttccacacccaaccccttcaaatacacacaaccttgttacttttcactccagcaccttcatacgcttttctccaggaggaggttcttgcagctggaaacagcctattttgtggtcactgtcaagtggatggatattctagcgctcccaaaaaagcactatggccttatatgcagggaaggcacataccaccaagttcaatgagaaatattagagctaaccgtactctcttctctgcgtacgttcgagtatacgttgcccatatccctcccatattttctttttgctgcttttgctctggaactttgcttttagcagggaaagcagctgtcccctgagtgctttgaattgggaatatacccagtgtgtgttctcccccctcttacgaggctacataacacatctatgatgctgctttaagtttttagaggctatacctcaaagtagctgcggattttgtctcctgcactgccaatatgcaactgatcccgcttttattaattttttgaagaagtacacagaatttttacagaatgtagtattttgatatcattaagtaaaccaatcagaaaactccttgagcaatagttgtttctttgtcagtttcagttacaatcatctttacccattaagacttacattaacattccttttatataaagagttgtatatgtccacctaaattcctatgtccacacttaacctttaaagatgtacattgagggaatatcaaaaaatagcgttcatggctacgaatatgtagaatgttaaaagcacagcaaactgcactgcacttataaagcaaatctattagaaaaaaagcatttttctaaatgctcaaatgttatcaaaatactatatttatagaagtaatcttctctgttaacagccaagatttgctgttagaaataactcttgtgagttttatattgtgctttttggaggttctaatcatttcagcagtagcgtcttaaacagcagtattactataagcagttgcttcaaaatgtgaattaacttgttgaaactgtggctttaacatccatgtgactagtgtatatggtatttgctctccattagcaaaataattcattgttaggtaaacttcattagtgcaaattgcagatctgtgagcaatgtttcctattgaatataaactactgtctaaaatatacatatcagcagcccagcctttatcaggaaaattatacttggcaagttgctgaaaatgcacaaagttatgaaagttaaaggtatgctgcaaataactagccattattctatgtattattaaatatttactagttctgttaaaagcagagcagaagttagacactaaggatctctttgtgaactctgtgttctctatattagattgctgtttatatgtaagaattttattgcttatgtggcatacaatatttataactataaactttatagaagtacagtattaaagtcagtggtacacagacattctgtacatatcctgtgaaacgtgctgtcatatgaaataaatatatctgtctttac

SEQ ID NO: 434701 - DNA, 826 bp, Homo sapiens
ctcataggatgtattttagtgataaatgagctttgaaatgtgaaccctcatttttgacagagagggcagcattgcatatacaaaaacaggagatttgaggccaaacagacctgagttggaaacccagtcccatcactgactagccatgaacctcagttttctcatttataaaatgggcctaacaccatcgagtgttgtagctggtgtgtgtaaagcaagcatgaaaggcacattttaggcattagaaatgcttgcttcctctctcctgcccattaatccagggtcttcctttgagaggagcagctcacagggacatgggtgctggatgagatgaaccagagtgcgcataatctcaaactttggggtgtttatgtagccataggacttacctcacccctaactggatgcttgtcttgttccctcgcaggtcctcgagaggttgcagcaaagaggatttgaaatcgtgggctcctgtgggggaggagtagactcgtcccagttcagcgaatacgtccttcggcgggaactgaggcggacgccccgtgtaccctccgtcatccggataaagcaagagcctctggactaaatggacatatttcttatgcaaaaaggaaaacacacacaaccaataactcaaacaaaaaagggacatttatgtgcagttgggacagcaaaccaagtcctggacgtaaaatcgaataaaagacacatttatatccaatagagaccacacctgtattcatatgggaacaattggaatagtgatatcctcaaggtgtaaaaaatatataaatatatatatatatgtcaaaaggtaggaaatgca

SEQ ID NO: 434702 - DNA, 2014 bp, Homo sapiens
gtggtggtggtttccgtgaacacgaccccctgcctcttcttccagaagccaatgggacagaagcaccaattctcccacaatagtttcacctgctattgtttcccccacccaggacagtcggcccaatatgtcaagacctctgatcactagatcccctgcatctccactgaacaaccaaggcatccctactccagcacaactcacaaaatccaatgcgcctgtccacattgatgtgggcggccacatgtacaccagcagcctggccaccctcaccaaataccctgaatccagaatcggaagactttttgatggtacagagcccattgttttggacagtctcaaacagcactatttcattgacagagatggacagatgttcagatatatcttgaattttctacgaacatccaaactcctcattcctgatgatttcaaggactacactttgttatatgaagaggcaaaatattttcagcttcagcccatgttgttggagatggaaagatggaagcaggacagagaaactggtcgattttcaaggccctgtgagtgcctcgtcgtgcgtgtggccccagacctcggagaaaggatcacgctaagcggtgacaaatccttgatagaagaagtatttccagagatcggcgacgtgatgtgtaactctgtcaatgcaggctggaatcacgactcgacgcacgtcatcaggtttccactaaatggctactgtcacctcaactcagtccaggtcctcgagaggttgcagcaaagaggatttgaaatcgtgggctcctgtgggggaggagtagactcgtcccagttcagcgaatacgtccttcggcgggaactgaggcggacgccccgtgtaccctccgtcatccggataaagcaagagcctctggactaaatggacatatttcttatgcaaaaaggaaaacacacacaaccaataactcaaacaaaaaagggacatttatgtgcagttgggacagcaaaccaagtcctggacgtaaaatcgaataaaagacacatttatatccaatagagaccacacctgtattcatatgggaacaattggaatagtgatatcctcaaggtgtaaaaaatatataaatatatatatatatgtcaaaaggtaggaaatgcaaaaaagaaaaaaaaaaaaggtgacagccgcagttggtgctgtgatggccgtgaagtgtcctgggcctcccgaggcctctgacaaataaacaagccatgagtggtgaggacacagtctccttacagtttccattgccaacaacagccatccatatttcttttttcctttgtctttctttttcctttttttttaaaaaaacaaaacaaacaaaacaccttgaatcaagtttgtttgtatatggaggttccacgtctttctttaggcagggaccaggcaggacttcagaaaaaccctcatgagcacattgcaaagatgttagacatgaaattttaaatgtagtttgtacagaagtcacacttttttgtccacctcacagatgtgaactttactttgttttaaaactgatcagttttgccaaggggccagaattattccttgttagaattgctccagttcaagtctgctgctttcctacaatttttcaaattttataatgtattaaatacaataaactctgtttaaaaaataaggtctgtgtgaaacacacatgtgggggtgaggctggattaaagtgaaattttttctttttgaaaaaaaaaatccacatacaaacaacaacaacactctttttgggccgcccggccccaaaaaaaagttttcaaaaacccaatcggttagggcgccggcgggcgcccagagggtaggtacaacctgggccatacggggtccccaaagaaaaccccggggccaaagactacgggctgggttccccccaataaaaaacgccgggggaacacgagcggtctgaacaatcccagaggatccagaggccaaagggggccatcaacaggggccaacgaggtcgatttaatc

SEQ ID NO: 434703 - DNA, 2001 bp, Homo sapiens
agctctttggctgcttttccagtttccgaggtgcccgcccccgcgcgcctgaggcagcgcagcccggagggcgaacgaatggcggttggcaaactttgagacagtcggcccaatatgtcaagacctctgatcactagatcccctgcatctccactgaacaaccaaggcatccctactccagcacaactcacaaaatccaatgcgcctgtccacattgatgtgggcggccacatgtacaccagcagcctggccaccctcaccaaataccctgaatccagaatcggaagactttttgatggtacagagcccattgttttggacagtctcaaacagcactatttcattgacagagatggacagatgttcagatatatcttgaattttctacgaacatccaaactcctcattcctgatgatttcaaggactacactttgttatatgaagaggcaaaatattttcagcttcagcccatgttgttggagatggaaagatggaagcaggacagagaaactggtcgattttcaaggccctgtgagtgcctcgtcgtgcgtgtggccccagacctcggagaaaggatcacgctaagcggtgacaaatccttgatagaagaagtatttccagagatcggcgacgtgatgtgtaactctgtcaatgcaggctggaatcacgactcgacgcacgtcatcaggtttccactaaatggctactgtcacctcaactcagtccaggtcctcgagaggttgcagcaaagaggatttgaaatcgtgggctcctgtgggggaggagtagactcgtcccagttcagcgaatacgtccttcggcgggaactgaggcggacgccccgtgtaccctccgtcatccggataaagcaagagcctctggactaaatggacatatttcttatgcaaaaaggaaaacacacacaaccaataactcaaacaaaaaagggacatttatgtgcagttgggacagcaaaccaagtcctggacgtaaaatcgaataaaagacacatttatatccaatagagaccacacctgtattcatatgggaacaattggaatagtgatatcctcaaggtgtaaaaaatatataaatatatatatatatgtcaaaaggtaggaaatgcaaaaaagaaaaaaaaaaaaggtgacagccgcagttggtgctgtgatggccgtgaagtgtcctgggcctcccgaggcctctgacaaataaacaagccatgagtggtgaggacacagtctccttacagtttccattgccaacaacagccatccatatttcttttttcctttgtctttctttttcctttttttttaaaaaaacaaaacaaacaaaacaccttgaatcaagtttgtttgtatatggaggttccacgtctttctttaggcagggaccaggcaggacttcagaaaaaccctcatgagcacattgcaaagatgttagacatgaaattttaaatgtagtttgtacagaagtcacacttttttgtccacctcacagatgtgaactttactttgttttaaaactgatcagttttgccaaggggccagaattattccttgttagaattgctccagttcaagtctgctgctttcctacaatttttcaaattttataatgtattaaatacaataaactctgtttaaaaaataaggtctgtgtgaaacacacatgtgggggtgaggctggattaaagtgaaattttttctttttgaaaaaaaaaatccacatacaaacaacaacaacactctttttgggccgcccggccccaaaaaaaagttttcaaaaacccaatcggttagggcgccggcgggcgcccagagggtaggtacaacctgggccatacggggtccccaaagaaaaccccggggccaaagactacgggctgggttccccccaataaaaaacgccgggggaacacgagcggtctgaacaatcccagaggatccagaggccaaagggggccatcaacaggggccaacgaggtcgatttaatc

SEQ ID NO: 434704 - DNA, 1570 bp, Homo sapiens
accggcgcggacttgccccagacctacggggagcgccccaggtctttaatgacagcttaaatgtggctgttggaaaagtcgaaagggatgtggctgacgtggggcgtgtttcgctcctttgcaagagtcggaaagggagttgggagccgcgcggctggccccaggcccccgcgcctcgccgccagcaagtaggtgggggagccgccgccgccgccagccccatcccgctcccaagcctcgcccgctgcgccctggccgcgggcgccgagagggtgcggggcctcgccgtgcctcctccaccctgctcattaacctgcctgctccgctccgctccgggcggccccagacacgggtttcccgcggcagcacccgcggcccgcccggcgcagccgccgccccgaccccccggctccggggggcaatgagggggcagtggaaggggcactgctcctcgggcattacttagagaaacgagaccgtcccgccctctcgccggccctccctctctcccgcccgggcccgcgcaattctccgccagagggacagtcggcccaatatgtcaagacctctgatcactagatcccctgcatctccactgaacaaccaaggcatccctactccagcacaactcacaaaatccaatgcgcctgtccacattgatgtgggcggccacatgtacaccagcagcctggccaccctcaccaaataccctgaatccagaatcggaagactttttgatggtacagagcccattgttttggacagtctcaaacagcactatttcattgacagagatggacagatgttcagatatatcttgaattttctacgaacatccaaactcctcattcctgatgatttcaaggactacactttgttatatgaagaggcaaaatattttcagcttcagcccatgttgttggagatggaaagatggaagcaggacagagaaactggtcgattttcaaggccctgtgagtgcctcgtcgtgcgtgtggccccagacctcggagaaaggatcacgctaagcggtgacaaatccttgatagaagaagtatttccagagatcggcgacgtgatgtgtaactctgtcaatgcaggctggaatcacgactcgacgcacgtcatcaggtttccactaaatggctactgtcacctcaactcagtccaggtcctcgagaggttgcagcaaagaggatttgaaatcgtgggctcctgtgggggaggagtagactcgtcccagttcagcgaatacgtccttcggcgggaactgaggcggacgccccgtgtaccctccgtcatccggataaagcaagagcctctggactaaatggacatatttcttatgcaaaaaggaaaacacacacaaccaataactcaaacaaaaaagggacatttatgtgcagttgggacagcaaaccaagtcctggacgtaaaatcgaataaaagacacatttatatccaatagagaccacacctgtattcatatgggaacaattggaatagtgatatcctcaaggtgtaaaaaatatataaatatatatatatatgtcaaaaggtaggaaatgca

SEQ ID NO: 434705 - DNA, 1873 bp, Homo sapiens
gtggtggtggtttccgtgaacacgaccccctgcctcttcttccagaagccaatgggacagaagcaccaattctcccacaatagtttcacctgctattgtttcccccacccaggtaaccaaaccaaactctatgcatgaaatgtttctttggtaccacttcgggactaacttttgtgctaatgcagctctgggtaggggggaagttttaaaaagtaggtaatgtactgaatcggatttcgtttcacccttagaagttaactctcttggtgctttttgggaaactttacacctaaccttaaaagatgtgagagagggcatgctacctaacaaatcactgctgtgcagtaaggcgaaaaacttcaaagttcgccgaacaaaaggattagctcactcttgcagccgctcttcattgaatgcatgagttttataaggcaaagactgcgagaacactgtaaatgtaaaggaagcagttacttaagacatatttgaatcaagtaacccttaaaagactctattacgtattcgccatgaccttagaaggtagaaaaacagttataaattattgaaaagaaaacgtgccaatcccacttcctgtagcttttttttttttttttaaagaaaaggggtggagagtggagagccaggcagttgagtgccagtttatactgtaacatgtagttgaatgtaaactggcagtgtggggtgcaatttccataaactaaagtgggaacgtggtatctgcaattccagtcaggctacaaattggagtatgggcctgtggtgcccagcactgtgggcactgaaacattgctgtctccccctagccccacggagctcactatctagggggcagataatacctacgaagtagataattagagtaagagtgctatcccagcagctgagtcagcatggacaaatcacttcacttctccttggcttcactatcctcatcaaagaggaagaaactatttccaccctaacatgatttaagtctaagcagtgccaaattctgggtcgagactggggcctctagtgttagattcttctttccttattttccccaaggtagtattttcgtgagtattattaaagttatattcatgttttggacactctctagtctaggagtcagaaaccaggggtctttggacactgtgttctattctgcaggcaggagtacccactggaggttttacaactttgacctgcctgccatcaagcagaagtaggaattttgcaggtctgaaggtatagtgcaggccctccaggaacatatgtcaggtacctctgtgctttttccaaagtggaaattccagttctggacacactgaccctttcaaacgtttaccagctaatgggcaagcctcaaggccaactgagaaaggggctgcgagtggtaatataaacaccaaagttctctaaaatacacaagacctgtaggctatgtgtcttctgtacttcaggtgtgtagtctatttctgacaggttgtgttagtgaattttaagaatggagaggagaatttagggtttgctttttctttgaaagcaaaaataaatgttcatattcttctgatacagtaaaaacccttgaaatgccctaatttagaatagcacctgattaattaagagttaaaagtctaagaaagtttattaaggcgtgcatggccttgggataacaatgaaaccatttgtctactggcatctgtctgctggtttcttgacaccagtgtaatatagaattgtgacgtaaagaaccacaaaatataagagggtttcgtttcattggttttgttttgttctaaggaatgcagtctttcagtcattatcttttatttacctgagtaaaataaatcagttccaaaaaactgta

SEQ ID NO: 434706 - DNA, 1699 bp, Homo sapiens
ctcataggatgtattttagtgataaatgagctttgaaatgtgaaccctcatttttgacagagagggcagcattgcatatacaaaaacaggagatttgaggccaaacagacctgagttggaaacccagtcccatcactgactagccatgaacctcagttttctcatttataaaatgggcctaacaccatcgagtgttgtagctggtgtgtgtaaagcaagcatgaaaggcacattttaggcattagaaatgcttgcttcctctctcctgcccattaatccagggtcttcctttgagaggagcagctcacagggacatgggtgctggatgagatgaaccagagtgcgcataatctcaaactttggggtgtttatgtagccataggacttacctcacccctaactggatgcttgtcttgttccctcgcaggtcctcgagaggttgcagcaaagaggatttgaaatcgtgggctcctgtgggggaggagtagactcgtcccagttcagcgaatacgtccttcggcgggaactgaggcggacgccccgtgtaccctccgtcatccggataaagcaagagcctctggactaaatggacatatttcttatgcaaaaaggaaaacacacacaaccaataactcaaacaaaaaagggacatttatgtgcagttgggacagcaaaccaagtcctggacgtaaaatcgaataaaagacacatttatatccaatagagaccacacctgtattcatatgggaacaattggaatagtgatatcctcaaggtgtaaaaaatatataaatatatatatatatgtcaaaaggtaggaaatgcaaaaaagaaaaaaaaaaaaggtgacagccgcagttggtgctgtgatggccgtgaagtgtcctgggcctcccgaggcctctgacaaataaacaagccatgagtggtgaggacacagtctccttacagtttccattgccaacaacagccatccatatttcttttttcctttgtctttctttttcctttttttttaaaaaaacaaaacaaacaaaacaccttgaatcaagtttgtttgtatatggaggttccacgtctttctttaggcagggaccaggcaggacttcagaaaaaccctcatgagcacattgcaaagatgttagacatgaaattttaaatgtagtttgtacagaagtcacacttttttgtccacctcacagatgtgaactttactttgttttaaaactgatcagttttgccaaggggccagaattattccttgttagaattgctccagttcaagtctgctgctttcctacaatttttcaaattttataatgtattaaatacaataaactctgtttaaaaaataaggtctgtgtgaaacacacatgtgggggtgaggctggattaaagtgaaattttttctttttgaaaaaaaaaatccacatacaaacaacaacaacactctttttgggccgcccggccccaaaaaaaagttttcaaaaacccaatcggttagggcgccggcgggcgcccagagggtaggtacaacctgggccatacggggtccccaaagaaaaccccggggccaaagactacgggctgggttccccccaataaaaaacgccgggggaacacgagcggtctgaacaatcccagaggatccagaggccaaagggggccatcaacaggggccaacgaggtcgatttaatc

SEQ ID NO: 434707 - DNA, 2452 bp, Homo sapiens
gtggtggtggtttccgtgaacacgaccccctgcctcttcttccagaagccaatgggacagaagcaccaattctcccacaatagtttcacctgctattgtttcccccacccaggtaaccaaaccaaactctatgcatgaaatgtttctttggtaccacttcgggactaacttttgtgctaatgcagctctgggtaggggggaagttttaaaaagtaggtaatgtactgaatcggatttcgtttcacccttagaagttaactctcttggtgctttttgggaaactttacacctaaccttaaaagatgtgagagagggcatgctacctaacaaatcactgctgtgcagtaaggcgaaaaacttcaaagttcgccgaacaaaaggattagctcactcttgcagccgctcttcattgaatgcatgagttttataaggcaaagactgcgagaacactgtaaatgtaaaggaagcagttacttaagacatatttgaatcaagtaacccttaaaagactctattacgtattcgccatgaccttagaaggtagaaaaacagttataaattattgaaaagaaaacgtgccaatcccacttcctgtagcttttttttttttttttaaagaaaaggggtggagagtggagagccaggcagttgagtgccagtttatactgtaacatgtagttgaatgtaaactggcagtgtggggtgcaatttccataaactaaagtgggaacgtggtatctgcaattccagtcaggctacaaattggagtatgggcctgtggtgcccagcactgtgggcactgaaacattgctgtctccccctagccccacggagctcactatctagggggcagataatacctacgaagtagataattagagtaagagtgctatcccagcagctgagtcagcatggacaaatcacttcacttctccttggcttcactatcctcatcaaagaggaagaaactatttccaccctaacatgatttaagtctaagcagtgccaaattctgggtcgagactggggcctctagtgttagattcttctttccttattttccccaaggtagtattttcgtgagtattattaaagttatattcatgttttggacactctctagtctaggagtcagaaaccaggggtctttggacactgtgttctattctgcaggcaggagtacccactggaggttttacaactttgacctgcctgccatcaagcagaagtaggaattttgcaggtctgaaggtatagtgcaggccctccaggaacatatgtcaggtacctctgtgctttttccaaagtggaaattccagttctggacacactgaccctttcaaacgtttaccagctaatgggcaagcctcaaggccaactgagaaaggggctgcgagtggtaatataaacaccaaagttctctaaaatacacaagacctgtaggctatgtgtcttctgtacttcaggtgtgtagtctatttctgacaggttgtgttagtgaattttaagaatggagaggagaatttagggtttgctttttctttgaaagcaaaaataaatgttcatattcttctgatacagtaaaaacccttgaaatgccctaatttagaatagcacctgattaattaagagttaaaagtctaagaaagtttattaaggcgtgcatggccttgggataacaatgaaaccatttgtctactggcatctgtctgctggtttcttgacaccagtgtaatatagaattgtgacgtaaagaaccacaaaatataagagggtttcgtttcattggttttgttttgttctaaggaatgcagtctttcagtcattatcttttatttacctgagtaaaataaatcagttccaaaaaactgtatactgatgcttttattattcttgcattattgtcaggtaactcctaagttaaatatagatttgagtgtccatatatggcttatatgattattatggctctcaaacaagatcttagctccaagtccctgttagttaaaacactacaaaaagttttcagtttgcacatttttagtagtcagcttttcacttatgaagtctgagcagtcgaagtattgctcagtagaaagctgagagcaaactttttccttctttgtatattaaaatcactgtaagagttgaggttcagtgcatttcctggggcttaatgcctagctgaggttgctggcctgtggcattgctttgggtcatcaactcttctggctggtcattaatccgcaggaaatgccctgtgcagctccagcttcagtcattattacttaatcataaacataggctctctagcctaatactgactggactttatcaagtagtgtcatacggaattccactgttgaccatcttagagacatctcgataacagacaggtcacacactgatgttttgattttctactaatgttgcaagtttccctaaagatgaa

SEQ ID NO: 434708 - DNA, 2443 bp, Homo sapiens
accggcgcggacttgccccagacctacggggagcgccccaggtctttaatgacagcttaaatgtggctgttggaaaagtcgaaagggatgtggctgacgtggggcgtgtttcgctcctttgcaagagtcggaaagggagttgggagccgcgcggctggccccaggcccccgcgcctcgccgccagcaagtaggtgggggagccgccgccgccgccagccccatcccgctcccaagcctcgcccgctgcgccctggccgcgggcgccgagagggtgcggggcctcgccgtgcctcctccaccctgctcattaacctgcctgctccgctccgctccgggcggccccagacacgggtttcccgcggcagcacccgcggcccgcccggcgcagccgccgccccgaccccccggctccggggggcaatgagggggcagtggaaggggcactgctcctcgggcattacttagagaaacgagaccgtcccgccctctcgccggccctccctctctcccgcccgggcccgcgcaattctccgccagagggacagtcggcccaatatgtcaagacctctgatcactagatcccctgcatctccactgaacaaccaaggcatccctactccagcacaactcacaaaatccaatgcgcctgtccacattgatgtgggcggccacatgtacaccagcagcctggccaccctcaccaaataccctgaatccagaatcggaagactttttgatggtacagagcccattgttttggacagtctcaaacagcactatttcattgacagagatggacagatgttcagatatatcttgaattttctacgaacatccaaactcctcattcctgatgatttcaaggactacactttgttatatgaagaggcaaaatattttcagcttcagcccatgttgttggagatggaaagatggaagcaggacagagaaactggtcgattttcaaggccctgtgagtgcctcgtcgtgcgtgtggccccagacctcggagaaaggatcacgctaagcggtgacaaatccttgatagaagaagtatttccagagatcggcgacgtgatgtgtaactctgtcaatgcaggctggaatcacgactcgacgcacgtcatcaggtttccactaaatggctactgtcacctcaactcagtccaggtcctcgagaggttgcagcaaagaggatttgaaatcgtgggctcctgtgggggaggagtagactcgtcccagttcagcgaatacgtccttcggcgggaactgaggcggacgccccgtgtaccctccgtcatccggataaagcaagagcctctggactaaatggacatatttcttatgcaaaaaggaaaacacacacaaccaataactcaaacaaaaaagggacatttatgtgcagttgggacagcaaaccaagtcctggacgtaaaatcgaataaaagacacatttatatccaatagagaccacacctgtattcatatgggaacaattggaatagtgatatcctcaaggtgtaaaaaatatataaatatatatatatatgtcaaaaggtaggaaatgcaaaaaagaaaaaaaaaaaaggtgacagccgcagttggtgctgtgatggccgtgaagtgtcctgggcctcccgaggcctctgacaaataaacaagccatgagtggtgaggacacagtctccttacagtttccattgccaacaacagccatccatatttcttttttcctttgtctttctttttcctttttttttaaaaaaacaaaacaaacaaaacaccttgaatcaagtttgtttgtatatggaggttccacgtctttctttaggcagggaccaggcaggacttcagaaaaaccctcatgagcacattgcaaagatgttagacatgaaattttaaatgtagtttgtacagaagtcacacttttttgtccacctcacagatgtgaactttactttgttttaaaactgatcagttttgccaaggggccagaattattccttgttagaattgctccagttcaagtctgctgctttcctacaatttttcaaattttataatgtattaaatacaataaactctgtttaaaaaataaggtctgtgtgaaacacacatgtgggggtgaggctggattaaagtgaaattttttctttttgaaaaaaaaaatccacatacaaacaacaacaacactctttttgggccgcccggccccaaaaaaaagttttcaaaaacccaatcggttagggcgccggcgggcgcccagagggtaggtacaacctgggccatacggggtccccaaagaaaaccccggggccaaagactacgggctgggttccccccaataaaaaacgccgggggaacacgagcggtctgaacaatcccagaggatccagaggccaaagggggccatcaacaggggccaacgaggtcgatttaatc

SEQ ID NO: 434709 - DNA, 2034 bp, Homo sapiens
gcacgagccaccacctgcctcaccagtagctgggactacagctcccgtcactagctttttctcctcaagcctgcactgcacaccaactgggatggagggtgcagatgaataaaggcaaatccatcaccaaaagacagtcggcccaatatgtcaagacctctgatcactagatcccctgcatctccactgaacaaccaaggcatccctactccagcacaactcacaaaatccaatgcgcctgtccacattgatgtgggcggccacatgtacaccagcagcctggccaccctcaccaaataccctgaatccagaatcggaagactttttgatggtacagagcccattgttttggacagtctcaaacagcactatttcattgacagagatggacagatgttcagatatatcttgaattttctacgaacatccaaactcctcattcctgatgatttcaaggactacactttgttatatgaagaggcaaaatattttcagcttcagcccatgttgttggagatggaaagatggaagcaggacagagaaactggtcgattttcaaggccctgtgagtgcctcgtcgtgcgtgtggccccagacctcggagaaaggatcacgctaagcggtgacaaatccttgatagaagaagtatttccagagatcggcgacgtgatgtgtaactctgtcaatgcaggctggaatcacgactcgacgcacgtcatcaggtttccactaaatggctactgtcacctcaactcagtccaggtcctcgagaggttgcagcaaagaggatttgaaatcgtgggctcctgtgggggaggagtagactcgtcccagttcagcgaatacgtccttcggcgggaactgaggcggacgccccgtgtaccctccgtcatccggataaagcaagagcctctggactaaatggacatatttcttatgcaaaaaggaaaacacacacaaccaataactcaaacaaaaaagggacatttatgtgcagttgggacagcaaaccaagtcctggacgtaaaatcgaataaaagacacatttatatccaatagagaccacacctgtattcatatgggaacaattggaatagtgatatcctcaaggtgtaaaaaatatataaatatatatatatatgtcaaaaggtaggaaatgcaaaaaagaaaaaaaaaaaaggtgacagccgcagttggtgctgtgatggccgtgaagtgtcctgggcctcccgaggcctctgacaaataaacaagccatgagtggtgaggacacagtctccttacagtttccattgccaacaacagccatccatatttcttttttcctttgtctttctttttcctttttttttaaaaaaacaaaacaaacaaaacaccttgaatcaagtttgtttgtatatggaggttccacgtctttctttaggcagggaccaggcaggacttcagaaaaaccctcatgagcacattgcaaagatgttagacatgaaattttaaatgtagtttgtacagaagtcacacttttttgtccacctcacagatgtgaactttactttgttttaaaactgatcagttttgccaaggggccagaattattccttgttagaattgctccagttcaagtctgctgctttcctacaatttttcaaattttataatgtattaaatacaataaactctgtttaaaaaataaggtctgtgtgaaacacacatgtgggggtgaggctggattaaagtgaaattttttctttttgaaaaaaaaaatccacatacaaacaacaacaacactctttttgggccgcccggccccaaaaaaaagttttcaaaaacccaatcggttagggcgccggcgggcgcccagagggtaggtacaacctgggccatacggggtccccaaagaaaaccccggggccaaagactacgggctgggttccccccaataaaaaacgccgggggaacacgagcggtctgaacaatcccagaggatccagaggccaaagggggccatcaacaggggccaacgaggtcgatttaatc

SEQ ID NO: 434710 - DNA, 1164 bp, Homo sapiens
accggcgcggacttgccccagacctacggggagcgccccaggtctttaatgacagcttaaatgtggctgttggaaaagtcgaaagggatgtggctgacgtggggcgtgtttcgctcctttgcaagagtcggaaagggagttgggagccgcgcggctggccccaggcccccgcgcctcgccgccagcaagtaggtgggggagccgccgccgccgccagccccatcccgctcccaagcctcgcccgctgcgccctggccgcgggcgccgagagggtgcggggcctcgccgtgcctcctccaccctgctcattaacctgcctgctccgctccgctccgggcggccccagacacgggtttcccgcggcagcacccgcggcccgcccggcgcagccgccgccccgaccccccggctccggggggcaatgagggggcagtggaaggggcactgctcctcgggcattacttagagaaacgagaccgtcccgccctctcgccggccctccctctctcccgcccgggcccgcgcaattctccgccagagggacagtcggcccaatatgtcaagacctctgatcactagatcccctgcatctccactgaacaaccaaggcatccctactccagcacaactcacaaaatccaatgcgcctgtccacattgatgtgggcggccacatgtacaccagcagcctggccaccctcaccaaataccctgaatccagaatcggaagactttttgatggtacagagcccattgttttggacagtctcaaacagcactatttcattgacagagatggacagatgttcagatatatcttgaattttctacgaacatccaaactcctcattcctgatgatttcaaggactacactttgttatatgaagaggcaaaatattttcagcttcagcccatgttgttggagatggaaagatggaagcaggacagagaaaaaagttgaaaaggtggttgtgtcaaaccgattggtgacatctccatgctgtattgtcacaagcacatatggctggacagcaaacatggagagaatcatgaaagctcaagccctaagagacaactcaacaatgggttacatggcagcaaagaaacacctggagataaaccctgaccattccattattgagaccttaaggcaaaaggcagagg

SEQ ID NO: 434711 - DNA, 784 bp, Homo sapiens
agcgggggcgggaccggacttccggctggtctgtggggtttcgggttcggggtttcctggtgggcgtcaggggcaggcaacagagtggcggccgctacggccctggaacggggccatggagaagctgcggcgagtcctgagcggccaggacgacgaggagcagggcctgactgcgcaggtcctggatgcctcatcccttagtttcaacaccagattgaaatggtttgccatctgcttcgtatgtggcgttttcttttctattcttggaactggattgctgtggcttccgggcggcataaagctttttgcagtgttttataccctcggcaatcttgctgcgttagccagtacatgctttttaatgggacctgtgaagcaactgaagaaaatgtttgaagcaacaagattgcttgcaacaattgttatgcttttgtgtttcatatttaccctgtgtgctgctctttggtggcataagaagggactggctgtgttattctgcatattgcagttcttgtcaatgacctggtatagcctgtcgtacatcccatatgcaagggatgcagttattaaatgctgttcttctctcctaagttgaaaatcagaaacttgtggaaaagagcacttgaatgttggtactctatgtttggtgaagtttgcttttccccataaaacactccaggaacaactgacgtgacagttgaagaccgttttgtactaagtctcattttgtatactggtaaaaactacatgcttgattaaaccattaaatgcttgtaactttaaa

SEQ ID NO: 434712 - DNA, 925 bp, Homo sapiens
agcgggggcgggaccggacttccggctggtctgtggggtttcgggttcggggtttcctggtgggcgtcaggggcaggcaacagagtggcggccgctacggccctggaacggggccatggagaagctgcggcgagtcctgagcggccaggacgacgaggagcagggcctgactgcgcaggtcctggatgcctcatcccttagtttcaacaccagattgaaatggtttgccatctgcttcgtatgtggcgttttcttttctattcttggaactggattgctgtggcttccgggcggcataaagctttttgcagtgttttataccctcggcaatcttgctgcgttagccagtacatgctttttaatgggacctgtgaagcaactgaagaaaatgtttgaagcaacaagattgcttgcaacaattgttatgcttttgtgtttcatatttaccctgtgtgctgctctttggtggcataagaagggactggctgtgttattctgcatattgcagttcttgtcaatgacctggtatagcctgtcgtacatcccatatgcaagggatgcagttattaaatgctgttcttctctcctaagttgaaaatcagaaacttgtggaaaagagcacttgaatgttggtactctatgtttggtgaagtttgcttttccccataaaacactccaggaacaactgacgtgacagttgaagaccgttttgtactaagtctcattttgtatactggtaaaaactacatgcttgattaaaccattaaatgcttgtaactttaaaaaaaaaaaaaaaaaaaaaaaaaaaaaaaaaatgggggtttttttcgggggggcggaaaagaggtttaagggcgtgttttttttcggcccttttttttaagggggaaatggggccccaaggggggataatgaaacaggatag

SEQ ID NO: 434713 - DNA, 689 bp, Homo sapiens
agcgggggcgggaccggacttccggctggtctgtggggtttcgggttcggggtttcctggtgggcgtcaggggcaggcaacagagtggcggccgctacggccctggaacggggccatggagaagctgcggcgagtcctgagcggccaggacgacgaggagcagggcctgactgcgcaggtcctggatgcctcatcccttagtttcaacaccagattgaaatggtttgccatctgcttcgtatgtggcgttttcttttctattcttggaactggattgctgtggcttccgggcggcataaagctttttgcagtgttttataccctcggcaatcttgctgcgttagccagtacatgctttttaatgggacctgtgaagcaactgaagaaaatgtttgaagcaacaagattgcttgcaacaattgttatgcttgtatagcctgtcgtacatcccatatgcaagggatgcagttattaaatgctgttcttctctcctaagttgaaaatcagaaacttgtggaaaagagcacttgaatgttggtactctatgtttggtgaagtttgcttttccccataaaacactccaggaacaactgacgtgacagttgaagaccgttttgtactaagtctcattttgtatactggtaaaaactacatgcttgattaaaccattaaatgcttgtaactttaaa

SEQ ID NO: 434714 - DNA, 803 bp, Homo sapiens
agcgggggcgggaccggacttccggctggtctgtggggtttcgggttcggggtttcctggtgggcgtcaggggcaggcaacagagtggcggccgctacggccctggaacggggccatggagaagctgcggcgagtcctgagcggccaggacgacgaggagcagggcctgactgcgcaggtcctggatgcctcatcccttagtttcaacaccagattgaaatggtttgccatctgcttcgtatgtggcgttttcttttctattcttggaactggattgctgtggcttccgggcggcataaagctttttgcagtgttttataccctcggcaatcttgctgcgttagccagtacatgctttttaatgggacctgtgaagcaactgaagaaaatgtttgaagcaacaagattgcttgcaacaattgttatgcttgtaagtaaataatacatttttaaaacttttattgaagtattctttgcactgttattttacgaataattgcctgttatgtatgtatacttctttttttatttttatttttttttattattatactttaagtttcagggttgtatgtatacttcttgtgttgaatataataattatatccggccgggcacggtggctcacgtctgtaatcccagcactttggggggccaaggtgggcggatcacctgatggcaggagttcaagaccagcctgaccaatataatgaaaccccgtctctactaaaaatacaaaaattagcccggtgaggtggcatgcacctgtaatcccagctacttgggaggctgagacagaatca

SEQ ID NO: 434715 - DNA, 1142 bp, Homo sapiens
gaggattcagttataaacattacagttttgaaactcagttcattagttcttttttttttttgagatggagtctcattttgtcacccaggctggagtacaatggcgtgatctctgctcactgcaacctccacctcccaagttcaagagtttctcctggctcagcctcctgagtagctgggattacaggcacgtgctgccgctgccacgcccagctaatttttgtgttttttagtagagatggggtttcaccatgttggccaggctggtcttgaactcctgacctcaagtgatccacctgccttacaggcgtgagccaccttgcctggcctagttctttttaaaaattaaatctttgggctgggcttggtggctcatccctgtaatcccagcattttgggaggctgagacgggtggatggcttgagcgcaggagtttgagaccagcttgggcatcatagcaagaccctgtctctattaaaaaaaaaaaaaaaaattagtgtagtggtgtgccctatagtcccagctccttgggaggctgaggtgggaggatctgctcacgccactgcacttatcctggaagacagagtgagaacctgtctcaaaaggaaaaaaaaagaaaaaagttagatcttttgttaggttatttttggtatttaaacttatttctttgattgagatcagtgtatatgccagtaaaaatttcttaagataaataccatgtcaaaaatcagcaaaatgttttcaaatcttagctcttaatcttaaatgatactgaacaaagtttttattaatcaaaaagtgtgttggagcatccattgagttctgttaaaaaaggtgatttagcaggaacattttgcgcaactttgcttttgaggaatattatattctgtttttttccctctcttttccaccagggatgcagttattaaatgctgttcttctctcctaagttgaaaatcagaaacttgtggaaaagagcacttgaatgttggtactctatgtttggtgaagtttgcttttccccataaaacactccaggaacaactgacgtgacagttgaagaccgttttgtactaagtctcattttgtatactggtaaaaactacatgcttgattaaaccattaaatgcttgtaactttaaa

SEQ ID NO: 434716 - DNA, 522 bp, Homo sapiens
agcgggggcgggaccggacttccggctggtctgtggggtttcgggttcggggtttcctggtgggcgtcaggggcaggcaacagagtggcggccgctacggccctggaacggggccatggagaagctgcggcgagtcctgagcggccaggacgacgaggagcagggcctgactgcgcaggattcacagattaatctcttgaggtaaggaatgtaaccaaatgtattttgaactgttgcatatagaactttctcttatttttcattattcttgaaaatataagcatgtagtcttatttttaagtggatgtggtagtataaattagaaatttaagttttggaatataaatccttgctgtatatttctagtttcttgcacagctgctgttgatagatacttttttagccttatttggaaaatatattttaatagtataattagtaatctgagtgtgtttatttcaccactactgtgtgctgggttatcatactgtacaaagtagacttagtaatttctactttttt

SEQ ID NO: 434717 - DNA, 1474 bp, Homo sapiens
agcgggggcgggaccggacttccggctggtctgtggggtttcgggttcggggtttcctggtgggcgtcaggggcaggcaacagagtggcggccgctacggccctggaacggggccatggagaagctgcggcgagtcctgagcggccaggacgacgaggagcagggcctgactgcgcaggtcctggatgcctcatcccttagtttcaacaccagattgaaatggtttgccatctgcttcgtatgtggcgttttcttttctattcttggaactggattgctgtggcttccgggcggcataaagctttttgcagtgttttataccctcggcaatcttgctgcgttagccagtacatgctttttaatgggacctgtgaagcaactgaagaaaatgtttgaagcaacaagattgcttgcaacaattgttatgcttttgtgtttcatatttaccctgtgtgctgctctttggtggcataagaagggactggctgtgttattctgcatattgcagttcttgtcaatgacctggtatagcctgtcgtacatcccatatgcaagggatgcagttattaaatgctgttcttctctcctaagttgaaaatcagaaacttgtggaaaagagcacttgaatgttggtactctatgtttggtgaagtttgcttttccccataaaacactccaggaacaactgacgtgacagttgaagaccgttttgtactaagtctcattttgtatactggtaaaaactacatgcttgattaaaccattaaatgcttgtaactttaaattcattatgtgtcattaatatacttttccaaagataagatttttaatcactgccagttgtaaattatttttagccaatttttaaatcttttcaaagcagctttgaaatgtgaatatttaaaggtagacctgtgctgcaagataattaaacttttttgcttttaaaaaatgtctgcatttttaagattttttttactttaaatgtgaaacttattttaagctaaaaattgcttattatatgtaataaaaataatatataaatctttacaattttgaaataaacccatccttggaaaaataaaaaaaaaaaaaaaaaaaaaaaaaaaaaaaaaaaaaaaaaaaaaaaaaaaaaaaaaaaaaaaaaaaaacaaaaaaaaaaaaaaaaaaaacaaaaaaaaaaaaaaaaagaacgaccaacaaaggatagagaagaaagaatgagaagccaagaagcgggaagtcactatagatgtcgacaccagagggcgcgccagatgaaaaatctccagagcgcagggagagaacagcgagtcaggagcaagaggggcagagcagagacaaagacaaagtagaagaacacagagcaaacgacaggactaagaagataaagacgagagagaaaaaaaactcgatacgcacaatgccaacaaaactcattgcaggagatagtaagagaaagccaaagagaaag

SEQ ID NO: 434718 - DNA, 2711 bp, Homo sapiens
tctacatttttgaaagacaagaattaagtttgattgagaaagatgtttttaaaactttgaaactcataattgctctgtttttgctgttgttagtggcataagaagggactggctgtgttattctgcatattgcagttcttgtcaatgacctggtaagtctttccttaccctagtgaagtgttaaaattgcctgagatgtgacgagcattttgtttgggacctgtgaagccctagcatttcgtctggtgttttggagccagacaggccctgcagggtcagaggaggggaggtctgcgatgagtcctgttgcacttgacagcgtggctcagtggtactgttcgggagaagtatggggtgctgtgctcgtagagttacatagtgatatgttctgcttttttctaatgtgagaaagagaaataataagaaaagtaggtgatgccatgtgagtacataaaagtgagaccaaatcacagggtgagtccaagggaagatgagtttacctgcattctccactctattgctggataaatacaacgtggaatttatcctgatgttgactctgtggccctgtgatatctggagatgtcttctgaattggcagtgattaaatacttcttaagttactggttgagcatcccaaatccaaaatgcttcaggatccaaaactttttttttttttttttgaggcagagtctcactctgtcacccaggctggagtgcagtggcattatcttggctcactgcaacctctgcctcccgggttcaagtgattctcgtgcctcagccttccaagtagctgggattacaaatgtgaggcaccatgcccagccccaaatccaaaacttcttgaacgctgacatgatgctcagatttggttgatactcaaccagtaaatgtaatgcagatattccaaaaatccagaaaaatccagtatccaacacatttctagttcctatcatttcagatcagaggtgcttcacctgcactgcctttcccagtccacttttgtgaagattcagtcatgtcctggtttctgctcagactctcctccttgtagcctttttgtgtctcgcacagtaagagttcatctgcataaaggccataaatatctgggtggttgattaaacgtgccctgcagctcctgcgctcttctgtgttagtgaagagtacttttccttttcctttagagcagctcttgcttcctaatttttgcttcctggttttgccattttacattcctcttactcgacattacccagtttgggatcacctttctttcggccttctttctactgacagatgaaacatcagtgaatgttaaatgtaattctctgtatatctcaaattcaccataaaatgttctttactttttttcactgatatgtgaagaaacttaatctcttggttattttctctagtattttgccttttattgcctaatttgtaactaataattgatttatccctaaaggagactataattatcagttgtggtacagtttctattttattataagaagctcaaactttagcatgcaccagaatcacctagagagtttgtttaaagtgcaggttgcttgttaaagcaagcttgtgatttaggaggtttaaggtaggacctaataatttacatttttaacaagttcccagatgatgctctcactgctggtcggggtcacactttgagaaccactgtacagtctcatgctgctgtatttattataaggttagacatggccttttggcataaaggaaaaccatcattcagatgaagattcaacatgcttgaatatttcttgcaggtatagcctgtcgtacatcccatatgcaagggatgcagttattaaatgctgttcttctctcctaagttgaaaatcagaaacttgtggaaaagagcacttgaatgttggtactctatgtttggtgaagtttgcttttccccataaaacactccaggaacaactgacgtgacagttgaagaccgttttgtactaagtctcattttgtatactggtaaaaactacatgcttgattaaaccattaaatgcttgtaactttaaattcattatgtgtcattaatatacttttccaaagataagatttttaatcactgccagttgtaaattatttttagccaatttttaaatcttttcaaagcagctttgaaatgtgaatatttaaaggtagacctgtgctgcaagataattaaacttttttgcttttaaaaaatgtctgcatttttaagattttttttactttaaatgtgaaacttattttaagctaaaaattgcttattatatgtaataaaaataatatataaatctttacaattttgaaataaacccatccttggaaaaataaaaaaaaaaaaaaaaaaaaaaaaaaaaaaaaatgtgtgtgtgtggggcggcttgtgggccccttggaaaagagttttttgaagaaccttgtgtgtggggacgacggggccccagaagagggtaacggcacaaacgtggccaaaaggggttccccaagaaggaaacgcggggacgataagaaacacaagggcgggggatatctcgccaacaagataaaaagagcgccgcggggaaaaacacggagaggttctcggaacaaatcgcgcaaagggagtctgaagaggactcaaaaagggggatcatttaacaggagggatcccgagagagagccaggataacaaattaggcccg

SEQ ID NO: 434719 - DNA, 807 bp, Homo sapiens
agcgggggcgggaccggacttccggctggtctgtggggtttcgggttcggggtttcctggtgggcgtcaggggcaggcaacagagtggcggccgctacggccctggaacggggccatggagaagctgcggcgagtcctgagcggccaggacgacgaggagcagggcctgactgcgcaggattcacagattaatctcttgaggtcctggatgcctcatcccttagtttcaacaccagattgaaatggtttgccatctgcttcgtatgtggcgttttcttttctattcttggaactggattgctgtggcttccgggcggcataaagctttttgcagtgttttataccctcggcaatcttgctgcgttagccagtacatgctttttaatgggacctgtgaagcaactgaagaaaatgtttgaagcaacaagattgcttgcaacaattgttatgcttttgtgtttcatatttaccctgtgtgctgctctttggtggcataagaagggactggctgtgttattctgcatattgcagttcttgtcaatgacctggtatagcctgtcgtacatcccatatgcaagggatgcagttattaaatgctgttcttctctcctaagttgaaaatcagaaacttgtggaaaagagcacttgaatgttggtactctatgtttggtgaagtttgcttttccccataaaacactccaggaacaactgacgtgacagttgaagaccgttttgtactaagtctcattttgtatactggtaaaaactacatgcttgattaaaccattaaatgcttgtaactttaaa

SEQ ID NO: 434720 - DNA, 1845 bp, Homo sapiens
atggggtgcagtcaccccaccccacccctggcctgcagccaatgaccggccgaagggaggtggcgtgtggaaggccagcctctgcctccagcaggacttgcactgagtgcggatgcactcggatgcactcagactctggcatctaggagcctgaggaattcgtcctgcagaggcagagagaacagataatgaacctgtgtactctttcccagcctctgcagtttcagtgttttgcctggcctgttgcatctgccccctgtgtttttttaatctttgtatattttataatatatcttatatgtcattttatccatatcagtgtatatcggctgtccctaacagataaggacttttgtgaaacatattatcagactttgcaaaattaatggttattcctcagcatcatctgctacccagaccatggtcatattacccttaacaaccgtggaatcttagtattcttgaatgacactgtgatatgcaaaataaatgattcagactatgtgttaaaactttgctttaatttagtataaagaatcagattggtagtgaattaagactatattctaaattttcccattttttattagtcctggatgcctcatcccttagtttcaacaccagattgaaatggtttgccatctgcttcgtatgtggcgttttcttttctattcttggaactggattgctgtggcttccgggcggcataaagctttttgcagtgttttataccctcggcaatcttgctgcgttagccagtacatgctttttaatgggacctgtgaagcaactgaagaaaatgtttgaagcaacaagattgcttgcaacaattgttatgcttttgtgtttcatatttaccctgtgtgctgctctttggtggcataagaagggactggctgtgttattctgcatattgcagttcttgtcaatgacctggtatagcctgtcgtacatcccatatgcaagggatgcagttattaaatgctgttcttctctcctaagttgaaaatcagaaacttgtggaaaagagcacttgaatgttggtactctatgtttggtgaagtttgcttttccccataaaacactccaggaacaactgacgtgacagttgaagaccgttttgtactaagtctcattttgtatactggtaaaaactacatgcttgattaaaccattaaatgcttgtaactttaaattcattatgtgtcattaatatacttttccaaagataagatttttaatcactgccagttgtaaattatttttagccaatttttaaatcttttcaaagcagctttgaaatgtgaatatttaaaggtagacctgtgctgcaagataattaaacttttttgcttttaaaaaatgtctgcatttttaagattttttttactttaaatgtgaaacttattttaagctaaaaattgcttattatatgtaataaaaataatatataaatctttacaattttgaaataaacccatccttggaaaaataaaaaaaaaaaaaaaaaaaaaaaaaaaaaaaaatgtgtgtgtgtggggcggcttgtgggccccttggaaaagagttttttgaagaaccttgtgtgtggggacgacggggccccagaagagggtaacggcacaaacgtggccaaaaggggttccccaagaaggaaacgcggggacgataagaaacacaagggcgggggatatctcgccaacaagataaaaagagcgccgcggggaaaaacacggagaggttctcggaacaaatcgcgcaaagggagtctgaagaggactcaaaaagggggatcatttaacaggagggatcccgagagagagccaggataacaaattaggcccg

SEQ ID NO: 434721 - DNA, 1304 bp, Homo sapiens
agttccttatcggtcattactactaggatcatggcctgactgcgcaggtcctggatgcctcatcccttgggggcaacaccaggatggaaatggcctgccatctggtgaggatgtggcgtggggtggtgtataattggaactggattgctgtggcttccgggcggcataaagctttttgcagtgttttataccctcggcaatcttgctgcgttagccagtacatgctttttaatgggacctgtgaagcaactgaagaaaatgtttgaagcaacaagattgcttgcaacaattgttatgcttttgtgtttcatatttaccctgtgtgctgctctttggtggcataagaagggactggctgtgttattctgcatattgcagttcttgtcaatgacctggtatagcctgtcgtacatcccatatgcaagggatgcagttattaaatgctgttcttctctcctaagttgaaaatcagaaacttgtggaaaagagcacttgaatgttggtactctatgtttggtgaagtttgcttttccccataaaacactccaggaacaactgacgtgacagttgaagaccgttttgtactaagtctcattttgtatactggtaaaaactacatgcttgattaaaccattaaatgcttgtaactttaaattcattatgtgtcattaatatacttttccaaagataagatttttaatcactgccagttgtaaattatttttagccaatttttaaatcttttcaaagcagctttgaaatgtgaatatttaaaggtagacctgtgctgcaagataattaaacttttttgcttttaaaaaatgtctgcatttttaagattttttttactttaaatgtgaaacttattttaagctaaaaattgcttattatatgtaataaaaataatatataaatctttacaattttgaaataaacccatccttggaaaaataaaaaaaaaaaaaaaaaaaaaaaaaaaaaaaaatgtgtgtgtgtggggcggcttgtgggccccttggaaaagagttttttgaagaaccttgtgtgtggggacgacggggccccagaagagggtaacggcacaaacgtggccaaaaggggttccccaagaaggaaacgcggggacgataagaaacacaagggcgggggatatctcgccaacaagataaaaagagcgccgcggggaaaaacacggagaggttctcggaacaaatcgcgcaaagggagtctgaagaggactcaaaaagggggatcatttaacaggagggatcccgagagagagccaggataacaaattaggcccg

SEQ ID NO: 434722 - DNA, 3107 bp, Homo sapiens
agcgggggcgggaccggacttccggctggtctgtggggtttcgggttcggggtttcctggtgggcgtcaggggcaggcaacagagtggcggccgctacggccctggaacggggccatggagaagctgcggcgagtcctgagcggccaggacgacgaggagcagggcctgactgcgcaggattcacagattaatctcttgaggtcctggatgcctcatcccttagtttcaacaccagattgaaatggtttgccatctgcttcgtatgtggcgttttcttttctattcttggaactggattgctgtggcttccgggcggcataaagctttttgcagtgttttataccctcggcaatcttgctgcgttagccagtacatgctttttaatgggacctgtgaagcaactgaagaaaatgtttgaagcaacaagattgcttgcaacaattgttatgcttttgtgtttcatatttaccctgtgtgctgctctttggtggcataagaagggactggctgtgttattctgcatattgcagttcttgtcaatgacctggtaagtctttccttaccctagtgaagtgttaaaattgcctgagatgtgacgagcattttgtttgggacctgtgaagccctagcatttcgtctggtgttttggagccagacaggccctgcagggtcagaggaggggaggtctgcgatgagtcctgttgcacttgacagcgtggctcagtggtactgttcgggagaagtatggggtgctgtgctcgtagagttacatagtgatatgttctgcttttttctaatgtgagaaagagaaataataagaaaagtaggtgatgccatgtgagtacataaaagtgagaccaaatcacagggtgagtccaagggaagatgagtttacctgcattctccactctattgctggataaatacaacgtggaatttatcctgatgttgactctgtggccctgtgatatctggagatgtcttctgaattggcagtgattaaatacttcttaagttactggttgagcatcccaaatccaaaatgcttcaggatccaaaactttttttttttttttttgaggcagagtctcactctgtcacccaggctggagtgcagtggcattatcttggctcactgcaacctctgcctcccgggttcaagtgattctcgtgcctcagccttccaagtagctgggattacaaatgtgaggcaccatgcccagccccaaatccaaaacttcttgaacgctgacatgatgctcagatttggttgatactcaaccagtaaatgtaatgcagatattccaaaaatccagaaaaatccagtatccaacacatttctagttcctatcatttcagatcagaggtgcttcacctgcactgcctttcccagtccacttttgtgaagattcagtcatgtcctggtttctgctcagactctcctccttgtagcctttttgtgtctcgcacagtaagagttcatctgcataaaggccataaatatctgggtggttgattaaacgtgccctgcagctcctgcgctcttctgtgttagtgaagagtacttttccttttcctttagagcagctcttgcttcctaatttttgcttcctggttttgccattttacattcctcttactcgacattacccagtttgggatcacctttctttcggccttctttctactgacagatgaaacatcagtgaatgttaaatgtaattctctgtatatctcaaattcaccataaaatgttctttactttttttcactgatatgtgaagaaacttaatctcttggttattttctctagtattttgccttttattgcctaatttgtaactaataattgatttatccctaaaggagactataattatcagttgtggtacagtttctattttattataagaagctcaaactttagcatgcaccagaatcacctagagagtttgtttaaagtgcaggttgcttgttaaagcaagcttgtgatttaggaggtttaaggtaggacctaataatttacatttttaacaagttcccagatgatgctctcactgctggtcggggtcacactttgagaaccactgtacagtctcatgctgctgtatttattataaggttagacatggccttttggcataaaggaaaaccatcattcagatgaagattcaacatgcttgaatatttcttgcaggtatagcctgtcgtacatcccatatgcaagggatgcagttattaaatgctgttcttctctcctaagttgaaaatcagaaacttgtggaaaagagcacttgaatgttggtactctatgtttggtgaagtttgcttttccccataaaacactccaggaacaactgacgtgacagttgaagaccgttttgtactaagtctcattttgtatactggtaaaaactacatgcttgattaaaccattaaatgcttgtaactttaaattcattatgtgtcattaatatacttttccaaagataagatttttaatcactgccagttgtaaattatttttagccaatttttaaatcttttcaaagcagctttgaaatgtgaatatttaaaggtagacctgtgctgcaagataattaaacttttttgcttttaaaaaatgtctgcatttttaagattttttttactttaaatgtgaaacttattttaagctaaaaattgcttattatatgtaataaaaataatatataaatctttacaattttgaaataaacccatccttggaaaaataaaaaaaaaaaaaaaaaaaaaaaaaaaaaaaaatgtgtgtgtgtggggcggcttgtgggccccttggaaaagagttttttgaagaaccttgtgtgtggggacgacggggccccagaagagggtaacggcacaaacgtggccaaaaggggttccccaagaaggaaacgcggggacgataagaaacacaagggcgggggatatctcgccaacaagataaaaagagcgccgcggggaaaaacacggagaggttctcggaacaaatcgcgcaaagggagtctgaagaggactcaaaaagggggatcatttaacaggagggatcccgagagagagccaggataacaaattaggcccg

SEQ ID NO: 434723 - DNA, 2434 bp, Homo sapiens
agcgggggcgggaccggacttccggctggtctgtggggtttcgggttcggggtttcctggtgggcgtcaggggcaggcaacagagtggcggccgctacggccctggaacggggccatggagaagctgcggcgagtcctgagcggccaggacgacgaggagcagggcctgactgcgcaggtcctggatgcctcatcccttagtttcaacaccagattgaaatggtttgccatctgcttcgtatgtggcgttttcttttctattcttggaactggattgctgtggcttccgggcggcataaagctttttgcagtgttttataccctcggcaatcttgctgcgttagccagtacatgctttttaatgggacctgtgaagcaactgaagaaaatgtttgaagcaacaagattgcttgcaacaattgttatgcttttgtgtttcatatttaccctgtgtgctgctctttggtggcataagaagggactggctgtgttattctgcatattgcagttcttgtcaatgacctggtaagtctttccttaccctagtgaagtgttaaaattgcctgagatgtgacgagcattttgtttgggacctgtgaagccctagcatttcgtctggtgttttggagccagacaggccctgcagggtcagaggaggggaggtctgcgatgagtcctgttgcacttgacagcgtggctcagtggtactgttcgggagaagtatggggtgctgtgctcgtagagttacatagtgatatgttctgcttttttctaatgtgagaaagagaaataataagaaaagtaggtgatgccatgtgagtacataaaagtgagaccaaatcacagggtgagtccaagggaagatgagtttacctgcattctccactctattgctggataaatacaacgtggaatttatcctgatgttgactctgtggccctgtgatatctggagatgtcttctgaattggcagtgattaaatacttcttaagttactggttgagcatcccaaatccaaaatgcttcaggatccaaaactttttttttttttttttgaggcagagtctcactctgtcacccaggctggagtgcagtggcattatcttggctcactgcaacctctgcctcccgggttcaagtgattctcgtgcctcagccttccaagtagctgggattacaaatgtgaggcaccatgcccagccccaaatccaaaacttcttgaacgctgacatgatgctcagatttggttgatactcaaccagtaaatgtaatgcagatattccaaaaatccagaaaaatccagtatccaacacatttctagttcctatcatttcagatcagaggtgcttcacctgcactgcctttcccagtccacttttgtgaagattcagtcatgtcctggtttctgctcagactctcctccttgtagcctttttgtgtctcgcacagtaagagttcatctgcataaaggccataaatatctgggtggttgattaaacgtgccctgcagctcctgcgctcttctgtgttagtgaagagtacttttccttttcctttagagcagctcttgcttcctaatttttgcttcctggttttgccattttacattcctcttactcgacattacccagtttgggatcacctttctttcggccttctttctactgacagatgaaacatcagtgaatgttaaatgtaattctctgtatatctcaaattcaccataaaatgttctttactttttttcactgatatgtgaagaaacttaatctcttggttattttctctagtattttgccttttattgcctaatttgtaactaataattgatttatccctaaaggagactataattatcagttgtggtacagtttctattttattataagaagctcaaactttagcatgcaccagaatcacctagagagtttgtttaaagtgcaggttgcttgttaaagcaagcttgtgatttaggaggtttaaggtaggacctaataatttacatttttaacaagttcccagatgatgctctcactgctggtcggggtcacactttgagaaccactgtacagtctcatgctgctgtatttattataaggttagacatggccttttggcataaaggaaaaccatcattcagatgaagattcaacatgcttgaatatttcttgcaggtatagcctgtcgtacatcccatatgcaagggatgcagttattaaatgctgttcttctctcctaagttgaaaatcagaaacttgtggaaaagagcacttgaatgttggtactctatgtttggtgaagtttgcttttccccataaaacactccaggaacaactgacgtgacagttgaagaccgttttgtactaagtctcattttgtatactggtaaaaactacatgcttgattaaaccattaaatgcttgtaactttaaa

SEQ ID NO: 434724 - DNA, 1792 bp, Homo sapiens
gaggattcagttataaacattacagttttgaaactcagttcattagttcttttttttttttgagatggagtctcattttgtcacccaggctggagtacaatggcgtgatctctgctcactgcaacctccacctcccaagttcaagagtttctcctggctcagcctcctgagtagctgggattacaggcacgtgctgccgctgccacgcccagctaatttttgtgttttttagtagagatggggtttcaccatgttggccaggctggtcttgaactcctgacctcaagtgatccacctgccttacaggcgtgagccaccttgcctggcctagttctttttaaaaattaaatctttgggctgggcttggtggctcatccctgtaatcccagcattttgggaggctgagacgggtggatggcttgagcgcaggagtttgagaccagcttgggcatcatagcaagaccctgtctctattaaaaaaaaaaaaaaaaattagtgtagtggtgtgccctatagtcccagctccttgggaggctgaggtgggaggatctgctcacgccactgcacttatcctggaagacagagtgagaacctgtctcaaaaggaaaaaaaaagaaaaaagttagatcttttgttaggttatttttggtatttaaacttatttctttgattgagatcagtgtatatgccagtaaaaatttcttaagataaataccatgtcaaaaatcagcaaaatgttttcaaatcttagctcttaatcttaaatgatactgaacaaagtttttattaatcaaaaagtgtgttggagcatccattgagttctgttaaaaaaggtgatttagcaggaacattttgcgcaactttgcttttgaggaatattatattctgtttttttccctctcttttccaccagggatgcagttattaaatgctgttcttctctcctaagttgaaaatcagaaacttgtggaaaagagcacttgaatgttggtactctatgtttggtgaagtttgcttttccccataaaacactccaggaacaactgacgtgacagttgaagaccgttttgtactaagtctcattttgtatactggtaaaaactacatgcttgattaaaccattaaatgcttgtaactttaaattcattatgtgtcattaatatacttttccaaagataagatttttaatcactgccagttgtaaattatttttagccaatttttaaatcttttcaaagcagctttgaaatgtgaatatttaaaggtagacctgtgctgcaagataattaaacttttttgcttttaaaaaatgtctgcatttttaagattttttttactttaaatgtgaaacttattttaagctaaaaattgcttattatatgtaataaaaataatatataaatctttacaattttgaaataaacccatccttggaaaaataaaaaaaaaaaaaaaaaaaaaaaaaaaaaaaaatgtgtgtgtgtggggcggcttgtgggccccttggaaaagagttttttgaagaaccttgtgtgtggggacgacggggccccagaagagggtaacggcacaaacgtggccaaaaggggttccccaagaaggaaacgcggggacgataagaaacacaagggcgggggatatctcgccaacaagataaaaagagcgccgcggggaaaaacacggagaggttctcggaacaaatcgcgcaaagggagtctgaagaggactcaaaaagggggatcatttaacaggagggatcccgagagagagccaggataacaaattaggcccg

SEQ ID NO: 434725 - DNA, 383 bp, Homo sapiens
ctggattgctgtggcttccgggcggcataaagctttttgcagtgttttataccctcggcaatcttgctgcgttagccaggtacgtttggcttctcaaaatatcttgtttgctcttgctaccaaatttacctttctaataagcactttcccagtaggatgtttatgtagttctgtacatactgtgaattcagccacaggatttacattcattaaataaatatgtattgactgctgctgtatgccgtctcccataacagacggtattagtgctaggaatagccagcctttgtggggcacttaatgtgtgtctgggactgttctaagtgttttgtatgtattatgacgagcttgtgaggtaggcagtattatcatccccgtttata

SEQ ID NO: 434726 - DNA, 1150 bp, Homo sapiens
agcgggggcgggaccggacttccggctggtctgtggggtttcgggttcggggtttcctggtgggcgtcaggggcaggcaacagagtggcggccgctacggccctggaacggggccatggagaagctgcggcgagtcctgagcggccaggacgacgaggagcagggcctgactgcgcaggtcctggatgcctcatcccttagtttcaacaccagattgaaatggtttgccatctgcttcgtatgtggcgttttcttttctattcttggaactggattgctgtggcttccgggcggcataaagctttttgcagtgttttataccctcggcaatcttgctgcgttagccagtacatgctttttaatgggacctgtgaagcaactgaagaaaatgtttgaagcaacaagattgcttgcaacaattgttatgcttttgtgtttcatatttaccctgtgtgctgctctttggtggcataagaagggactggctgtgttattctgcatattgcagttcttgtcaatgacctggtatagcctgtcgtacatcccatatgcaagggatgcagttattaaatgctgttcttctctcctaagttgaaaatcagaaacttgtggaaaagagcacttgaatgttggtactctatgtttggtgaagtttgcttttccccataaaacactccaggaacaactgacgtgacagttgaagaccgttttgtactaagtctcattttgtatactggtaaaaactacatgcttgattaaaccattaaatgcttgtaactttaaattcattatgtgtcattaatatacttttccaaagataagatttttaatcactgccagttgtaaattatttttagccaatttttaaatcttttcaaagcagctttgaaatgtgaatatttaaaggtagacctgtgctgcaagataattaaacttttttgcttttaaaaaatgtctgcatttttaagattttttttactttaaatgtgaaacttattttaagctaaaaattgcttattatatgtaataaaaataatatataaatctttacaattttgaaataaacccatccttggaaaaataaaaaacagaggacctgagtgaatgtgaccttaaactgttgctcaatgtgaggccagtagtgtgggag

SEQ ID NO: 434727 - DNA, 1143 bp, Homo sapiens
agcgggggcgggaccggacttccggctggtctgtggggtttcgggttcggggtttcctggtgggcgtcaggggcaggcaacagagtggcggccgctacggccctggaacggggccatggagaagctgcggcgagtcctgagcggccaggacgacgaggagcagggcctgactgcgcaggtcctggatgcctcatcccttagtttcaacaccagattgaaatggtttgccatctgcttcgtatgtggcgttttcttttctattcttggaactggattgctgtggcttccgggcggcataaagctttttgcagtgttttataccctcggcaatcttgctgcgttagccagtacatgctttttaatgggacctgtgaagcaactgaagaaaatgtttgaagcaacaagattgcttgcaacaattgttatgcttttgtgtttcatatttaccctgtgtgctgctctttggtggcataagaagggactggctgtgttattctgcatattgcagttcttgtcaatgacctggtatagcctgtcgtacatcccatatgcaagggatgcagttattaaatgctgttcttctctcctaagttgaaaatcagaaacttgtggaaaagagcacttgaatgttggtactctatgtttggtgaagtttgcttttccccataaaacactccaggaacaactgacgtgacagttgaagaccgttttgtactaagtctcattttgtatactggtaaaaactacatgcttgattaaaccattaaatgcttgtaactttaaaaaaaaaaaaaaaaaaaaaaaaaaaaaaaaaaaaaaacaaaaaaaaaaaaaaaaaaaacaaaaaaaaaaaaaaaaagaacgaccaacaaaggatagagaagaaagaatgagaagccaagaagcgggaagtcactatagatgtcgacaccagagggcgcgccagatgaaaaatctccagagcgcagggagagaacagcgagtcaggagcaagaggggcagagcagagacaaagacaaagtagaagaacacagagcaaacgacaggactaagaagataaagacgagagagaaaaaaaactcgatacgcacaatgccaacaaaactcattgcaggagatagtaagagaaagccaaagagaaag

SEQ ID NO: 434728 - DNA, 431 bp, Homo sapiens
agcgggggcgggaccggacttccggctggtctgtggggtttcgggttcggggtttcctggtgggcgtcaggggcaggcaacagagtggcggccgctacggccctggaacggggccatggagaagctgcggcgagtcctgagcggccaggacgacgaggagcagggcctgactgcgcagatcaatacacggaagatggcaataggaggaaaaaatacctactattatacaaatagccgtgctgtttccttgctgagagaaaaactggctattgaaaagcagcgattgaacttgtgaacaatggggtgatttgaacttgcaaaagaaggaaaaatggatgctttttcctctcactaaatcctcacagcattgtggactcacacgaacctttagaaatcattattctttccatttttaattgacaaataaaagt

SEQ ID NO: 434729 - DNA, 1434 bp, Homo sapiens
agcgggggcgggaccggacttccggctggtctgtggggtttcgggttcggggtttcctggtgggcgtcaggggcaggcaacagagtggcggccgctacggccctggaacggggccatggagaagctgcggcgagtcctgagcggccaggacgacgaggagcagggcctgactgcgcaggtcctggatgcctcatcccttagtttcaacaccagattgaaatggtttgccatctgcttcgtatgtggcgttttcttttctattcttggaactggattgctgtggcttccgggcggcataaagctttttgcagtgttttataccctcggcaatcttgctgcgttagccagtacatgctttttaatgggacctgtgaagcaactgaagaaaatgtttgaagcaacaagattgcttgcaacaattgttatgcttttgtgtttcatatttaccctgtgtgctgctctttggtggcataagaagggactggctgtgttattctgcatattgcagttcttgtcaatgacctggtatagcctgtcgtacatcccatatgcaagggatgcagttattaaatgctgttcttctctcctaagttgaaaatcagaaacttgtggaaaagagcacttgaatgttggtactctatgtttggtgaagtttgcttttccccataaaacactccaggaacaactgacgtgacagttgaagaccgttttgtactaagtctcattttgtatactggtaaaaactacatgcttgattaaaccattaaatgcttgtaactttaaattcattatgtgtcattaatatacttttccaaagataagatttttaatcactgccagttgtaaattatttttagccaatttttaaatcttttcaaagcagctttgaaatgtgaatatttaaaggtagacctgtgctgcaagataattaaacttttttgcttttaaaaaatgtctgcatttttaagattttttttactttaaatgtgaaacttattttaagctaaaaattgcttattatatgtaataaaaataatatataaatctttacaattttgaaataaacccatccttggaaaaataaaaaaaaaaaaaaaaaaaaaaaaaaaaaaaaatgtgtgtgtgtggggcggcttgtgggccccttggaaaagagttttttgaagaaccttgtgtgtggggacgacggggccccagaagagggtaacggcacaaacgtggccaaaaggggttccccaagaaggaaacgcggggacgataagaaacacaagggcgggggatatctcgccaacaagataaaaagagcgccgcggggaaaaacacggagaggttctcggaacaaatcgcgcaaagggagtctgaagaggactcaaaaagggggatcatttaacaggagggatcccgagagagagccaggataacaaattaggcccg

SEQ ID NO: 434730 - DNA, 1457 bp, Homo sapiens
agcgggggcgggaccggacttccggctggtctgtggggtttcgggttcggggtttcctggtgggcgtcaggggcaggcaacagagtggcggccgctacggccctggaacggggccatggagaagctgcggcgagtcctgagcggccaggacgacgaggagcagggcctgactgcgcaggattcacagattaatctcttgaggtcctggatgcctcatcccttagtttcaacaccagattgaaatggtttgccatctgcttcgtatgtggcgttttcttttctattcttggaactggattgctgtggcttccgggcggcataaagctttttgcagtgttttataccctcggcaatcttgctgcgttagccagtacatgctttttaatgggacctgtgaagcaactgaagaaaatgtttgaagcaacaagattgcttgcaacaattgttatgcttttgtgtttcatatttaccctgtgtgctgctctttggtggcataagaagggactggctgtgttattctgcatattgcagttcttgtcaatgacctggtatagcctgtcgtacatcccatatgcaagggatgcagttattaaatgctgttcttctctcctaagttgaaaatcagaaacttgtggaaaagagcacttgaatgttggtactctatgtttggtgaagtttgcttttccccataaaacactccaggaacaactgacgtgacagttgaagaccgttttgtactaagtctcattttgtatactggtaaaaactacatgcttgattaaaccattaaatgcttgtaactttaaattcattatgtgtcattaatatacttttccaaagataagatttttaatcactgccagttgtaaattatttttagccaatttttaaatcttttcaaagcagctttgaaatgtgaatatttaaaggtagacctgtgctgcaagataattaaacttttttgcttttaaaaaatgtctgcatttttaagattttttttactttaaatgtgaaacttattttaagctaaaaattgcttattatatgtaataaaaataatatataaatctttacaattttgaaataaacccatccttggaaaaataaaaaaaaaaaaaaaaaaaaaaaaaaaaaaaaatgtgtgtgtgtggggcggcttgtgggccccttggaaaagagttttttgaagaaccttgtgtgtggggacgacggggccccagaagagggtaacggcacaaacgtggccaaaaggggttccccaagaaggaaacgcggggacgataagaaacacaagggcgggggatatctcgccaacaagataaaaagagcgccgcggggaaaaacacggagaggttctcggaacaaatcgcgcaaagggagtctgaagaggactcaaaaagggggatcatttaacaggagggatcccgagagagagccaggataacaaattaggcccg

SEQ ID NO: 434731 - DNA, 1339 bp, Homo sapiens
agcgggggcgggaccggacttccggctggtctgtggggtttcgggttcggggtttcctggtgggcgtcaggggcaggcaacagagtggcggccgctacggccctggaacggggccatggagaagctgcggcgagtcctgagcggccaggacgacgaggagcagggcctgactgcgcaggtcctggatgcctcatcccttagtttcaacaccagattgaaatggtttgccatctgcttcgtatgtggcgttttcttttctattcttggaactggattgctgtggcttccgggcggcataaagctttttgcagtgttttataccctcggcaatcttgctgcgttagccagtacatgctttttaatgggacctgtgaagcaactgaagaaaatgtttgaagcaacaagattgcttgcaacaattgttatgcttgtatagcctgtcgtacatcccatatgcaagggatgcagttattaaatgctgttcttctctcctaagttgaaaatcagaaacttgtggaaaagagcacttgaatgttggtactctatgtttggtgaagtttgcttttccccataaaacactccaggaacaactgacgtgacagttgaagaccgttttgtactaagtctcattttgtatactggtaaaaactacatgcttgattaaaccattaaatgcttgtaactttaaattcattatgtgtcattaatatacttttccaaagataagatttttaatcactgccagttgtaaattatttttagccaatttttaaatcttttcaaagcagctttgaaatgtgaatatttaaaggtagacctgtgctgcaagataattaaacttttttgcttttaaaaaatgtctgcatttttaagattttttttactttaaatgtgaaacttattttaagctaaaaattgcttattatatgtaataaaaataatatataaatctttacaattttgaaataaacccatccttggaaaaataaaaaaaaaaaaaaaaaaaaaaaaaaaaaaaaatgtgtgtgtgtggggcggcttgtgggccccttggaaaagagttttttgaagaaccttgtgtgtggggacgacggggccccagaagagggtaacggcacaaacgtggccaaaaggggttccccaagaaggaaacgcggggacgataagaaacacaagggcgggggatatctcgccaacaagataaaaagagcgccgcggggaaaaacacggagaggttctcggaacaaatcgcgcaaagggagtctgaagaggactcaaaaagggggatcatttaacaggagggatcccgagagagagccaggataacaaattaggcccg

SEQ ID NO: 434732 - DNA, 725 bp, Homo sapiens
agcgggggcgggaccggacttccggctggtctgtggggtttcgggttcggggtttcctggtgggcgtcaggggcaggcaacagagtggcggccgctacggccctggaacggggccatggagaagctgcggcgagtcctgagcggccaggacgacgaggagcagggcctgactgcgcaggtcctggatgcctcatcccttagtttcaacaccagattgaaatggtttgccatctgcttcgtatgtggcgttttcttttctattcttggaactggattgctgtggcttccgggcggcataaagctttttgcagtgttttataccctcggcaatcttgctgcgttagccagtacatgctttttaatgggacctgtgaagcaactgaagaaaatgtttgaagcaacaagattgcttgcaacaattgttatgcttttgtgtttcatatttaccctgtgtgctgctctttgggtaagttatgtcagccctactggctttcagttaactgtgtgccccccaccccagctgacgtgtcatcacaccattatcttaaaatagctcatctgtttttttaaaactctctaaagattaggtgttcctaaaatttgacatgttaccatccagctagttgctaaaaatgccatagattctactgtctacagcatagaggtagtcagtgaacacacatgtgcacacatgctcacccacccagctggtggctaaatgtgcc

SEQ ID NO: 434733 - DNA, 911 bp, Homo sapiens
aaggaaaggggtttgcctgaagaagggaagacagtcctctaaaggtgtattggatcaccacctcttatcagatagaaactatcttcagcatttaaacagtggttctgttttagagtgtacctagcacattttgaaataccctagagtctgttttctctaagcacctggacagggctttgcaggtgtccttgacatatgccctcagcttgacccattgagtggacctagtttgaccaccatctcttatattccgcatgctctttaatgacattgaatatttacttgtctttgccttattttcttaattcattcgtagcttgctcctgagccttaaattactttgaagtgtattacacatcctttgtatcctctatggaatctcattcatagtagggtctgtgataaacaattgattggatagtgaatatctcttacaggcatgtaaggaggaatcaagaagctgtgacatattctgaggacctccaaagaacaacttgctactgactggacttctctcatcttttagcatgtgaagttttgcaaatataatccactttgctctgaatgtcctgacacctgcttcagagctcaagattcagactccagcctgaatgttatttcctgagaaaatccctccctgacccactgtgctggttaggtccacctgctaatcacatccacaaaaccctctgcttctccttcaaaacactcatctcctctgtaatgatcagatgaactcatgtctttctcagaggacaataaatttgatgaatggggaccatggaagtttatttccatctgtatccctacatctaactcatctgctggtacctatttgtcatgtatttaataagtacaactacctatgccaccctgcaataaaatgatattgttactttctcttctttagc

SEQ ID NO: 434734 - DNA, 1465 bp, Homo sapiens
gtagtgacgtcacgagatttggagctcgcgggaaaacttgtctctgcgttgtggggaggacgcgcgctcgcgcgggattttcaagcgtaggcccccgggaactcgagctgccatgagcctctgggtggacaagtatcggccctgctccttgggacggctggactatcacaaggagcaggcggcccagctgcggaacctggtgcagtgtggtgactttcctcatctgttagtgtacggaccatcaggtgctggaaaaaagacaagaattatgtgtattctacgtgaactttatggtgttggagtggaaaaattgagaattgaacatcagaccatcacaactccatctaaaaaaaaaattgaaattagcaccattgcaagtaactaccaccttgaagttaatcctagtgatgctggaaatagtgaccgagtagtcattcaggagatgttgaaaacagtggcacaatcacaacaacttgaaacaaactctcaaagggattttaaagtggtattattgacagaagttgacaaactcaccaaagatgctcagcatgccttgcgaagaaccatggaaaaatatatgtctacctgcagattgatcttgtgctgcaattctacatctaaagtgatcccacctattcgtagtaggtgcttggcggttcgtgtgcctgctcccagcattgaagatatttgccacgtgttatctactgtgtgtaagaaggaaggtctgaatcttccttcacaactggctcatagacttgcagagaagtcttgtagaaatctcagaaaagccctgcttatgtgtgaagcctgcagagtgcaacaatatccttttactgcagatcaagaaatccctgagacagattgggaggtgtatctgagggagactgcaaatgctattgtcagtcagcaaactccacaaaggctccttgaagttcgtggaaggctgtatgagcttctaactcattgtattcctcctgagataataatgaaggcatgtaaggaggaatcaagaagctgtgacatattctgaggacctccaaagaacaacttgctactgactggacttctctcatcttttagcatgtgaagttttgcaaatataatccactttgctctgaatgtcctgacacctgcttcagagctcaagattcagactccagcctgaatgttatttcctgagaaaatccctccctgacccactgtgctggttaggtccacctgctaatcacatccacaaaaccctctgcttctccttcaaaacactcatctcctctgtaatgatcagatgaactcatgtctttctcagaggacaataaatttgatgaatggggaccatggaagtttatttccatctgtatccctacatctaactcatctgctggtacctatttgtcatgtatttaataagtacaactacctatgccaccctgcaataaaatgatattgttactttctcttctttagc

SEQ ID NO: 434735 - DNA, 1431 bp, Homo sapiens
aaattactgattatttttgtttagggccttctctcagaactgttacataattgtgatggacaactgaaaggggaggtggcacaaatggcagcttactatgagcatcgtctacagctgggtagcaaagccatttatcacttggaagcgtttgtggccaaattcatggcactttataagaagttcatggaggatggattggaaggcatgatgttctgacttctgtcagttattcttgcaaagatttctcagtatcagtatttacatacagcttatattaaaagagctgtgggtaaattaactgaacttaatcatgtcgtatttgcgtttttttggtaataacttctctgtgaactattaatcatcctctgagttaaataattgctcctatactattgaagtatgtagttttgtacataacttagagactttagagtctaagaaaatgatcttaatttactttaagcattggttattcaagtattcattgttgatcctcctattctcttccgtctaatctctcacctgctaaaggagatttacacattagaaagcaaagattattttcatttatccagatgaccattttctgccacaggtaacatgattgtttgacacaccattatatttaattctagtttctctcaatgaataattgtatttttgtaggaaatgtaagatttcattctgaaacataattattggtatggacaaaattgcagataccatttctgttgaggctgcagatttccaacttttatttcagtggttcagattagtattaggtcggtactaagaaataagcatgttttcactaatttaagtacttgagactcttgaagaaaattcagaatgaagttctggagaaaggtatgttactgtagtaattactctttgaacaggttttgtgttttgtcattagctctgccctttttaattaaatattttggttcatggaccaaagggtttacttgacaaatttgtgtgacagactccgaacaattcctttactacgaagtataatttataaaataaaatatacccattttaagggtacagtttgatttttgaccagtgaaactatgatcccaatcaaggtatagatgccgtcaccccaaaaagttccctccatatccctttgcagtcagttcatccctaccctggcccagatgatcactgatcttgtcattatagatgagttttgccagttcaagaatttaatggaatcagatattgtaagcattcttgtgtaatacttcattctctctcattattgagattcatccatattgttgaatgtttcactagttaatgtttattgttcaatatttttgtatatacttttaaagcctattcacttgctgatggatctttggtttgtttccaggtttggttattatgaataaagttgctgtgaatacttacgtgtaagtc

SEQ ID NO: 434736 - DNA, 2398 bp, Homo sapiens
gtagtgacgtcacgagatttggagctcgcgggaaaacttgtctctgcgttgtggggaggacgcgcgctcgcgcgggattttcaagcgtaggcccccgggaactcgagctgccatgagcctctgggtggacaagtatcggccctgctccttgggacggctggactatcacaaggagcaggcggcccagctgcggaacctggtgcagtgtggtgactttcctcatctgttagtgtacggaccatcaggtgctggaaaaaagacaagaattatgtgtattctacgtgaactttatggtgttggagtggaaaaattgagaattgaacatcagaccatcacaactccatctaaaaaaaaaattgaaattagcaccattgcaagtaactaccaccttgaagttaatcctagtgatgctggaaatagtgaccgagtagtcattcaggagatgttgaaaacagtggcacaatcacaacaacttgaaacaaactctcaaagggattttaaagtggtattattgacagaagttgacaaactcaccaaagatgctcagcatgccttgcgaagaaccatggaaaaatatatgtctacctgcagattgatcttgtgctgcaattctacatctaaagtgatcccacctattcgtagtaggtgcttggcggttcgtgtgcctgctcccagcattgaagatatttgccacgtgttatctactgtgtgtaagaaggaaggtctgaatcttccttcacaactggctcatagacttgcagagaagtcttgtagaaatctcagaaaagccctgcttatgtgtgaagcctgcagagtgcaacaatatccttttactgcagatcaagaaatccctgagacagattgggaggtgtatctgagggagactgcaaatgctattgtcagtcagcaaactccacaaaggctccttgaagttcgtggaaggctgtatgagcttctaactcattgtattcctcctgagataataatgaagggccttctctcagaactgttacataattgtgatggacaactgaaaggggaggtggcacaaatggcagcttactatgagcatcgtctacagctgggtagcaaagccatttatcacttggaagcgtttgtggccaaattcatggcactttataagaagttcatggaggatggattggaaggcatgatgttctgacttctgtcagttattcttgcaaagatttctcagtatcagtatttacatacagcttatattaaaagagctgtgggtaaattaactgaacttaatcatgtcgtatttgcgtttttttggtaataacttctctgtgaactattaatcatcctctgagttaaataattgctcctatactattgaagtatgtagttttgtacataacttagagactttagagtctaagaaaatgatcttaatttactttaagcattggttattcaagtattcattgttgatcctcctattctcttccgtctaatctctcacctgctaaaggagatttacacattagaaagcaaagattattttcatttatccagatgaccattttctgccacaggtaacatgattgtttgacacaccattatatttaattctagtttctctcaatgaataattgtatttttgtaggaaatgtaagatttcattctgaaacataattattggtatggacaaaattgcagataccatttctgttgaggctgcagatttccaacttttatttcagtggttcagattagtattaggtcggtactaagaaataagcatgttttcactaatttaagtacttgagactcttgaagaaaattcagaatgaagttctggagaaaggtatgttactgtagtaattactctttgaacaggttttgtgttttgtcattagctctgccctttttaattaaatattttggttcatggaccaaagggtttacttgacaaatttgtgtgacagactccgaacaattcctttactacgaagtataatttataaaataaaatatacccattttaagggtacagtttgatttttgaccagtgaaactatgatcccaatcaaggtatagatgccgtcaccccaaaaagttccctccatatccctttgcagtcagttcatccctaccctggcccagatgatcactgatcttgtcattatagatgagttttgccagttcaagaatttaatggaatcagatattgtaagcattcttgtgtaatacttcattctctctcattattgagattcatccatattgttgaatgtttcactagttaatgtttattgttcaatatttttgtatatacttttaaagcctattcacttgctgatggatctttggtttgtttccaggtttggttattatgaataaagttgctgtgaatacttacgtgtaagtc

SEQ ID NO: 434737 - DNA, 4352 bp, Homo sapiens
cgaaatgagagcaaaaagggagagagcaggaaagcgagcacaggcgagtacagtatacaaagtgttttgagtttctgactggcgtgccggaaagatcatgttagcacacccagaaacttcacacgatgcagaccccagaggtaccagcagaaaggtcccctcgtagacggagtatctcagggaccagtacatcagagaaacccaactccatggacactgcaaatacctcacccttcaaagtaccaggattcttcagcaagcgcctgaaaggctccatcaagaggaccaaaagccagtcaaagcttgacagaaacacgagctttcggcttccatcccttcgcagtacagatgacaggtctcgtgggctgcctaaactaaaagagtcacgttcccatgaatccttgctgagcccatgcagcacagtggaatgtctggatcttggtagaggggaacctgtatcagtgaaaccacttcatagtagcatccttggacaagacttctgctttgaggttacctacttaagtggaagtaaatgcttcagctgtaattctgcttctgagagagacaagtggatggaaaaccttcgcaggacagttcaacctaataaggacaattgcaggcgagctgaaaatgttcttcgtttatggatcattgaagccaaggaccttgcccctaaaaagaaatatttctgcgaactgtgccttgatgataccctctttgctcgtacaaccagcaagaccaaagcagacaatattttctggggcgaacattttgaattcttcagccttccacctcttcatagtatcacagttcacatttacaaggatgtggaaaaaaagaaaaaaaaggacaagaataattatgtagggctagtcaacatccccactgccagtgtgactggtcgccaatttgtagaaaagtggtatccagtgagtacacctacacccaacaaaggaaagacaggaggaccttctattcggattaaatcacgtttccaaactatcaccattctgcctatggagcaatacaaagaatttgcagaatttgtcaccagcaactacaccatgctgtgttctgtccttgagccagtaattagtgtgagaaataaagaggagttggcttgtgccttagtgcacattcttcaaagtactggcagagccaaggattttctgactgacttggtgatgtctgaggtggatcgttgtggagagcatgatgtcttgatcttcagagagaacactattgccaccaaatccattgaggaatacctcaagttggtgggacaacagtatcttcatgacgcactgggggagtttatcaaagctttgtatgagtccgatgagaactgtgaagtggatcccagcaaatgttcatctagtgaactgatagaccatcagagcaacctgaaaatgtgctgtgagctggctttctgcaagatcatcaactcttactgtgttttccctcgtgagttgaaagaagtgtttgcatcatggaagcagcagtgcctgaaccgtggcaagcaagacatcagcgagaggctcatcagtgcctcattatttctccgttttctgtgtccagccattatgtctcccagtcttttcaaccttatgcaggagtatcctgatgaccgcacatctcggactctaactcttattgccaaggtcattcagaacctggccaactttgccaagtttggtaacaaagaggaatacatggcattcatgaatgattttttagaacatgaatggggtggaatgaagcgctttcttttggagatctctaatccagacaccatctcaaacaccccaggctttgatggttacattgatctgggccgagagctttcagttttgcattccttactgtgggaagtagtttcccaacttgataagggtgaaaattccttcctacaggcgaccgtggcaaaattggggcctctccctcgtgttcttgctgatattaccaagtcattgactaatcctacgccaatacaacagcaactgagacgcttcactgaacataactccagtccaaatgtcagtggaagcctctcctctgggctgcagaaaatatttgaagaccccactgacagtgatttgcataaactaaaatctccaagccaggacaacacagacagctacttcagagggaaaacattattgctggttcagcaagcctcctctcagagcatgacttattctgaaaaggatgaaagggaaagtagccttcctaatggtcggagcgtctccctcatggacctccaggacactcatgctgctcaagtggagcatgcatctgtcatgcttgatgtgcctatacgcttgaccggaagccagctttccataacccaggtggccagcatcaaacagctgcgggaaacccagagcactccccaaagtgcaccccaagtgagaaggcccctgcacccagccttgaaccagccaggtggccttcagcccttgtcgttccagaaccctgtctatcacctcaataacccaattccagcaatgccaaaggcctctatagattccagtttggagaacctaagcactgccagttccagaagccaaagtaacagtgaagacttcaagctcagtggacccagcaatagcagcatggaagatttcactaaacgtagcactcagagtgaggacttctccaggcggcacacggtgccagatagacacatacctcttgctttgccacgacaaaatagtactgggcaggcccagatccgaaaagtggaccagggtgggttaggtgcccgagccaaagccccaccatccctgccacacagtgcttctttacgtagcaccgggagcatgtcagtggtgtccgcagccctggtggccgaacctgtgcagaatgggagccggtcccggcagcagtcctcttcctccagagagagccctgttcccaaagttagagcaatccagagacaacagacacagcaggttcagtcacctgtggactctgccacaatgtccccagtagagaggacagcagcctgggttctgaacaatgggcagtatgaagaggatgtggaagaaactgagcaaaatctagatgaagccaagcatgctgagaagtatgaacaagaaattactaaactgaaggagcgcctgagagtttccagccggcgactggaggaatatgaacgccgcttgctggtgcaggagcagcagatgcagaagctgctgctggaatacaaggcccgactggaggacagcgaggagcggctccgaagacagcaggaagaaaaagatagccagatgaaaagcatcatcagcaggctaatggctgtggaagaggaactgaagaaggatcatgctgagatgcaagcagttattgatgcaaagcagaaaataattgatgcacaggaaaaacggatcgtgtccctggattcagccaacaccagactgatgagcgcgctgacccaagtgaaggagcggtacagcatgcaggtccgcaatggcatctcccccaccaaccccaccaagctttccatcacggagaatggtgaattcaaaaacagcagctgctgacgggctttgtctgtggaaggagacagaaggaaattgacccactctcctatctccagacctttacctagcccctccaggtttacagaatgttgctacttcacaatggcgatgtggtgagaaactcctgaatgaagaaaggaaccttgtctttcagggcataaggcggcgacttccaaggtcaatgcttttcccccacatctctatgtacatagggaacttagttctgggccatgtacagaaaatatcactgtaatataccaaaaggaagttaataatgtagattacctttttgattattgctatttttattattgttttcctcttgttgaaagcactgcagttgttacaggaagtaaagtaggaactgttgtgtgagcgagacatgagcctgtaggttcagtaggtagagaccaagcatctatctgatagaagcacatggagtgcaataggacattgtgagaaggaatttttcagggattcatctactagtttaaaaaccccactctggccctcttgtcctttcagaaaacatgcaaataccaagatccatacaaaacaataatttattccactgatcaaccaagactggttctggttggacagctaatctgatttggggattcactgtttcagaggacacagacaaaagctgttgcatcaaaactggactttaggagtaatttctattgaactcctgtcaatatgtttatttcctctgtctacagcagatgggagtcttctcttttagacaggggctttttgtttttaaccccaattgtaataaagggtgttctttttcctctttag

SEQ ID NO: 434738 - DNA, 6044 bp, Homo sapiens
ccaggttaagggcgccctctggtgggtactcgggaaactgacccttcgaaagggacacggaccagttctcctcaaggcatcgccctttggtggaatctgtctgctggctcctgtcccccgttccacaggtatctccgttctccttgttgagcaataccaactggctgtctgtgaggatgcaatacttccgctcccacgttgttgtctcggtgtagggtgactgaccacaagacagacggtggctgggtggtcctttcacatcgtacacccggacccagctctgttgctggcacacggactccagaaggatccgatccaacatgccaccggcgacggctccactgactgggacaaccgcgtccaggtcctccgggggcagcggcgagtcggactccagcgccgggaacatctccggccaggacagcgcctcggcgagcctcccctcccgggttcttctgcgtcctctcccgggagggacccacacacacctgagcccggacccacccttggtcggggccacgctggatcctcctcccggcctgggtcccgcccgccgactgcaggtgggctgcatcgcccgagcctcgggcagtgggcgacggggaaggaggtgagaggtgtccgcgccggctgccgctcgggtccctgccctcgctgcgcgctctcctcctccccttcccgcaggcagggcgcggagccgcgcgccagcccgccccgaagccgccgcctcgtccccctcccgcctcggggcaccatggagctctctccgtcgtccggaggagccgcggaggcgctgtcctggccggagatgttcccggcgctggagtccgactcgccgctgcccccggaggacctggacgcggttgtcccagtcagtggagccgtcgccggtggcatgttggatcggatccttctggagtccgtgtgccagcaacagagctgggtccgggtgtacgatgtgaaaggaccacccacccaccgtctgtcttgtggtcagtcaccctacaccgagacaacaacgtgggagcggaagtattgcatcctcacagacagccagttggtattgctcaacaaggagaaggagatacctgtggaagggggacaggagcagcagacagattccaccaaagggcgatgcctgaggagaactgtcagtgtcccttccgagggtcagtttcccgagtacccaccagagggcgccactaaactggaggtaccagcagaaaggtcccctcgtagacggagtatctcagggaccagtacatcagagaaacccaactccatggacactgcaaatacctcacccttcaaagtaccaggattcttcagcaagcgcctgaaaggctccatcaagaggaccaaaagccagtcaaagcttgacagaaacacgagctttcggcttccatcccttcgcagtacagatgacaggtctcgtgggctgcctaaactaaaagagtcacgttcccatgaatccttgctgagcccatgcagcacagtggaatgtctggatcttggtagaggggaacctgtatcagtgaaaccacttcatagtagcatccttggacaagacttctgctttgaggttacctacttaagtggaagtaaatgcttcagctgtaattctgcttctgagagagacaagtggatggaaaaccttcgcaggacagttcaacctaataaggacaattgcaggcgagctgaaaatgttcttcgtttatggatcattgaagccaaggaccttgcccctaaaaagaaatatttctgcgaactgtgccttgatgataccctctttgctcgtacaaccagcaagaccaaagcagacaatattttctggggcgaacattttgaattcttcagccttccacctcttcatagtatcacagttcacatttacaaggatgtggaaaaaaagaaaaaaaaggacaagaataattatgtagggctagtcaacatccccactgccagtgtgactggtcgccaatttgtagaaaagtggtatccagtgagtacacctacacccaacaaaggaaagacaggaggaccttctattcggattaaatcacgtttccaaactatcaccattctgcctatggagcaatacaaagaatttgcagaatttgtcaccagcaactacaccatgctgtgttctgtccttgagccagtaattagtgtgagaaataaagaggagttggcttgtgccttagtgcacattcttcaaagtactggcagagccaaggattttctgactgacttggtgatgtctgaggtggatcgttgtggagagcatgatgtcttgatcttcagagagaacactattgccaccaaatccattgaggaatacctcaagttggtgggacaacagtatcttcatgacgcactgggggagtttatcaaagctttgtatgagtccgatgagaactgtgaagtggatcccagcaaatgttcatctagtgaactgatagaccatcagagcaacctgaaaatgtgctgtgagctggctttctgcaagatcatcaactcttactgtgttttccctcgtgagttgaaagaagtgtttgcatcatggaagcagcagtgcctgaaccgtggcaagcaagacatcagcgagaggctcatcagtgcctcattatttctccgttttctgtgtccagccattatgtctcccagtcttttcaaccttatgcaggagtatcctgatgaccgcacatctcggactctaactcttattgccaaggtcattcagaacctggccaactttgccaagtttggtaacaaagaggaatacatggcattcatgaatgattttttagaacatgaatggggtggaatgaagcgctttcttttggagatctctaatccagacaccatctcaaacaccccaggctttgatggttacattgatctgggccgagagctttcagttttgcattccttactgtgggaagtagtttcccaacttgataagggtgaaaattccttcctacaggcgaccgtggcaaaattggggcctctccctcgtgttcttgctgatattaccaagtcattgactaatcctacgccaatacaacagcaactgagacgcttcactgaacataactccagtccaaatgtcagtggaagcctctcctctgggctgcagaaaatatttgaagaccccactgacagtgatttgcataaactaaaatctccaagccaggacaacacagacagctacttcagagggaaaacattattgctggttcagcaagcctcctctcagagcatgacttattctgaaaaggatgaaagggaaagtagccttcctaatggtcggagcgtctccctcatggacctccaggacactcatgctgctcaagtggagcatgcatctgtcatgcttgatgtgcctatacgcttgaccggaagccagctttccataacccaggtggccagcatcaaacagctgcgggaaacccagagcactccccaaagtgcaccccaagtgagaaggcccctgcacccagccttgaaccagccaggtggccttcagcccttgtcgttccagaaccctgtctatcacctcaataacccaattccagcaatgccaaaggcctctatagattccagtttggagaacctaagcactgccagttccagaagccaaagtaacagtgaagacttcaagctcagtggacccagcaatagcagcatggaagatttcactaaacgtagcactcagagtgaggacttctccaggcggcacacggtgccagatagacacatacctcttgctttgccacgacaaaatagtactgggcaggcccagatccgaaaagtggaccagggtgggttaggtgcccgagccaaagccccaccatccctgccacacagtgcttctttacgtagcaccgggagcatgtcagtggtgtccgcagccctggtggccgaacctgtgcagaatgggagccggtcccggcagcagtcctcttcctccagagagagccctgttcccaaagttagagcaatccagagacaacagacacagcaggttcagtcacctgtggactctgccacaatgtccccagtagagaggacagcagcctgggttctgaacaatgggcagtatgaagaggatgtggaagaaactgagcaaaatctagatgaagccaagcatgctgagaagtatgaacaagaaattactaaactgaaggagcgcctgagagtttccagccggcgactggaggaatatgaacgccgcttgctggtgcaggagcagcagatgcagaagctgctgctggaatacaaggcccgactggaggacagcgaggagcggctccgaagacagcaggaagaaaaagatagccagatgaaaagcatcatcagcaggctaatggctgtggaagaggaactgaagaaggatcatgctgagatgcaagcagttattgatgcaaagcagaaaataattgatgcacaggtcataaatggagatgagattattcaaacaggaaaaacggatcgtgtccctggattcagccaacaccagactgatgagcgcgctgacccaagtgaaggagcggtacagcatgcaggtccgcaatggcatctcccccaccaaccccaccaagctttccatcacggagaatggtgaattcaaaaacagcagctgctgacgggctttgtctgtggaaggagacagaaggaaattgacccactctcctatctccagacctttacctagcccctccaggtttacagaatgttgctacttcacaatggcgatgtggtgagaaactcctgaatgaagaaaggaaccttgtctttcagggcataaggcggcgacttccaaggtcaatgcttttcccccacatctctatgtacatagggaacttagttctgggccatgtacagaaaatatcactgtaatataccaaaaggaagttaataatgtagattacctttttgattattgctatttttattattgttttcctcttgttgaaagcactgcagttgttacaggaagtaaagtaggaactgttgtgtgagcgagacatgagcctgtaggttcagtaggtagagaccaagcatctatctgatagaagcacatggagtgcaataggacattgtgagaaggaatttttcagggattcatctactagtttaaaaaccccactctggccctcttgtcctttcagaaaacatgcaaataccaagatccatacaaaacaataatttattccactgatcaaccaagactggttctggttggacagctaatctgatttggggattcactgtttcagaggacacagacaaaagctgttgcatcaaaactggactttaggagtaatttctattgaactcctgtcaatatgtttatttcctctgtctacagcagatgggagtcttctcttttagacaggggctttttgtttttaaccccaattgtaataaagggtgttctttttcctctttagagtttacaaaactataaatatttgtgtctccacataccatcttcatcttcacacattcactgtgctttcctccccatagtgggagctgtcatcaccaacagggtttactctcccctggagaggttatttaaatagctgtccataagccatccagatcaacaccctttcttccatacagaaaagggctaaccataccacagctggaatctctgaatatttcctattaaaaattttttctatgtgttgttataatttttgtttgggataaagactctatccattgtactagcaaatctatggggggtaattttatctccatctttaacttttaaagtacttcttccccttatcccctcaataaagaaaggaaatccaaatttgaagcatcactctcttaaaagaaaaagaaaataatggaaagtgtcaggatggcacattccagttattattccaatgctcgtagatctgacaataatgacccaatttcaacacttgtcatccatagccttattttttcaacaggtctggaacgttattctttttcccagggggcagtctcttgagggacctgttaccacactgggtcct

SEQ ID NO: 434739 - DNA, 4339 bp, Homo sapiens
ccagcactttgggaggctgaggcaggtggatcacctgaggtcaggagttcaagaacagcctgaccaacatggtgaaacaccctctttgctcgtacaaccagcaagaccaaagcagacaatattttctggggcgaacattttgaattcttcagccttccacctcttcatagtatcacagttcacatttacaaggatgtggaaaaaaagaaaaaaaaggacaagaataattatgtagggctagtcaacatccccactgccagtgtgactggtcgccaatttgtagaaaagtggtatccagtgagtacacctacacccaacaaaggaaagacaggaggaccttctattcggattaaatcacgtttccaaactatcaccattctgcctatggagcaatacaaagaatttgcagaatttgtcaccagcaactacaccatgctgtgttctgtccttgagccagtaattagtgtgagaaataaagaggagttggcttgtgccttagtgcacattcttcaaagtactggcagagccaaggattttctgactgacttggtgatgtctgaggtggatcgttgtggagagcatgatgtcttgatcttcagagagaacactattgccaccaaatccattgaggaatacctcaagttggtgggacaacagtatcttcatgacgcactgggggagtttatcaaagctttgtatgagtccgatgagaactgtgaagtggatcccagcaaatgttcatctagtgaactgatagaccatcagagcaacctgaaaatgtgctgtgagctggctttctgcaagatcatcaactcttactgtgttttccctcgtgagttgaaagaagtgtttgcatcatggaagcagcagtgcctgaaccgtggcaagcaagacatcagcgagaggctcatcagtgcctcattatttctccgttttctgtgtccagccattatgtctcccagtcttttcaaccttatgcaggagtatcctgatgaccgcacatctcggactctaactcttattgccaaggtcattcagaacctggccaactttgccaagtttggtaacaaagaggaatacatggcattcatgaatgattttttagaacatgaatggggtggaatgaagcgctttcttttggagatctctaatccagacaccatctcaaacaccccaggctttgatggttacattgatctgggccgagagctttcagttttgcattccttactgtgggaagtagtttcccaacttgataagggtgaaaattccttcctacaggcgaccgtggcaaaattggggcctctccctcgtgttcttgctgatattaccaagtcattgactaatcctacgccaatacaacagcaactgagacgcttcactgaacataactccagtccaaatgtcagtggaagcctctcctctgggctgcagaaaatatttgaagaccccactgacagtgatttgcataaactaaaatctccaagccaggacaacacagacagctacttcagagggaaaacattattgctggttcagcaagcctcctctcagagcatgacttattctgaaaaggatgaaagggaaagtagccttcctaatggtcggagcgtctccctcatggacctccaggacactcatgctgctcaagtggagcatgcatctgtcatgcttgatgtgcctatacgcttgaccggaagccagctttccataacccaggtggccagcatcaaacagctgcgggaaacccagagcactccccaaagtgcaccccaagtgagaaggcccctgcacccagccttgaaccagccaggtggccttcagcccttgtcgttccagaaccctgtctatcacctcaataacccaattccagcaatgccaaaggcctctatagattccagtttggagaacctaagcactgccagttccagaagccaaagtaacagtgaagacttcaagctcagtggacccagcaatagcagcatggaagatttcactaaacgtagcactcagagtgaggacttctccaggcggcacacggtgccagatagacacatacctcttgctttgccacgacaaaatagtactgggcaggcccagatccgaaaagtggaccagggtgggttaggtgcccgagccaaagccccaccatccctgccacacagtgcttctttacgtagcaccgggagcatgtcagtggtgtccgcagccctggtggccgaacctgtgcagaatgggagccggtcccggcagcagtcctcttcctccagagagagccctgttcccaaagttagagcaatccagagacaacagacacagcaggttcagtcacctgtggactctgccacaatgtccccagtagagaggacagcagcctgggttctgaacaatgggcagtatgaagaggatgtggaagaaactgagcaaaatctagatgaagccaagcatgctgagaagtatgaacaagaaattactaaactgaaggagcgcctgagagtttccagccggcgactggaggaatatgaacgccgcttgctggtgcaggagcagcagatgcagaagctgctgctggaatacaaggcccgactggaggacagcgaggagcggctccgaagacagcaggaagaaaaagatagccagatgaaaagcatcatcagcaggctaatggctgtggaagaggaactgaagaaggatcatgctgagatgcaagcagttattgatgcaaagcagaaaataattgatgcacaggtcataaatggagatgagattattcaaacaggaaaaacggatcgtgtccctggattcagccaacaccagactgatgagcgcgctgacccaagtgaaggagcggtacagcatgcaggtccgcaatggcatctcccccaccaaccccaccaagctttccatcacggagaatggtgaattcaaaaacagcagctgctgacgggctttgtctgtggaaggagacagaaggaaattgacccactctcctatctccagacctttacctagcccctccaggtttacagaatgttgctacttcacaatggcgatgtggtgagaaactcctgaatgaagaaaggaaccttgtctttcagggcataaggcggcgacttccaaggtcaatgcttttcccccacatctctatgtacatagggaacttagttctgggccatgtacagaaaatatcactgtaatataccaaaaggaagttaataatgtagattacctttttgattattgctatttttattattgttttcctcttgttgaaagcactgcagttgttacaggaagtaaagtaggaactgttgtgtgagcgagacatgagcctgtaggttcagtaggtagagaccaagcatctatctgatagaagcacatggagtgcaataggacattgtgagaaggaatttttcagggattcatctactagtttaaaaaccccactctggccctcttgtcctttcagaaaacatgcaaataccaagatccatacaaaacaataatttattccactgatcaaccaagactggttctggttggacagctaatctgatttggggattcactgtttcagaggacacagacaaaagctgttgcatcaaaactggactttaggagtaatttctattgaactcctgtcaatatgtttatttcctctgtctacagcagatgggagtcttctcttttagacaggggctttttgtttttaaccccaattgtaataaagggtgttctttttcctctttagagtttacaaaactataaatatttgtgtctccacataccatcttcatcttcacacattcactgtgctttcctccccatagtgggagctgtcatcaccaacagggtttactctcccctggagaggttatttaaatagctgtccataagccatccagatcaacaccctttcttccatacagaaaagggctaaccataccacagctggaatctctgaatatttcctattaaaaattttttctatgtgttgttataatttttgtttgggataaagactctatccattgtactagcaaatctatggggggtaattttatctccatctttaacttttaaagtacttcttccccttatcccctcaataaagaaaggaaatccaaatttgaagcatcactctcttaaaagaaaaagaaaataatggaaagtgtcaggatggcacattccagttattattccaatgctcgtagatctgacaataatgacccaatttcaacacttgtcatccatagccttattttttcaacaggtctggaacgttattctttttcccagggggcagtctcttgagggacctgttaccacactgggtcct

SEQ ID NO: 434740 - DNA, 468 bp, Homo sapiens
ccaggtgcccagtaaactggttttcatgtctctcagcagccctgtgctcccaggaaaatcttgtccctgaattcagcctctgcctctttttgagtcatttcatgctacaaggcacaggcctgcatcagccactttctaacaggaactgcaaaaggatgagcactcctttggtgagtggcagaagcacctatcctggaccttgtagcttaggggccatagggatcctagtggtgatcataaggatccatttcttaaatatcagaccagagaatgtgccacctttcacccctgagcatgaggagacactgtggctcccaggatctctctatgtgactcaggtggagaacagagaagggcttcctcctatgagaagcaaaagcagctgcctagttactgttgcaagtgatatctccgctgtgttaaattacaggtcataaatggagatgagattattcaaacaggcaagta

SEQ ID NO: 434741 - DNA, 246 bp, Homo sapiens
ctggtttattgtgaaaaaccagtaactttacagttcagtggaagatcctaaatttggggttcttaatgatgtttcaactttcctccttttttccagaggtaccagcagaaaggtcccctcgtagacggagtatctcagggaccagtacatcagagaaacccaactccatggacactgcaaatacctcacccttcaaagtaccagtaagtgtttatcttctttataagaatattttacttttccttt

SEQ ID NO: 434742 - DNA, 546 bp, Homo sapiens
tcctcctatgagaagcaaaagcagctgcctagttactgttgcaagtgatatctccgctgtgttaaattacaggtcataaatggagatgagattattcaaacaggcaagtaaaccccgcgtccgttctctagctgagcagttcccagccctggcccagtgcactggcctcctacacattccagctcctgccactccccacatgggaatccttcctgtcaggtgtggactagattgctttcccttacaatccaggcagaattgaaatgtccgagcatcttttgtcaactgaacttgactttcataagtctctatttgattttttttaacttttttgttttattttgagaggttggcaatagggggaaatacaaagggagtttctttatgtggaaactttcagctgtttagtaggggggctgtttgtcttcagttgttacctttttaggcagtaagtaattacagtcattcttaggctttttgaccctttaaaaatcaaattttttatgaattatttatttttggatgaaccctggagaatcctaattt

SEQ ID NO: 434743 - DNA, 814 bp, Homo sapiens
gaaggcggctccgaggaggtgggagggcgagcctcccctcccgggttcttctgcgtcctctcccgggagggacccacacacacctgagcccggacccacccttggtcggggccacgctggatcctcctcccggcctgggtcccgcccgccgactgcaggtgggctgcatcgcccgagcctcgggcagtgggcgacggggaaggaggtgagaggtgtccgcgccggctgccgctcgggtccctgccctcgctgcgcgctctcctcctccccttcccgcaggcagggcgcggagccgcgcgccagcccgccccgaagccgccgcctcgtccccctcccgcctcggggcaccatggagctctctccgtcgtccggaggagccgcggaggcgctgtcctggccggagatgttcccggcgctggagtccgactcgccgctgcccccggaggacctggacgcggttgtcccagtcagtggagccgtcgccggtggcatgttggatcggatccttctggagtccgtgtgccagcaacagagctgggtccgggtgtacggagaccgatgattaacagcaaaaacaatagccaacgccatagacatttcagctggttcattttacacaattctgactctgctcagtgggtgccaaaactgttgctcccagatcaattgcagacaagagcagagctttcactggaaatttcaaacaggtgggatcaacattctgaaggatttctttgaagaattttaacaataaatgaacatggttttaccagtacatcctgaagacaaagtacaatcaaatcactggctacca

SEQ ID NO: 434744 - DNA, 1446 bp, Homo sapiens
ccaggttaagggcgccctctggtgggtactcgggaaactgacccttcgaaagggacacggaccagttctcctcaaggcatcgccctttggtggaatctgtctgctggctcctgtcccccgttccacaggtatctccgttctccttgttgagcaataccaactggctgtctgtgaggatgcaatacttccgctcccacgttgttgtctcggtgtagggtgactgaccacaagacagacggtggctgggtggtcctttcacatcgtacacccggacccagctctgttgctggcacacggactccagaaggatccgatccaacatgccaccggcgacggctccactgactgggacaaccgcgtccaggtcctccgggggcagcggcgagtcggactccagcgccgggaacatctccggccaggacagcgcctcggcgagcctcccctcccgggttcttctgcgtcctctcccgggagggacccacacacacctgagcccggacccacccttggtcggggccacgctggatcctcctcccggcctgggtcccgcccgccgactgcaggtgggctgcatcgcccgagcctcgggcagtgggcgacggggaaggaggtgagaggtgtccgcgccggctgccgctcgggtccctgccctcgctgcgcgctctcctcctccccttcccgcaggcagggcgcggagccgcgcgccagcccgccccgaagccgccgcctcgtccccctcccgcctcggggcaccatggagctctctccgtcgtccggaggagccgcggaggcgctgtcctggccggagatgttcccggcgctggagtccgactcgccgctgcccccggaggacctggacgcggttgtcccagtcagtggagccgtcgccggtggcatgttggatcggatccttctggagtccgtgtgccagcaacagagctgggtccgggtgtacgatgtgaaaggaccacccacccaccgtctgtcttgtggtcagtcaccctacaccgagacaacaacgtgggagcggaagtattgcatcctcacagacagccagttggtattgctcaacaaggagaaggagatacctgtggaagggggacaggagcagcagacagattccaccaaagggcgatgcctgaggagaactgtcagtgtcccttccgagggtcagtttcccgagtacccaccagagggcgccactaaactggaggtaccagcagaaaggtcccctcgtagacggagtatctcagggaccagtacatcagagaaacccaactccatggacactgcaaatacctcacccttcaaagtaccaggattcttcagcaagcgcctgaaaggctccatcaagaggaccaaaagccagtcaaagcttgacagaaacacgagctttcggcttccatcccttcgcagtacagatgacaggtaggaagttaactttct

SEQ ID NO: 434745 - DNA, 1039 bp, Homo sapiens
attctttggactaacagccctagaactgctttgaggtcttttgaatggaactcggggaacctagttcgttggtgcacaccggcgacaatttttcgattattcagcagaactgataaagtatttccttgagaggttcagcgcgcgcacgcgccccctcggtttgtgttgagtaacgcgcgcactatgtcattcagtgcccgcacatcgttgttgctcaagactcaagacgttgcaagaaaatggctaacgaagcgacgagagaacggcggcgcggcggacgttgctgcggtaggacgtgcccgacctcccagtccacacaagggagcgcaccgcccaagtggccgcggcccgctcgaccgagcgcgccgctgccggtccctgcgccaacgcgcacgcgcggccgtcatccgggtgctggcggctgctgcaggttgcgctagggtggcggaccgggggaggggccagcggctcattgtgcgcagcgctgcgcggcgccggcggccgccgaggcctgggtggaagttggcgctgctgccgccgccctgcagcccactcgctgcctcggcagcgcgctgctcttctaagatggctgccgctaccggtgcggtggcagcctcggccgcctcgggtcaggcggaaggtaaaaagatcaccgatctgcgggtcatcgatctgaagtccgagctgaagcggcggaacttagacatcaccggagtcaagaccgtgctcatctcccgactcaagcaggctattgaagaggaaggaggcgatccagataatattgaattaactgtttcaactgatactccaaacaagaaaccaactaaaggcaaaggttgttacgagttatgaacatgttttaaaatatattttggttatataacttgcctctgctcttgtgcctcttgccctgtttatatagtgctactctttgctatttccctctggcagtctgccttcttgggtcaaggaagaaaagttactgttgccaggctttgggtgacttgtagcccttaagattcggctgaagctgattaga

SEQ ID NO: 434746 - DNA, 187 bp, Homo sapiens
gcggccgcctactactactactgctcgaattcaagcttctaacgatgtacggggacatgttcccaactatgttgagaagtggaaaaaaacccaggttctagatgggtgaatcagttgggttttgtaaatacttgtatgtggggaagacattgttgtctttttgtgaaaataaaaatccacacctgga

SEQ ID NO: 434747 - DNA, 607 bp, Homo sapiens
gaagaacatgacccagtcctgaaatctggagaagatggccatatttccactgaatagaattgtcagaaaatctagatcttcaggcatcttggggaaaatcagtgcaagaatcctcagggagtcatttgttcaaataacctaatctaggcctttggaattgttaatttgtatgaatagcactagtttgaaatatagtaaatatcaagctgttctgttttgggtttgtttttgtttttgttttcaattttcttctggtgatttgcctctttagctcttcaaaggaatctaaagacagcaagacatcatctaaagatgacaaaggtaaagaatttttttccctatttatttcagtgttgacattgtgtattttcattaaaaagtagtagttgcgcggtgttttctttgacatttagtccttaaaaattttattgacagactagaaacttgagatggtctttatataaactgtggaattatatatattacagaaaactgattgatgtgttactgtttacttactttgtaaactggtaatggggtacgttaaaaacccattagctagggaacacttacctggtgtgttctaagggactgggtcatgttctgt

SEQ ID NO: 434748 - DNA, 1229 bp, Homo sapiens
ggttcagacctcacgggactgttgaaaagagtaaatgatttattttggataaagtaccaagaacagtgcctggtatttgcagtgatgatttgttctttgttctctgatgtttttttcttttaaacctttttcagtaacgcatccccaattaatagaattgtacaaatcagtggcaattccatgccaagaggaagtggctccggatttaagccatttaagggtggacctccgcgacgattctgaaaatgagctctctgccaaggttttaagataatttattgaaatctcctgtaaactttacttgactacttatgaagaggacctctgacttgcttgagagttctgtcagacttttctttttaaaaatttaacatgattgcttttctcaattttggagaagatgtttaaatagttctgttgtaacttttaatagttttgtgtatcattcaactttttttcttgcagcaccgaggcacatttgaaaagatggaattgaagtcgttttgtttaacgctgtgtgaatataaagagtagtttgcagctgtgtggtagtggtttaatttgcagccttagctctgtggtgtctggctctagagttacttctttttaccaagcattttcagcctccattttgaaggctgtctacacttaagaagtcttagctgtctaatttttagagaataagattgttcattgcatttctgagtattatgtaacctatttttgcagaaggtactgttacattaagtgcatctgtgtatcctggtttaaaaaaatgtaatcttttttgaaataaaccttcatattctgtatagttgctaaagtgttgagaacctttaattgcacacgaagacccagactacggaaagcgcagcccacacatggccacaagacgcgcagggaacgaaaaacacgaaggaaataccaagaacccttgggccagaagagagctctgggtaccacaagggactaatagcaagaacgggccggaacaagccagcacagcaggacacaagcgacaccaggagtgacagacaagcaaaccacactcgcggagcacggagggcgcgacagacgggaacactcaccacacaggacaacgggtaaccaccgacaccagtgatacacgacggcagacagactataacgaaccccatcgaaagaacgcacacaacaatatccgcagaagcgcaagaatcacccgcgtcgacgccagcccgcagcacaga

SEQ ID NO: 434749 - DNA, 4638 bp, Homo sapiens
attctttggactaacagccctagaactgctttgaggtcttttgaatggaactcggggaacctagttcgttggtgcacaccggcgacaatttttcgattattcagcagaactgataaagtatttccttgagaggttcagcgcgcgcacgcgccccctcggtttgtgttgagtaacgcgcgcactatgtcattcagtgcccgcacatcgttgttgctcaagactcaagacgttgcaagaaaatggctaacgaagcgacgagagaacggcggcgcggcggacgttgctgcggtaggacgtgcccgacctcccagtccacacaagggagcgcaccgcccaagtggccgcggcccgctcgaccgagcgcgccgctgccggtccctgcgccaacgcgcacgcgcggccgtcatccgggtgctggcggctgctgcaggttgcgctagggtggcggaccgggggaggggccagcggctcattgtgcgcagcgctgcgcggcgccggcggccgccgaggcctgggtggaagttggcgctgctgccgccgccctgcagcccactcgctgcctcggcagcgcgctgctcttctaagatggctgccgctaccggtgcggtggcagcctcggccgcctcgggtcaggcggaaggtaaaaagatcaccgatctgcgggtcatcgatctgaagtccgagctgaagcggcggaacttagacatcaccggagtcaagaccgtgctcatctcccgactcaagcaggctattgaagaggaaggaggcgatccagataatattgaattaactgtttcaactgatactccaaacaagaaaccaactaaaggcaaaggtaaaaaacatgaagcagatgagttgagtggagatgcttctgtggaagatgatgcttttatcaaggactgtgaattggagaatcaagaggcacatgagcaagatggaaatgatgaactaaaggactctgaagaatttggtgaaaatgaagaagaaaatgtgcattccaaggagttactctctgcagaagaaaacaagagagctcatgaattaatagaggcagaaggaatagaagatatagaaaaagaggacatcgaaagtcaggaaattgaagctcaagaaggtgaagatgatacctttctaacagcccaagatggtgaggaagaagaaaatgagaaagatatagcaggttctggtgatggtacacaagaagtatctaaacctcttccttcagaagggagcctagctgaggctgatcacacagctcatgaagagatggaagctcatacgactgtgaaagaagctgaggatgacaacatctcggtcacaatccaggctgaagatgccatcactctggattttgatggtgatgacctcctagaaacaggtaaaaatgtgaaaattacagattctgaagcaagtaagccaaaagatgggcaggacgccattgcacagagcccggagaaggaaagcaaggattatgagatgaatgcgaaccataaagatggtaagaaggaagactgcgtgaagggtgaccctgtcgagaaggaagccagagaaagttctaagaaagcagaatctggagacaaagaaaaggatactttgaagaaagggccctcgtctactggggcctctggtcaagcaaagagctcttcaaaggaatctaaagacagcaagacatcatctaaagatgacaaaggaagtacaagtagtactagtggtagcagtggaagctcaactaaaaatatctgggttagtggactttcatctaataccaaagctgctgatttgaagaacctctttggcaaatatggaaaggttctgagtgcaaaagtagttacaaatgctcgaagtcctggggcaaaatgctatggcattgtaactatgtcttcaagcacagaggtgtccaggtgtattgcacatcttcatcgcactgagctgcatggacagctgatttctgttgaaaaagtaaaaggtgatccctctaagaaagaaatgaagaaagaaaatgatgaaaagagtagttcaagaagttctggagataaaaaaaatacgagtgatagaagtagcaagacacaagcctctgtcaaaaaagaagagaaaagatcgtctgagaaatctgaaaaaaaagaaagcaaggatactaagaaaatagaaggtaaagatgagaagaatgataatggagcaagtggccaaacatcagaatcgattaaaaaaagtgaagaaaagaagcgaataagttccaagagtccaggacatatggtaatactagaccaaactaaaggagatcattgtagaccatcaagaagaggaagatatgagaaaattcatggaagaagtaaggaaaaggagagagctagtctagataaaaaaagagataaagactacagaaggaaagagatcttgccttttgaaaagatgaaggaacaaaggttgagagaacatttagttcgttttgaaaggctgcgacgagcaatggaacttcgaagacgaagagagattgcagagagagagcgtcgagagcgagaacgcattagaataattcgtgaacgggaagaacgggaacgcttacagagagagagagagcgcctagaaattgaaaggcaaaaactagagagagagagaatggaacgcgaacgcttggaaagggaacgcattcgtattgaacaggaacgtcgtaaggaagctgaacggattgctcgagaaagagaggaactcagaaggcaacaacagcagcttcgttatgaacaagaaaaaaggaattccttgaaacgcccacgtgatgtagatcataggcgagatgatccttactggagcgagaataaaaagttgtctctagatacagatgcacgatttggccatggatccgactactctcgccaacagaacagatttaatgactttgatcaccgagagaggggcaggtttcctgagagttcagcagtacagtcttcatcttttgaaaggcgggatcgctttgttggtcaaagtgaggggaaaaaagcacgacctactgcacgaagggaagatccaagcttcgaaagatatcccaaaaatttcagtgactccagaagaaatgagcctccaccaccaagaaatgaacttagagaatcagacaggcgagaagtacgaggggagcgagacgaaaggagaacggtgattattcatgacaggcctgatatcactcatcctagacatcctcgagaggcagggcccaatccttccagacccaccagctggaaaagtgaaggaagcatgtccactgacaaacgggaaacaagagttgaaaggccagaacgatctgggagagaagtatcagggcacagtgtgagaggcgctccccctgggaatcgtagcagcgcttcggggtacgggagcagagagggagacagaggagtcatcacagaccgaggaggtggatcacagcactatcctgaggagcgacatgtggttgaacgccatggacgggacacaagcggaccaaggaaagagtggcatggtccaccctctcaagggcctagctatcatgatacgaggcgaatgggtgacggccgggcaggagcaggcatgataacccaacattcaagtaacgcatccccaattaatagaattgtacaaatcagtggcaattccatgccaagaggaagtggctccggatttaagccatttaagggtggacctccgcgacgattctgaaaatgagctctctgccaaggttttaagataatttattgaaatctcctgtaaactttacttgactacttatgaagaggacctctgacttgcttgagagttctgtcagacttttctttttaaaaatttaacatgattgcttttctcaattttggagaagatgtttaaatagttctgttgtaacttttaatagttttgtgtatcattcaactttttttcttgcagcaccgaggcacatttgaaaagatggaattgaagtcgttttgtttaacgctgtgtgaatataaagagtagtttgcagctgtgtggtagtggtttaatttgcagccttagctctgtggtgtctggctctagagttacttctttttaccaagcattttcagcctccattttgaaggctgtctacacttaagaagtcttagctgtctaatttttagagaataagattgttcattgcatttctgagtattatgtaacctatttttgcagaaggtactgttacattaagtgcatctgtgtatcctggtttaaaaaaatgtaatcttttttgaaataaaccttcatattctgtatagttgctaaagtgttgagaacctttttaattgtaaaatgagaaccgattttcagtttagtgtagcagcacacttgttcaggtttgcatggtatgaaaccaaatagattcatgaaaccttggccatgaggtttgtttcacaaggttcttagaccgagttgtgcaggtaagtgcacttttaggtaatctgcactgtttgtttgatggataaattccatctctgggaattgtgtgggtattaatgtttccatgttcccaactatgttgagaagtggaaaaaaacccaggttctagatgggtgaatcagttgggttttgtaaatacttgtatgtggggaagacattgttgtctttttgtgaaaataaaaatccacacctgga

SEQ ID NO: 434750 - DNA, 4392 bp, Homo sapiens
attctttggactaacagccctagaactgctttgaggtcttttgaatggaactcggggaacctagttcgttggtgcacaccggcgacaatttttcgattattcagcagaactgataaagtatttccttgagaggttcagcgcgcgcacgcgccccctcggtttgtgttgagtaacgcgcgcactatgtcattcagtgcccgcacatcgttgttgctcaagactcaagacgttgcaagaaaatggctaacgaagcgacgagagaacggcggcgcggcggacgttgctgcggtaggacgtgcccgacctcccagtccacacaagggagcgcaccgcccaagtggccgcggcccgctcgaccgagcgcgccgctgccggtccctgcgccaacgcgcacgcgcggccgtcatccgggtgctggcggctgctgcaggttgcgctagggtggcggaccgggggaggggccagcggctcattgtgcgcagcgctgcgcggcgccggcggccgccgaggcctgggtggaagttggcgctgctgccgccgccctgcagcccactcgctgcctcggcagcgcgctgctcttctaagatggctgccgctaccggtgcggtggcagcctcggccgcctcgggtcaggcggaaggtaaaaagatcaccgatctgcgggtcatcgatctgaagtccgagctgaagcggcggaacttagacatcaccggagtcaagaccgtgctcatctcccgactcaagcaggctattgaagaggaaggaggcgatccagataatattgaattaactgtttcaactgatactccaaacaagaaaccaactaaaggcaaaggtaaaaaacatgaagcagatgagttgagtggagatgcttctgtggaagatgatgcttttatcaaggatggtgaggaagaagaaaatgagaaagatatagcaggttctggtgatggtacacaagaagtatctaaacctcttccttcagaagggagcctagctgaggctgatcacacagctcatgaagagatggaagctcatacgactgtgaaagaagctgaggatgacaacatctcggtcacaatccaggctgaagatgccatcactctggattttgatggtgatgacctcctagaaacaggtaaaaatgtgaaaattacagattctgaagcaagtaagccaaaagatgggcaggacgccattgcacagagcccggagaaggaaagcaaggattatgagatgaatgcgaaccataaagatggtaagaaggaagactgcgtgaagggtgaccctgtcgagaaggaagccagagaaagttctaagaaagcagaatctggagacaaagaaaaggatactttgaagaaagggccctcgtctactggggcctctggtcaagcaaagagctcttcaaaggaatctaaagacagcaagacatcatctaaagatgacaaaggaagtacaagtagtactagtggtagcagtggaagctcaactaaaaatatctgggttagtggactttcatctaataccaaagctgctgatttgaagaacctctttggcaaatatggaaaggttctgagtgcaaaagtagttacaaatgctcgaagtcctggggcaaaatgctatggcattgtaactatgtcttcaagcacagaggtgtccaggtgtattgcacatcttcatcgcactgagctgcatggacagctgatttctgttgaaaaagtaaaaggtgatccctctaagaaagaaatgaagaaagaaaatgatgaaaagagtagttcaagaagttctggagataaaaaaaatacgagtgatagaagtagcaagacacaagcctctgtcaaaaaagaagagaaaagatcgtctgagaaatctgaaaaaaaagaaagcaaggatactaagaaaatagaaggtaaagatgagaagaatgataatggagcaagtggccaaacatcagaatcgattaaaaaaagtgaagaaaagaagcgaataagttccaagagtccaggacatatggtaatactagaccaaactaaaggagatcattgtagaccatcaagaagaggaagatatgagaaaattcatggaagaagtaaggaaaaggagagagctagtctagataaaaaaagagataaagactacagaaggaaagagatcttgccttttgaaaagatgaaggaacaaaggttgagagaacatttagttcgttttgaaaggctgcgacgagcaatggaacttcgaagacgaagagagattgcagagagagagcgtcgagagcgagaacgcattagaataattcgtgaacgggaagaacgggaacgcttacagagagagagagagcgcctagaaattgaaaggcaaaaactagagagagagagaatggaacgcgaacgcttggaaagggaacgcattcgtattgaacaggaacgtcgtaaggaagctgaacggattgctcgagaaagagaggaactcagaaggcaacaacagcagcttcgttatgaacaagaaaaaaggaattccttgaaacgcccacgtgatgtagatcataggcgagatgatccttactggagcgagaataaaaagttgtctctagatacagatgcacgatttggccatggatccgactactctcgccaacagaacagatttaatgactttgatcaccgagagaggggcaggtttcctgagagttcagcagtacagtcttcatcttttgaaaggcgggatcgctttgttggtcaaagtgaggggaaaaaagcacgacctactgcacgaagggaagatccaagcttcgaaagatatcccaaaaatttcagtgactccagaagaaatgagcctccaccaccaagaaatgaacttagagaatcagacaggcgagaagtacgaggggagcgagacgaaaggagaacggtgattattcatgacaggcctgatatcactcatcctagacatcctcgagaggcagggcccaatccttccagacccaccagctggaaaagtgaaggaagcatgtccactgacaaacgggaaacaagagttgaaaggccagaacgatctgggagagaagtatcagggcacagtgtgagaggcgctccccctgggaatcgtagcagcgcttcggggtacgggagcagagagggagacagaggagtcatcacagaccgaggaggtggatcacagcactatcctgaggagcgacatgtggttgaacgccatggacgggacacaagcggaccaaggaaagagtggcatggtccaccctctcaagggcctagctatcatgatacgaggcgaatgggtgacggccgggcaggagcaggcatgataacccaacattcaagtaacgcatccccaattaatagaattgtacaaatcagtggcaattccatgccaagaggaagtggctccggatttaagccatttaagggtggacctccgcgacgattctgaaaatgagctctctgccaaggttttaagataatttattgaaatctcctgtaaactttacttgactacttatgaagaggacctctgacttgcttgagagttctgtcagacttttctttttaaaaatttaacatgattgcttttctcaattttggagaagatgtttaaatagttctgttgtaacttttaatagttttgtgtatcattcaactttttttcttgcagcaccgaggcacatttgaaaagatggaattgaagtcgttttgtttaacgctgtgtgaatataaagagtagtttgcagctgtgtggtagtggtttaatttgcagccttagctctgtggtgtctggctctagagttacttctttttaccaagcattttcagcctccattttgaaggctgtctacacttaagaagtcttagctgtctaatttttagagaataagattgttcattgcatttctgagtattatgtaacctatttttgcagaaggtactgttacattaagtgcatctgtgtatcctggtttaaaaaaatgtaatcttttttgaaataaaccttcatattctgtatagttgctaaagtgttgagaacctttttaattgtaaaatgagaaccgattttcagtttagtgtagcagcacacttgttcaggtttgcatggtatgaaaccaaatagattcatgaaaccttggccatgaggtttgtttcacaaggttcttagaccgagttgtgcaggtaagtgcacttttaggtaatctgcactgtttgtttgatggataaattccatctctgggaattgtgtgggtattaatgtttccatgttcccaactatgttgagaagtggaaaaaaacccaggttctagatgggtgaatcagttgggttttgtaaatacttgtatgtggggaagacattgttgtctttttgtgaaaataaaaatccacacctgga

SEQ ID NO: 434751 - DNA, 4877 bp, Homo sapiens
attctttggactaacagccctagaactgctttgaggtcttttgaatggaactcggggaacctagttcgttggtgcacaccggcgacaatttttcgattattcagcagaactgataaagtatttccttgagaggttcagcgcgcgcacgcgccccctcggtttgtgttgagtaacgcgcgcactatgtcattcagtgcccgcacatcgttgttgctcaagactcaagacgttgcaagaaaatggctaacgaagcgacgagagaacggcggcgcggcggacgttgctgcggtaggacgtgcccgacctcccagtccacacaagggagcgcaccgcccaagtggccgcggcccgctcgaccgagcgcgccgctgccggtccctgcgccaacgcgcacgcgcggccgtcatccgggtgctggcggctgctgcaggttgcgctagggtggcggaccgggggaggggccagcggctcattgtgcgcagcgctgcgcggcgccggcggccgccgaggcctgggtggaagttggcgctgctgccgccgccctgcagcccactcgctgcctcggcagcgcgctgctcttctaagatggctgccgctaccggtgcggtggcagcctcggccgcctcgggtcaggcggaaggtaaaaagatcaccgatctgcgggtcatcgatctgaagtccgagctgaagcggcggaacttagacatcaccggagtcaagaccgtgctcatctcccgactcaagcaggctattgaagaggaaggaggcgatccagataatattgaattaactgtttcaactgatactccaaacaagaaaccaactaaaggcaaaggtaaaaaacatgaagcagatgagttgagtggagatgcttctgtggaagatgatgcttttatcaaggactgtgaattggagaatcaagaggcacatgagcaagatggaaatgatgaactaaaggactctgaagaatttggtgaaaatgaagaagaaaatgtgcattccaaggagttactctctgcagaagaaaacaagagagctcatgaattaatagaggcagaaggaatagaagatatagaaaaagaggacatcgaaagtcaggaaattgaagctcaagaaggtgaagatgatacctttctaacagcccaagatggtgaggaagaagaaaatgagaaagatatagcaggttctggtgatggtacacaagaagtatctaaacctcttccttcagaagggagcctagctgaggctgatcacacagctcatgaagagatggaagctcatacgactgtgaaagaagctgaggatgacaacatctcggtcacaatccaggctgaagatgccatcactctggattttgatggtgatgacctcctagaaacaggtaaaaatgtgaaaattacagattctgaagcaagtaagccaaaagatgggcaggacgccattgcacagagcccggagaaggaaagcaaggattatgagatgaatgcgaaccataaagatggtaagaaggaagactgcgtgaagggtgaccctgtcgagaaggaagccagagaaagttctaagaaagcagaatctggagacaaagaaaaggatactttgaagaaagggccctcgtctactggggcctctggtcaagcaaagagctcttcaaaggaatctaaagacagcaagacatcatctaaagatgacaaaggaagtacaagtagtactagtggtagcagtggaagctcaactaaaaatatctgggttagtggactttcatctaataccaaagctgctgatttgaagaacctctttggcaaatatggaaaggttctgagtgcaaaagtagttacaaatgctcgaagtcctggggcaaaatgctatggcattgtaactatgtcttcaagcacagaggtgtccaggtgtattgcacatcttcatcgcactgagctgcatggacagctgatttctgttgaaaaagtaagcttccctaactgtttatcaaagcaagtctaatttgatggctagttctcaactcatagctgttaacagtagcagggagtagaatttgcagtgatttttaatttttatgtatttgtagtttttactctccttatatttttcctatcgtttccaaattttctgccattagcacacttcttataatcacaaaaatgtaaccatatgtacaaattgtttttctggttcgaacctttcaggtaaaaggtgatccctctaagaaagaaatgaagaaagaaaatgatgaaaagagtagttcaagaagttctggagataaaaaaaatacgagtgatagaagtagcaagacacaagcctctgtcaaaaaagaagagaaaagatcgtctgagaaatctgaaaaaaaagaaagcaaggatactaagaaaatagaaggtaaagatgagaagaatgataatggagcaagtggccaaacatcagaatcgattaaaaaaagtgaagaaaagaagcgaataagttccaagagtccaggacatatggtaatactagaccaaactaaaggagatcattgtagaccatcaagaagaggaagatatgagaaaattcatggaagaagtaaggaaaaggagagagctagtctagataaaaaaagagataaagactacagaaggaaagagatcttgccttttgaaaagatgaaggaacaaaggttgagagaacatttagttcgttttgaaaggctgcgacgagcaatggaacttcgaagacgaagagagattgcagagagagagcgtcgagagcgagaacgcattagaataattcgtgaacgggaagaacgggaacgcttacagagagagagagagcgcctagaaattgaaaggcaaaaactagagagagagagaatggaacgcgaacgcttggaaagggaacgcattcgtattgaacaggaacgtcgtaaggaagctgaacggattgctcgagaaagagaggaactcagaaggcaacaacagcagcttcgttatgaacaagaaaaaaggaattccttgaaacgcccacgtgatgtagatcataggcgagatgatccttactggagcgagaataaaaagttgtctctagatacagatgcacgatttggccatggatccgactactctcgccaacagaacagatttaatgactttgatcaccgagagaggggcaggtttcctgagagttcagcagtacagtcttcatcttttgaaaggcgggatcgctttgttggtcaaagtgaggggaaaaaagcacgacctactgcacgaagggaagatccaagcttcgaaagatatcccaaaaatttcagtgactccagaagaaatgagcctccaccaccaagaaatgaacttagagaatcagacaggcgagaagtacgaggggagcgagacgaaaggagaacggtgattattcatgacaggcctgatatcactcatcctagacatcctcgagaggcagggcccaatccttccagacccaccagctggaaaagtgaaggaagcatgtccactgacaaacgggaaacaagagttgaaaggccagaacgatctgggagagaagtatcagggcacagtgtgagaggcgctccccctgggaatcgtagcagcgcttcggggtacgggagcagagagggagacagaggagtcatcacagaccgaggaggtggatcacagcactatcctgaggagcgacatgtggttgaacgccatggacgggacacaagcggaccaaggaaagagtggcatggtccaccctctcaagggcctagctatcatgatacgaggcgaatgggtgacggccgggcaggagcaggcatgataacccaacattcaagtaacgcatccccaattaatagaattgtacaaatcagtggcaattccatgccaagaggaagtggctccggatttaagccatttaagggtggacctccgcgacgattctgaaaatgagctctctgccaaggttttaagataatttattgaaatctcctgtaaactttacttgactacttatgaagaggacctctgacttgcttgagagttctgtcagacttttctttttaaaaatttaacatgattgcttttctcaattttggagaagatgtttaaatagttctgttgtaacttttaatagttttgtgtatcattcaactttttttcttgcagcaccgaggcacatttgaaaagatggaattgaagtcgttttgtttaacgctgtgtgaatataaagagtagtttgcagctgtgtggtagtggtttaatttgcagccttagctctgtggtgtctggctctagagttacttctttttaccaagcattttcagcctccattttgaaggctgtctacacttaagaagtcttagctgtctaatttttagagaataagattgttcattgcatttctgagtattatgtaacctatttttgcagaaggtactgttacattaagtgcatctgtgtatcctggtttaaaaaaatgtaatcttttttgaaataaaccttcatattctgtatagttgctaaagtgttgagaacctttttaattgtaaaatgagaaccgattttcagtttagtgtagcagcacacttgttcaggtttgcatggtatgaaaccaaatagattcatgaaaccttggccatgaggtttgtttcacaaggttcttagaccgagttgtgcaggtaagtgcacttttaggtaatctgcactgtttgtttgatggataaattccatctctgggaattgtgtgggtattaatgtttccatgttcccaactatgttgagaagtggaaaaaaacccaggttctagatgggtgaatcagttgggttttgtaaatacttgtatgtggggaagacattgttgtctttttgtgaaaataaaaatccacacctgga

SEQ ID NO: 434752 - DNA, 4169 bp, Homo sapiens
attctttggactaacagccctagaactgctttgaggtcttttgaatggaactcggggaacctagttcgttggtgcacaccggcgacaatttttcgattattcagcagaactgataaagtatttccttgagaggttcagcgcgcgcacgcgccccctcggtttgtgttgagtaacgcgcgcactatgtcattcagtgcccgcacatcgttgttgctcaagactcaagacgttgcaagaaaatggctaacgaagcgacgagagaacggcggcgcggcggacgttgctgcggtaggacgtgcccgacctcccagtccacacaagggagcgcaccgcccaagtggccgcggcccgctcgaccgagcgcgccgctgccggtccctgcgccaacgcgcacgcgcggccgtcatccgggtgctggcggctgctgcaggttgcgctagggtggcggaccgggggaggggccagcggctcattgtgcgcagcgctgcgcggcgccggcggccgccgaggcctgggtggaagttggcgctgctgccgccgccctgcagcccactcgctgcctcggcagcgcgctgctcttctaagatggctgccgctaccggtgcggtggcagcctcggccgcctcgggtcaggcggaaggtaaaaagatcaccgatctgcgggtcatcgatctgaagtccgagctgaagcggcggaacttagacatcaccggagtcaagaccgtgctcatctcccgactcaagcaggctattgaagaggaaggaggcgatccagataatattgaattaactgtttcaactgatactccaaacaagaaaccaactaaaggcaaaggtaaaaaacatgaagcagatgagttgagtggagatgcttctgtggaagatgatgcttttatcaaggactgtgaattggagaatcaagaggcacatgagcaagatggaaatgatgaactaaaggactctgaagaatttggtgaaaatgaagaagaaaatgtgcattccaaggagttactctctgcagaagaaaacaagagagctcatgaattaatagaggcagaaggaatagaagatatagaaaaagaggacatcgaaagtcaggaaattgaagctcaagaaggtgaagatgatacctttctaacagcccaagatggtgaggaagaagaaaatgagaaagctcttcaaaggaatctaaagacagcaagacatcatctaaagatgacaaaggaagtacaagtagtactagtggtagcagtggaagctcaactaaaaatatctgggttagtggactttcatctaataccaaagctgctgatttgaagaacctctttggcaaatatggaaaggttctgagtgcaaaagtagttacaaatgctcgaagtcctggggcaaaatgctatggcattgtaactatgtcttcaagcacagaggtgtccaggtgtattgcacatcttcatcgcactgagctgcatggacagctgatttctgttgaaaaagtaaaaggtgatccctctaagaaagaaatgaagaaagaaaatgatgaaaagagtagttcaagaagttctggagataaaaaaaatacgagtgatagaagtagcaagacacaagcctctgtcaaaaaagaagagaaaagatcgtctgagaaatctgaaaaaaaagaaagcaaggatactaagaaaatagaaggtaaagatgagaagaatgataatggagcaagtggccaaacatcagaatcgattaaaaaaagtgaagaaaagaagcgaataagttccaagagtccaggacatatggtaatactagaccaaactaaaggagatcattgtagaccatcaagaagaggaagatatgagaaaattcatggaagaagtaaggaaaaggagagagctagtctagataaaaaaagagataaagactacagaaggaaagagatcttgccttttgaaaagatgaaggaacaaaggttgagagaacatttagttcgttttgaaaggctgcgacgagcaatggaacttcgaagacgaagagagattgcagagagagagcgtcgagagcgagaacgcattagaataattcgtgaacgggaagaacgggaacgcttacagagagagagagagcgcctagaaattgaaaggcaaaaactagagagagagagaatggaacgcgaacgcttggaaagggaacgcattcgtattgaacaggaacgtcgtaaggaagctgaacggattgctcgagaaagagaggaactcagaaggcaacaacagcagcttcgttatgaacaagaaaaaaggaattccttgaaacgcccacgtgatgtagatcataggcgagatgatccttactggagcgagaataaaaagttgtctctagatacagatgcacgatttggccatggatccgactactctcgccaacagaacagatttaatgactttgatcaccgagagaggggcaggtttcctgagagttcagcagtacagtcttcatcttttgaaaggcgggatcgctttgttggtcaaagtgaggggaaaaaagcacgacctactgcacgaagggaagatccaagcttcgaaagatatcccaaaaatttcagtgactccagaagaaatgagcctccaccaccaagaaatgaacttagagaatcagacaggcgagaagtacgaggggagcgagacgaaaggagaacggtgattattcatgacaggcctgatatcactcatcctagacatcctcgagaggcagggcccaatccttccagacccaccagctggaaaagtgaaggaagcatgtccactgacaaacgggaaacaagagttgaaaggccagaacgatctgggagagaagtatcagggcacagtgtgagaggcgctccccctgggaatcgtagcagcgcttcggggtacgggagcagagagggagacagaggagtcatcacagaccgaggaggtggatcacagcactatcctgaggagcgacatgtggttgaacgccatggacgggacacaagcggaccaaggaaagagtggcatggtccaccctctcaagggcctagctatcatgatacgaggcgaatgggtgacggccgggcaggagcaggcatgataacccaacattcaagtaacgcatccccaattaatagaattgtacaaatcagtggcaattccatgccaagaggaagtggctccggatttaagccatttaagggtggacctccgcgacgattctgaaaatgagctctctgccaaggttttaagataatttattgaaatctcctgtaaactttacttgactacttatgaagaggacctctgacttgcttgagagttctgtcagacttttctttttaaaaatttaacatgattgcttttctcaattttggagaagatgtttaaatagttctgttgtaacttttaatagttttgtgtatcattcaactttttttcttgcagcaccgaggcacatttgaaaagatggaattgaagtcgttttgtttaacgctgtgtgaatataaagagtagtttgcagctgtgtggtagtggtttaatttgcagccttagctctgtggtgtctggctctagagttacttctttttaccaagcattttcagcctccattttgaaggctgtctacacttaagaagtcttagctgtctaatttttagagaataagattgttcattgcatttctgagtattatgtaacctatttttgcagaaggtactgttacattaagtgcatctgtgtatcctggtttaaaaaaatgtaatcttttttgaaataaaccttcatattctgtatagttgctaaagtgttgagaacctttttaattgtaaaatgagaaccgattttcagtttagtgtagcagcacacttgttcaggtttgcatggtatgaaaccaaatagattcatgaaaccttggccatgaggtttgtttcacaaggttcttagaccgagttgtgcaggtaagtgcacttttaggtaatctgcactgtttgtttgatggataaattccatctctgggaattgtgtgggtattaatgtttccatgttcccaactatgttgagaagtggaaaaaaacccaggttctagatgggtgaatcagttgggttttgtaaatacttgtatgtggggaagacattgttgtctttttgtgaaaataaaaatccacacctgga

SEQ ID NO: 434753 - DNA, 4027 bp, Homo sapiens
agtctagacatccccttgaatcatcatcctgctgtgtatattacacttacattacatctcaatagagactagtcatatttcaaatgagtcctatgtagactagtgacttcggtactagtagtccagggctagaggaaaatgttcatacggaagagtaacagaggttcaagttggaggtaggggtcaaactcagagggggtctagaatgccactaagagaaagtggaaagcctttgaaggattttgagtagatagtagatgcttctgtggaagatgatgcttttatcaaggactgtgaattggagaatcaagaggcacatgagcaagatggaaatgatgaactaaaggactctgaagaatttggtgaaaatgaagaagaaaatgtgcattccaaggagttactctctgcagaagaaaacaagagagctcatgaattaatagaggcagaaggaatagaagatatagaaaaagaggacatcgaaagtcaggaaattgaagctcaagaaggtgaagatgatacctttctaacagcccaagatggtgaggaagaagaaaatgagaaagatatagcaggttctggtgatggtacacaagaagtatctaaacctcttccttcagaagggagcctagctgaggctgatcacacagctcatgaagagatggaagctcatacgactgtgaaagaagctgaggatgacaacatctcggtcacaatccaggctgaagatgccatcactctggattttgatggtgatgacctcctagaaacaggtaaaaatgtgaaaattacagattctgaagcaagtaagccaaaagatgggcaggacgccattgcacagagcccggagaaggaaagcaaggattatgagatgaatgcgaaccataaagatggtaagaaggaagactgcgtgaagggtgaccctgtcgagaaggaagccagagaaagttctaagaaagcagaatctggagacaaagaaaaggatactttgaagaaagggccctcgtctactggggcctctggtcaagcaaagagctcttcaaaggaatctaaagacagcaagacatcatctaaagatgacaaaggaagtacaagtagtactagtggtagcagtggaagctcaactaaaaatatctgggttagtggactttcatctaataccaaagctgctgatttgaagaacctctttggcaaatatggaaaggttctgagtgcaaaagtagttacaaatgctcgaagtcctggggcaaaatgctatggcattgtaactatgtcttcaagcacagaggtgtccaggtgtattgcacatcttcatcgcactgagctgcatggacagctgatttctgttgaaaaagtaaaaggtgatccctctaagaaagaaatgaagaaagaaaatgatgaaaagagtagttcaagaagttctggagataaaaaaaatacgagtgatagaagtagcaagacacaagcctctgtcaaaaaagaagagaaaagatcgtctgagaaatctgaaaaaaaagaaagcaaggatactaagaaaatagaaggtaaagatgagaagaatgataatggagcaagtggccaaacatcagaatcgattaaaaaaagtgaagaaaagaagcgaataagttccaagagtccaggacatatggtaatactagaccaaactaaaggagatcattgtagaccatcaagaagaggaagatatgagaaaattcatggaagaagtaaggaaaaggagagagctagtctagataaaaaaagagataaagactacagaaggaaagagatcttgccttttgaaaagatgaaggaacaaaggttgagagaacatttagttcgttttgaaaggctgcgacgagcaatggaacttcgaagacgaagagagattgcagagagagagcgtcgagagcgagaacgcattagaataattcgtgaacgggaagaacgggaacgcttacagagagagagagagcgcctagaaattgaaaggcaaaaactagagagagagagaatggaacgcgaacgcttggaaagggaacgcattcgtattgaacaggaacgtcgtaaggaagctgaacggattgctcgagaaagagaggaactcagaaggcaacaacagcagcttcgttatgaacaagaaaaaaggaattccttgaaacgcccacgtgatgtagatcataggcgagatgatccttactggagcgagaataaaaagttgtctctagatacagatgcacgatttggccatggatccgactactctcgccaacagaacagatttaatgactttgatcaccgagagaggggcaggtttcctgagagttcagcagtacagtcttcatcttttgaaaggcgggatcgctttgttggtcaaagtgaggggaaaaaagcacgacctactgcacgaagggaagatccaagcttcgaaagatatcccaaaaatttcagtgactccagaagaaatgagcctccaccaccaagaaatgaacttagagaatcagacaggcgagaagtacgaggggagcgagacgaaaggagaacggtgattattcatgacaggcctgatatcactcatcctagacatcctcgagaggcagggcccaatccttccagacccaccagctggaaaagtgaaggaagcatgtccactgacaaacgggaaacaagagttgaaaggccagaacgatctgggagagaagtatcagggcacagtgtgagaggcgctccccctgggaatcgtagcagcgcttcggggtacgggagcagagagggagacagaggagtcatcacagaccgaggaggtggatcacagcactatcctgaggagcgacatgtggttgaacgccatggacgggacacaagcggaccaaggaaagagtggcatggtccaccctctcaagggcctagctatcatgatacgaggcgaatgggtgacggccgggcaggagcaggcatgataacccaacattcaagtaacgcatccccaattaatagaattgtacaaatcagtggcaattccatgccaagaggaagtggctccggatttaagccatttaagggtggacctccgcgacgattctgaaaatgagctctctgccaaggttttaagataatttattgaaatctcctgtaaactttacttgactacttatgaagaggacctctgacttgcttgagagttctgtcagacttttctttttaaaaatttaacatgattgcttttctcaattttggagaagatgtttaaatagttctgttgtaacttttaatagttttgtgtatcattcaactttttttcttgcagcaccgaggcacatttgaaaagatggaattgaagtcgttttgtttaacgctgtgtgaatataaagagtagtttgcagctgtgtggtagtggtttaatttgcagccttagctctgtggtgtctggctctagagttacttctttttaccaagcattttcagcctccattttgaaggctgtctacacttaagaagtcttagctgtctaatttttagagaataagattgttcattgcatttctgagtattatgtaacctatttttgcagaaggtactgttacattaagtgcatctgtgtatcctggtttaaaaaaatgtaatcttttttgaaataaaccttcatattctgtatagttgctaaagtgttgagaacctttttaattgtaaaatgagaaccgattttcagtttagtgtagcagcacacttgttcaggtttgcatggtatgaaaccaaatagattcatgaaaccttggccatgaggtttgtttcacaaggttcttagaccgagttgtgcaggtaagtgcacttttaggtaatctgcactgtttgtttgatggataaattccatctctgggaattgtgtgggtattaatgtttccatgttcccaactatgttgagaagtggaaaaaaacccaggttctagatgggtgaatcagttgggttttgtaaatacttgtatgtggggaagacattgttgtctttttgtgaaaataaaaatccacacctgga

SEQ ID NO: 434754 - DNA, 4969 bp, Homo sapiens
attctttggactaacagccctagaactgctttgaggtcttttgaatggaactcggggaacctagttcgttggtgcacaccggcgacaatttttcgattattcagcagaactgataaagtatttccttgagaggttcagcgcgcgcacgcgccccctcggtttgtgttgagtaacgcgcgcactatgtcattcagtgcccgcacatcgttgttgctcaagactcaagacgttgcaagaaaatggctaacgaagcgacgagagaacggcggcgcggcggacgttgctgcggtaggacgtgcccgacctcccagtccacacaagggagcgcaccgcccaagtggccgcggcccgctcgaccgagcgcgccgctgccggtccctgcgccaacgcgcacgcgcggccgtcatccgggtgctggcggctgctgcaggttgcgctagggtggcggaccgggggaggggccagcggctcattgtgcgcagcgctgcgcggcgccggcggccgccgaggcctgggtggaagttggcgctgctgccgccgccctgcagcccactcgctgcctcggcagcgcgctgctcttctaagatggctgccgctaccggtgcggtggcagcctcggccgcctcgggtcaggcggaaggtaaaaagatcaccgatctgcgggtcatcgatctgaagtccgagctgaagcggcggaacttagacatcaccggagtcaagaccgtgctcatctcccgactcaagcaggctattgaagaggaaggaggcgatccagataatattgaattaactgtttcaactgatactccaaacaagaaaccaactaaaggcaaaggtaaaaaacatgaagcagatgagttgagtggagatgcttctgtggaagatgatgcttttatcaaggactgtgaattggagaatcaagaggcacatgagcaagatggaaatgatgaactaaaggactctgaagaatttggtgaaaatgaagaagaaaatgtgcattccaaggagttactctctgcagaagaaaacaagagagctcatgaattaatagaggcagaaggaatagaagatatagaaaaagaggacatcgaaagtcaggaaattgaagctcaagaaggtgaagatgatacctttctaacagcccaagatggtgaggaagaagaaaatgagaaagatatagcaggttctggtgatggtacacaagaagtatctaaacctcttccttcagaagggagcctagctgaggctgatcacacagctcatgaagagatggaagctcatacgactgtgaaagaagctgaggatgacaacatctcggtcacaatccaggctgaagatgccatcactctggattttgatggtgatgacctcctagaaacaggtaaaaatgtgaaaattacagattctgaagcaagtaagccaaaagatgggcaggacgccattgcacagagcccggagaaggaaagcaaggattatgagatgaatgcgaaccataaagatggtaagaaggaagactgcgtgaagggtgaccctgtcgagaaggaagccagagaaagttctaagaaagcagaatctggagacaaagaaaaggatactttgaagaaagggccctcgtctactggggcctctggtcaagcaaagagctcttcaaaggaatctaaagacagcaagacatcatctaaagatgacaaaggaagtacaagtagtactagtggtagcagtggaagctcaactaaaaatatctgggttagtggactttcatctaataccaaagctgctgatttgaagaacctctttggcaaatatggaaaggttctgagtgcaaaagtagttacaaatgctcgaagtcctggggcaaaatgctatggcattgtaactatgtcttcaagcacagaggtgtccaggtgtattgcacatcttcatcgcactgagctgcatggacagctgatttctgttgaaaaagtaaaaggtgatccctctaagaaagaaatgaagaaagaaaatgatgaaaagagtagttcaagaagttctggagataaaaaaaatacgagtgatagaagtagcaagacacaagcctctgtcaaaaaagaagagaaaagatcgtctgagaaatctgaaaaaaaagaaagcaaggatactaagaaaatagaaggtaaagatgagaagaatgataatggagcaagtggccaaacatcagaatcgattaaaaaaagtgaagaaaagaagcgaataagttccaagagtccaggacatatggtaatactagaccaaactaaaggagatcattgtagaccatcaagaagaggaagatatgagaaaattcatggaagaagtaaggaaaaggagagagctagtctagataaaaaaagagataaagactacagaaggaaagagatcttgccttttgaaaagatgaaggaacaaaggttgagagaacatttagttcgttttgaaaggctgcgacgagcaatggaacttcgaagacgaagagagattgcagagagagagcgtcgagagcgagaacgcattagaataattcgtgaacgggaagaacgggaacgcttacagagagagagagagcgcctagaaattgaaaggcaaaaactagagagagagagaatggaacgcgaacgcttggaaagggaacgcattcgtattgaacaggaacgtcgtaaggaagctgaacggattgctcgagaaagagaggaactcagaaggcaacaacagcagcttcgttatgaacaagaaaaaaggaattccttgaaacgcccacgtgatgtagatcataggcgagatgatccttactggagcgagaataaaaagttgtctctagatacagatgcacgatttggccatggatccgactactctcgccaacagaacagatttaatgactttgatcaccgagagaggggcaggtttcctgagagttcagcagtacagtcttcatcttttgaaaggcgggatcgctttgttggtcaaagtgaggggaaaaaagcacgacctactgcacgaagggaagatccaagcttcgaaagatatcccaaaaatttcagtgactccagaagaaatgagcctccaccaccaagaaatgaacttagagaatcagacaggcgagaagtacgaggggagcgagacgaaaggagaacggtgattattcatgacaggcctgatatcactcatcctagacatcctcgagaggcagggcccaatccttccagacccaccagctggaaaagtgaaggaagcatgtccactgacaaacgggaaacaagagttgaaaggccagaacgatctgggagagaagtatcagggcacagtgtgagaggcgctccccctgggaatcgtagcagcgcttcggggtacgggagcagagagggagacagaggagtcatcacagaccgaggaggtggatcacagcactatcctgaggagcgacatgtggttgaacgccatggacgggacacaagcggaccaaggaaagagtggcatggtccaccctctcaagggcctagctatcatgatacgaggcgaatgggtgacggccgggcaggagcaggcatgataacccaacattcaagtaacgcatccccaattaatagaattgtacaaatcagtggcaattccatgccaagaggaagtggctccggatttaagccatttaagggtggacctccgcgacgattctgaaaatgagctctctgccaaggttttaagataatttattgaaatctcctgtaaactttacttgactacttatgaagaggacctctgacttgcttgagagttctgtcagacttttctttttaaaaatttaacatgattgcttttctcaattttggagaagatgtttaaatagttctgttgtaacttttaatagttttgtgtatcattcaactttttttcttgcagcaccgaggcacatttgaaaagatggaattgaagtcgttttgtttaacgctgtgtgaatataaagagtagtttgcagctgtgtggtagtggtttaatttgcagccttagctctgtggtgtctggctctagagttacttctttttaccaagcattttcagcctccattttgaaggctgtctacacttaagaagtcttagctgtctaatttttagagaataagattgttcattgcatttctgagtattatgtaacctatttttgcagaaggtactgttacattaagtgcatctgtgtatcctggtttaaaaaaatgtaatcttttttgaaataaaccttcatattctgtatagttgctaaagtgttgagaacctttttaattgtaaaatgagaaccgattttcagtttagtgtagcagcacacttgttcaggtttgcatggtatgaaaccaaatagattcatgaaaccttggccatgaggtttgtttcacaaggttcttagaccgagttgtgcaggtaagtgcacttttaggtaatctgcactgtttgtttgatggataaattccatctctgggaattgtgtgggtattaatgtttccatgttcccaactatgttgagaagtggaaaaaaacccaggttctagatgggtgaatcagttgggttttgtaaatacttgtatgtggggaagacattgttgtctttttgtgaaaataaaaatccacacctggaagtgtatgtgtctttgttttcagcgttttaggtgttagtcgtccagttctttctgtagttcagcccaaggtgactgactagatatagagctataaaggcattcttttggtctttgttcttcagaaataaatctagcttagactcttcacctcagtagctgggcagcacatgctgttcacatgttagagacttaaccactaatcctatggcttttttaaaggcatctcttttaggaaagcccttcaaggtaaatgctgctctttcaaaaaagcttcccacatccctctatataaatcagtgaagaaaaatccaaatgtctagattttggtaa

SEQ ID NO: 434755 - DNA, 4285 bp, Homo sapiens
attctttggactaacagccctagaactgctttgaggtcttttgaatggaactcggggaacctagttcgttggtgcacaccggcgacaatttttcgattattcagcagaactgataaagtatttccttgagaggttcagcgcgcgcacgcgccccctcggtttgtgttgagtaacgcgcgcactatgtcattcagtgcccgcacatcgttgttgctcaagactcaagacgttgcaagaaaatggctaacgaagcgacgagagaacggcggcgcggcggacgttgctgcggtaggacgtgcccgacctcccagtccacacaagggagcgcaccgcccaagtggccgcggcccgctcgaccgagcgcgccgctgccggtccctgcgccaacgcgcacgcgcggccgtcatccgggtgctggcggctgctgcaggttgcgctagggtggcggaccgggggaggggccagcggctcattgtgcgcagcgctgcgcggcgccggcggccgccgaggcctgggtggaagttggcgctgctgccgccgccctgcagcccactcgctgcctcggcagcgcgctgctcttctaagatggctgccgctaccggtgcggtggcagcctcggccgcctcgggtcaggcggaaggtaaaaagatcaccgatctgcgggtcatcgatctgaagtccgagctgaagcggcggaacttagacatcaccggagtcaagaccgtgctcatctcccgactcaagcaggctattgaagaggaaggaggcgatccagataatattgaattaactgtttcaactgatactccaaacaagaaaccaactaaaggcaaaggtaaaaaacatgaagcagatgagttgagtggagatgcttctgtggaagatgatgcttttatcaaggactgtgaattggagaatcaagaggcacatgagcaagatggaaatgatgaactaaaggactctgaagaatttggtgaaaatgaagaagaaaatgtgcattccaaggagttactctctgcagaagaaaacaagagagctcatgaattaatagaggcagaaggaatagaagatatagaaaaagaggacatcgaaagtcaggaaattgaagctcaagaaggtgaagatgatacctttctaacagcccaagatggtgaggaagaagaaaatgagaaagatatagcaggttctggtgatggtacacaagaagtatctaaacctcttccttcagaagggagcctagctgaggctgatcacacagctcatgaagagatggaagctcatacgactgtgaaagaagctgaggatgacaacatctcggtcacaatccaggctgaagatgccatcactctggattttgatggtgatgacctcctagaaacaggtaaaaatgtgaaaattacagattctgaagcaagtaagccaaaagatgggcaggacgccattgcacagagcccggagaaggaaagcaaggattatgagatgaatgcgaaccataaagatggtaagaaggaagactgcgtgaagggtgaccctgtcgagaaggaagccagagaaagttctaagaaagcagaatctggagacaaagaaaaggatactttgaagaaagggccctcgtctactggggcctctggtcaagcaaagagctcttcaaaggaatctaaagacagcaagacatcatctaaagatgacaaaggaagtacaagtagtactagtggtagcagtggaagctcaactaaaaatatctgggttagtggactttcatctaataccaaagctgctgatttgaagaacctctttggcaaatatggaaaggttctgagtgcaaaagtagttacaaatgctcgaagtcctggggcaaaatgctatggcattgtaactatgtcttcaagcacagaggtgtccaggtgtattgcacatcttcatcgcactgagctgcatggacagctgatttctgttgaaaaagtaaaaggtgatccctctaagaaagaaatgaagaaagaaaatgatgaaaagagtagttcaagaagttctggagataaaaaaaatacgagtgatagaagtagcaagacacaagcctctgtcaaaaaagaagagaaaagatcgtctgagaaatctgaaaaaaaagaaagcaaggatactaagaaaatagaaggtaaagatgagaagaatgataatggagcaagtggccaaacatcagaatcgattaaaaaaagtgaagaaaagaagcgaataagttccaagagtccaggacatatggtaatactagaccaaactaaaggagatcattgtagaccatcaagaagaggaagatatgagaaaattcatggaagaagtaaggaaaaggagagagctagtctagataaaaaaagagataaagactacagaaggaaagagatcttgccttttgaaaagatgaaggaacaaaggttgagagaacatttagttcgttttgaaaggctgcgacgagcaatggaacttcgaagacgaagagagattgcagagagagagcgtcgagagcgagaacgcattagaataattcgtgaacgggaagaacgggaacgcttacagagagagagagagcgcctagaaattgaaaggcaaaaactagagagagagagaatggaacgcgaacgcttggaaagggaacgcattcgtattgaacaggaacgtcgtaaggaagctgaacggattgctcgagaaagagaggaactcagaaggcaacaacagcagcttcgttatgaacaagaaaaaaggaattccttgaaacgcccacgtgatgtagatcataggcgagatgatccttactggagcgagaataaaaagttgtctctagatacagatgcacgatttggccatggatccgactactctcgccaacagaacagatttaatgactttgatcaccgagagaggggcaggtttcctgagagttcagcagtacagtcttcatcttttgaaaggcgggatcgctttgttggtcaaagtgaggggaaaaaagcacgacctactgcacgaagggaagatccaagcttcgaaagatatcccaaaaatttcagtgactccagaagaaatgagcctccaccaccaagaaatgaacttagagaatcagacaggcgagaagtacgaggggagcgagacgaaaggagaacggtgattattcatgacaggcctgatatcactcatcctagacatcctcgagaggcagggcccaatccttccagacccaccagctggaaaagtgaaggaagcatgtccactgacaaacgggaaacaagagttgaaaggccagaacgatctgggagagaagtatcagggcacagtgtgagaggcgctccccctgggaatcgtagcagcgcttcggggtacgggagcagagagggagacagaggagtcatcacagaccgaggaggtggatcacagcactatcctgaggagcgacatgtggttgaacgccatggacgggacacaagcggaccaaggaaagagtggcatggtccaccctctcaagggcctagctatcatgatacgaggcgaatgggtgacggccgggcaggagcaggcatgataacccaacattcaagtaacgcatccccaattaatagaattgtacaaatcagtggcaattccatgccaagaggaagtggctccggatttaagccatttaagggtggacctccgcgacgattctgaaaatgagctctctgccaaggttttaagataatttattgaaatctcctgtaaactttacttgactacttatgaagaggacctctgacttgcttgagagttctgtcagacttttctttttaaaaatttaacatgattgcttttctcaattttggagaagatgtttaaatagttctgttgtaacttttaatagttttgtgtatcattcaactttttttcttgcagcaccgaggcacatttgaaaagatggaattgaagtcgttttgtttaacgctgtgtgaatataaagagtagtttgcagctgtgtggtagtggtttaatttgcagccttagctctgtggtgtctggctctagagttacttctttttaccaagcattttcagcctccattttgaaggctgtctacacttaagaagtcttagctgtctaatttttagagaataagattgttcattgcatttctgagtattatgtaacctatttttgcagaaggtactgttacattaagtgcatctgtgtatcctggtttaaaaaaatgtaatcttttttgaaataaaccttcatattctgtatagttgctaaagtgttgagaaccttt

SEQ ID NO: 434756 - DNA, 4856 bp, Homo sapiens
attctttggactaacagccctagaactgctttgaggtcttttgaatggaactcggggaacctagttcgttggtgcacaccggcgacaatttttcgattattcagcagaactgataaagtatttccttgagaggttcagcgcgcgcacgcgccccctcggtttgtgttgagtaacgcgcgcactatgtcattcagtgcccgcacatcgttgttgctcaagactcaagacgttgcaagaaaatggctaacgaagcgacgagagaacggcggcgcggcggacgttgctgcggtaggacgtgcccgacctcccagtccacacaagggagcgcaccgcccaagtggccgcggcccgctcgaccgagcgcgccgctgccggtccctgcgccaacgcgcacgcgcggccgtcatccgggtgctggcggctgctgcaggttgcgctagggtggcggaccgggggaggggccagcggctcattgtgcgcagcgctgcgcggcgccggcggccgccgaggcctgggtggaagttggcgctgctgccgccgccctgcagcccactcgctgcctcggcagcgcgctgctcttctaagatggctgccgctaccggtgcggtggcagcctcggccgcctcgggtcaggcggaaggtaaaaagatcaccgatctgcgggtcatcgatctgaagtccgagctgaagcggcggaacttagacatcaccggagtcaagaccgtgctcatctcccgactcaagcaggctattgaagaggaaggaggcgatccagataatattgaattaactgtttcaactgatactccaaacaagaaaccaactaaaggcaaaggtaaaaaacatgaagcagatgagttgagtggagatgcttctgtggaagatgatgcttttatcaaggactgtgaattggagaatcaagaggcacatgagcaagatggaaatgatgaactaaaggactctgaagaatttggtgaaaatgaagaagaaaatgtgcattccaaggagttactctctgcagaagaaaacaagagagctcatgaattaatagaggcagaaggaatagaagatatagaaaaagaggacatcgaaagtcaggaaattgaagctcaagaaggtgaagatgatacctttctaacagcccaagatggtgaggaagaagaaaatgagaaagatatagcaggttctggtgatggtacacaagaagtatctaaacctcttccttcagaagggagcctagctgaggctgatcacacagctcatgaagagatggaagctcatacgactgtgaaagaagctgaggatgacaacatctcggtcacaatccaggctgaagatgccatcactctggattttgatggtgatgacctcctagaaacaggtaaaaatgtgaaaattacagattctgaagcaagtaagccaaaagatgggcaggacgccattgcacagagcccggagaaggaaagcaaggattatgagatgaatgcgaaccataaagatggtaagaaggaagactgcgtgaagggtgaccctgtcgagaaggaagccagagaaagttctaagaaagcagaatctggagacaaagaaaaggatactttgaagaaagggccctcgtctactggggcctctggtcaagcaaagagctcttcaaaggaatctaaagacagcaagacatcatctaaagatgacaaaggaagtacaagtagtactagtggtagcagtggaagctcaactaaaaatatctgggttagtggactttcatctaataccaaagctgctgatttgaagaacctctttggcaaatatggaaaggttctgagtgcaaaagtagttacaaatgctcgaagtcctggggcaaaatgctatggcattgtaactatgtcttcaagcacagaggtgtccaggtgtattgcacatcttcatcgcactgagctgcatggacagctgatttctgttgaaaaagtaaaaggtgatccctctaagaaagaaatgaagaaagaaaatgatgaaaagagtagttcaagaagttctggagataaaaaaaatacgagtgatagaagtagcaagacacaagcctctgtcaaaaaagaagagaaaagatcgtctgagaaatctgaaaaaaaagaaagcaaggatactaagaaaatagaaggtaaagatgagaagaatgataatggagcaagtggccaaacatcagaatcgattaaaaaaagtgaagaaaagaagcgaataagttccaagagtccaggacatatggtaatactagaccaaactaaaggagatcattgtagaccatcaagaagaggaagatatgagaaagtaagtctctgatcaggatggttgtatactacttcagctgtttacaaaagaagataattctgtttttccataaccatctttgcgtacttgcatgctagcaaacccaagaaaaaggaaatgttactagtcatttgaactttttaaatgacctactaaacttgaaaaataaagccccaaaatattttaatttctagtgttcttctaatttttttctacagattcatggaagaagtaaggaaaaggagagagctagtctagataaaaaaagagataaagactacagaaggaaagagatcttgccttttgaaaagatgaaggaacaaaggttgagagaacatttagttcgttttgaaaggctgcgacgagcaatggaacttcgaagacgaagagagattgcagagagagagcgtcgagagcgagaacgcattagaataattcgtgaacgggaagaacgggaacgcttacagagagagagagagcgcctagaaattgaaaggcaaaaactagagagagagagaatggaacgcgaacgcttggaaagggaacgcattcgtattgaacaggaacgtcgtaaggaagctgaacggattgctcgagaaagagaggaactcagaaggcaacaacagcagcttcgttatgaacaagaaaaaaggaattccttgaaacgcccacgtgatgtagatcataggcgagatgatccttactggagcgagaataaaaagttgtctctagatacagatgcacgatttggccatggatccgactactctcgccaacagaacagatttaatgactttgatcaccgagagaggggcaggtttcctgagagttcagcagtacagtcttcatcttttgaaaggcgggatcgctttgttggtcaaagtgaggggaaaaaagcacgacctactgcacgaagggaagatccaagcttcgaaagatatcccaaaaatttcagtgactccagaagaaatgagcctccaccaccaagaaatgaacttagagaatcagacaggcgagaagtacgaggggagcgagacgaaaggagaacggtgattattcatgacaggcctgatatcactcatcctagacatcctcgagaggcagggcccaatccttccagacccaccagctggaaaagtgaaggaagcatgtccactgacaaacgggaaacaagagttgaaaggccagaacgatctgggagagaagtatcagggcacagtgtgagaggcgctccccctgggaatcgtagcagcgcttcggggtacgggagcagagagggagacagaggagtcatcacagaccgaggaggtggatcacagcactatcctgaggagcgacatgtggttgaacgccatggacgggacacaagcggaccaaggaaagagtggcatggtccaccctctcaagggcctagctatcatgatacgaggcgaatgggtgacggccgggcaggagcaggcatgataacccaacattcaagtaacgcatccccaattaatagaattgtacaaatcagtggcaattccatgccaagaggaagtggctccggatttaagccatttaagggtggacctccgcgacgattctgaaaatgagctctctgccaaggttttaagataatttattgaaatctcctgtaaactttacttgactacttatgaagaggacctctgacttgcttgagagttctgtcagacttttctttttaaaaatttaacatgattgcttttctcaattttggagaagatgtttaaatagttctgttgtaacttttaatagttttgtgtatcattcaactttttttcttgcagcaccgaggcacatttgaaaagatggaattgaagtcgttttgtttaacgctgtgtgaatataaagagtagtttgcagctgtgtggtagtggtttaatttgcagccttagctctgtggtgtctggctctagagttacttctttttaccaagcattttcagcctccattttgaaggctgtctacacttaagaagtcttagctgtctaatttttagagaataagattgttcattgcatttctgagtattatgtaacctatttttgcagaaggtactgttacattaagtgcatctgtgtatcctggtttaaaaaaatgtaatcttttttgaaataaaccttcatattctgtatagttgctaaagtgttgagaacctttttaattgtaaaatgagaaccgattttcagtttagtgtagcagcacacttgttcaggtttgcatggtatgaaaccaaatagattcatgaaaccttggccatgaggtttgtttcacaaggttcttagaccgagttgtgcaggtaagtgcacttttaggtaatctgcactgtttgtttgatggataaattccatctctgggaattgtgtgggtattaatgtttccatgttcccaactatgttgagaagtggaaaaaaacccaggttctagatgggtgaatcagttgggttttgtaaatacttgtatgtggggaagacattgttgtctttttgtgaaaataaaaatccacacctgga

SEQ ID NO: 434757 - DNA, 4485 bp, Homo sapiens
attctttggactaacagccctagaactgctttgaggtcttttgaatggaactcggggaacctagttcgttggtgcacaccggcgacaatttttcgattattcagcagaactgataaagtatttccttgagaggttcagcgcgcgcacgcgccccctcggtttgtgttgagtaacgcgcgcactatgtcattcagtgcccgcacatcgttgttgctcaagactcaagacgttgcaagaaaatggctaacgaagcgacgagagaacggcggcgcggcggacgttgctgcggtaggacgtgcccgacctcccagtccacacaagggagcgcaccgcccaagtggccgcggcccgctcgaccgagcgcgccgctgccggtccctgcgccaacgcgcacgcgcggccgtcatccgggtgctggcggctgctgcaggttgcgctagggtggcggaccgggggaggggccagcggctcattgtgcgcagcgctgcgcggcgccggcggccgccgaggcctgggtggaagttggcgctgctgccgccgccctgcagcccactcgctgcctcggcagcgcgctgctcttctaagatggctgccgctaccggtgcggtggcagcctcggccgcctcgggtcaggcggaaggtaaaaagatcaccgatctgcgggtcatcgatctgaagtccgagctgaagcggcggaacttagacatcaccggagtcaagaccgtgctcatctcccgactcaagcaggctattgaagaggaaggaggcgatccagataatattgaattaactgtttcaactgatactccaaacaagaaaccaactaaaggcaaaggtaaaaaacatgaagcagatgagttgagtggagatgcttctgtggaagatgatgcttttatcaaggactgtgaattggagaatcaagaggcacatgagcaagatggaaatgatgaactaaaggactctgaagaatttggtgaaaatgaagaagaaaatgtgcattccaaggagttactctctgcagaagaaaacaagagagctcatgaattaatagaggcagaaggaatagaagatatagaaaaagaggacatcgaaagtcaggaaattgaagctcaagaaggtgaagatgatacctttctaacagcccaagatggtgaggaagaagaaaatgagaaagatatagcaggttctggtgatggtacacaagaagtatctaaacctcttccttcagaagggagcctagctgaggctgatcacacagctcatgaagagatggaagctcatacgactgtgaaagaagctgaggatgacaacatctcggtcacaatccaggctgaagatgccatcactctggattttgatggtgatgacctcctagaaacaggtaaaaatgtgaaaattacagattctgaagcaagtaagccaaaagatgggcaggacgccattgcacagagcccggagaaggaaagcaaggattatgagatgaatgcgaaccataaagatggtaagaaggaagactgcgtgaagggtgaccctgtcgagaaggaagccagagaaagttctaagaaagcagaatctggagacaaagaaaaggatactttgaagaaagggccctcgtctactggggcctctggtcaagcaaagagctcttcaaaggaatctaaagacagcaagacatcatctaaagatgacaaaggaagtacaagtagtactagtggtagcagtggaagctcaactaaaaatatctgggttagtggactttcatctaataccaaagctgctgatttgaagaacctctttggcaaatatggaaaggttctgagtgcaaaagtagttacaaatgctcgaagtcctggggcaaaatgctatggcattgtaactatgtcttcaagcacagaggtgtccaggtgtattgcacatcttcatcgcactgagctgcatggacagctgatttctgttgaaaaagtaaaaggtgatccctctaagaaagaaatgaagaaagaaaatgatgaaaagagtagttcaagaagttctggagataaaaaaaatacgagtgatagaagtagcaagacacaagcctctgtcaaaaaagaagagaaaagatcgtctgagaaatctgaaaaaaaagaaagcaaggatactaagaaaatagaaggtaaagatgagaagaatgataatggagcaagtggccaaacatcagaatcgattaaaaaaagtgaagaaaagaagcgaataagttccaagagtccaggacatatggtaatactagaccaaactaaaggagatcattgtagaccatcaagaagaggaagatatgagaaaattcatggaagaagtaaggaaaaggagagagctagtctagataaaaaaagagataaagactacagaaggaaagagatcttgccttttgaaaagatgaaggaacaaaggttgagagaacatttagttcgttttgaaaggctgcgacgagcaatggaacttcgaagttggttcttcattctgtgttgtctgaaggaacgtcgtaaggaagctgaacggattgctcgagaaagagaggaactcagaaggcaacaacagcagcttcgttatgaacaagaaaaaaggaattccttgaaacgcccacgtgatgtagatcataggcgagatgatccttactggagcgagaataaaaagttgtctctagatacagatgcacgatttggccatggatccgactactctcgccaacagaacagatttaatgactttgatcaccgagagaggggcaggtttcctgagagttcagcagtacagtcttcatcttttgaaaggcgggatcgctttgttggtcaaagtgaggggaaaaaagcacgacctactgcacgaagggaagatccaagcttcgaaagatatcccaaaaatttcagtgactccagaagaaatgagcctccaccaccaagaaatgaacttagagaatcagacaggcgagaagtacgaggggagcgagacgaaaggagaacggtgattattcatgacaggcctgatatcactcatcctagacatcctcgagaggcagggcccaatccttccagacccaccagctggaaaagtgaaggaagcatgtccactgacaaacgggaaacaagagttgaaaggccagaacgatctgggagagaagtatcagggcacagtgtgagaggcgctccccctgggaatcgtagcagcgcttcggggtacgggagcagagagggagacagaggagtcatcacagaccgaggaggtggatcacagcactatcctgaggagcgacatgtggttgaacgccatggacgggacacaagcggaccaaggaaagagtggcatggtccaccctctcaagggcctagctatcatgatacgaggcgaatgggtgacggccgggcaggagcaggcatgataacccaacattcaagtaacgcatccccaattaatagaattgtacaaatcagtggcaattccatgccaagaggaagtggctccggatttaagccatttaagggtggacctccgcgacgattctgaaaatgagctctctgccaaggttttaagataatttattgaaatctcctgtaaactttacttgactacttatgaagaggacctctgacttgcttgagagttctgtcagacttttctttttaaaaatttaacatgattgcttttctcaattttggagaagatgtttaaatagttctgttgtaacttttaatagttttgtgtatcattcaactttttttcttgcagcaccgaggcacatttgaaaagatggaattgaagtcgttttgtttaacgctgtgtgaatataaagagtagtttgcagctgtgtggtagtggtttaatttgcagccttagctctgtggtgtctggctctagagttacttctttttaccaagcattttcagcctccattttgaaggctgtctacacttaagaagtcttagctgtctaatttttagagaataagattgttcattgcatttctgagtattatgtaacctatttttgcagaaggtactgttacattaagtgcatctgtgtatcctggtttaaaaaaatgtaatcttttttgaaataaaccttcatattctgtatagttgctaaagtgttgagaacctttttaattgtaaaatgagaaccgattttcagtttagtgtagcagcacacttgttcaggtttgcatggtatgaaaccaaatagattcatgaaaccttggccatgaggtttgtttcacaaggttcttagaccgagttgtgcaggtaagtgcacttttaggtaatctgcactgtttgtttgatggataaattccatctctgggaattgtgtgggtattaatgtttccatgttcccaactatgttgagaagtggaaaaaaacccaggttctagatgggtgaatcagttgggttttgtaaatacttgtatgtggggaagacattgttgtctttttgtgaaaataaaaatccacacctgga

SEQ ID NO: 434758 - DNA, 3838 bp, Homo sapiens
  misc_feature (3813)..(3813): n is a, c, g, or t
attctttggactaacagccctagaactgctttgaggtcttttgaatggaactcggggaacctagttcgttggtgcacaccggcgacaatttttcgattattcagcagaactgataaagtatttccttgagaggttcagcgcgcgcacgcgccccctcggtttgtgttgagtaacgcgcgcactatgtcattcagtgcccgcacatcgttgttgctcaagactcaagacgttgcaagaaaatggctaacgaagcgacgagagaacggcggcgcggcggacgttgctgcggtaggacgtgcccgacctcccagtccacacaagggagcgcaccgcccaagtggccgcggcccgctcgaccgagcgcgccgctgccggtccctgcgccaacgcgcacgcgcggccgtcatccgggtgctggcggctgctgcaggttgcgctagggtggcggaccgggggaggggccagcggctcattgtgcgcagcgctgcgcggcgccggcggccgccgaggcctgggtggaagttggcgctgctgccgccgccctgcagcccactcgctgcctcggcagcgcgctgctcttctaagatggctgccgctaccggtgcggtggcagcctcggccgcctcgggtcaggcggaaggtaaaaagatcaccgatctgcgggtcatcgatctgaagtccgagctgaagcggcggaacttagacatcaccggagtcaagaccgtgctcatctcccgactcaagcaggctattgaagaggaaggaggcgatccagataatattgaattaactgtttcaactgatactccaaacaagaaaccaactaaaggcaaaggtaaaaaacatgaagcagatgagttgagtggagatgcttctgtggaagatgatgcttttatcaaggactgtgaattggagaatcaagaggcacatgagcaagatggaaatgatgaactaaaggactctgaagaatttggtgaaaatgaagaagaaaatgtgcattccaaggagttactctctgcagaagaaaacaagagagctcatgaattaatagaggcagaaggaatagaagatatagaaaaagaggacatcgaaagtcaggaaattgaagctcaagaaggtgaagatgatacctttctaacagcccaagatggtgaggaagaagaaaatgagaaagatatagcaggttctggtgatggtacacaagaagtatctaaacctcttccttcagaagggagcctagctgaggctgatcacacagctcatgaagagatggaagctcatacgactgtgaaagaagctgaggatgacaacatctcggtcacaatccaggctgaagatgccatcactctggattttgatggtgatgacctcctagaaacaggtaaaaatgtgaaaattacagattctgaagcaagtaagccaaaagatgggcaggacgccattgcacagagcccggagaaggaaagcaaggattatgagatgaatgcgaaccataaagatggtaagaaggaagactgcgtgaagggtgaccctgtcgagaaggaagccagagaaagttctaagaaagcagaatctggagacaaagaaaaggatactttgaagaaagggccctcgtctactggggcctctggtcaagcaaagagctcttcaaaggaatctaaagacagcaagacatcatctaaagatgacaaaggaagtacaagtagtactagtggtagcagtggaagctcaactaaaaatatctgggttagtggactttcatctaataccaaagctgctgatttgaagaacctctttggcaaatatggaaaggttctgagtgcaaaagtagttacaaatgctcgaagtcctggggcaaaatgctatggcattgtaactatgtcttcaagcacagaggtgtccaggtgtattgcacatcttcatcgcactgagctgcatggacagctgatttctgttgaaaaagtaaaaggtgatccctctaagaaagaaatgaagaaagaaaatgatgaaaagagtagttcaagaagttctggagataaaaaaaatacgagtgatagaagtagcaagacacaagcctctgtcaaaaaagaagagaaaagatcgtctgagaaatctgaaaaaaaagaaagcaaggatactaagaaaatagaaggtaaagatgagaagaatgataatggagcaagtggccaaacatcagaatcgattaaaaaaagtgaagaaaagaagcgaataagttccaagagtccaggacatatggtaatactagaccaaactaaaggagatcattgtagaccatcaagaagaggaagatatgagaaaattcatggaagaagtaaggaaaaggagagagctagtctagataaaaaaagagataaagactacagaaggaaagagatcttgccttttgaaaagatgaaggaacaaaggttgagagaacatttagttcgttttgaaaggctgcgacgagcaatggaacttcgaagacgaagagagattgcagagagagagcgtcgagagcgagaacgcattagaataattcgtgaacgggaagaacgggaacgcttacagagagagagagagcgcctagaaattgaaaggcaaaaactagagagagagagaatggaacgcgaacgcttggaaagggaacgcattcgtattgaacaggaacgtcgtaaggaagctgaacggattgctcgagaaagagaggaactcagaaggcaacaacagcagcttcgttatgaacaagaaaaaaggaattccttgaaacgcccacgtgatgtagatcataggcgagatgatccttactggagcgagaataaaaagttgtctctagatacagatgcacgatttggccatggatccgactactctcgccaacagaacagatttaatgactttgatcaccgagagaggggcaggtttcctgagagttcagcagtacagtcttcatcttttgaaaggcgggatcgctttgttggtcaaagtgaggggaaaaaagcacgacctactgcacgaagggaagatccaagcttcgaaagatatcccaaaaatttcagtgactccagaagaaatgagcctccaccaccaagaaatgaacttagagaatcagacaggcgagaagtacgaggggagcgagacgaaaggagaacggtgattattcatgacaggcctgatatcactcatcctagacatcctcgagaggcagggcccaatccttccagacccaccagctggaaaagtgaaggaagcatgtccactgacaaacgggaaacaagagttgaaaggccagaacgatctgggagagaagtatcagggcacagtgtgagaggcgctccccctgggaatcgtagcagcgcttcggggtacgggagcagagagggagacagaggagtcatcacagaccgaggaggtggatcacagcactatcctgaggagcgacatgtggttgaacgccatggacgggacacaagcggaccaaggaaagagtggcatggtccaccctctcaagggcctagctatcatgatacgaggcgaatgggtgacggccgggcaggagcaggcatgataacccaacattcaagttaaggcatcccaattatagaattgtccacatcggggcatcctgccaggaggaagggtcgggatagccctagggggagcgcgcgagaatcgtaatgagccgtgggggtaagaatatgcaaacgggaaatgagatagaagaccgcatcgagagagagattaacaaaagatgccggagaaggtcgtgttgtctttctctctcgtctctgagtctctgtgatcatattgtatccntcaagaaaccaaaagaaaaagacaa

SEQ ID NO: 434759 - DNA, 2894 bp, Homo sapiens
attctttggactaacagccctagaactgctttgaggtcttttgaatggaactcggggaacctagttcgttggtgcacaccggcgacaatttttcgattattcagcagaactgataaagtatttccttgagaggttcagcgcgcgcacgcgccccctcggtttgtgttgagtaacgcgcgcactatgtcattcagtgcccgcacatcgttgttgctcaagactcaagacgttgcaagaaaatggctaacgaagcgacgagagaacggcggcgcggcggacgttgctgcggtaggacgtgcccgacctcccagtccacacaagggagcgcaccgcccaagtggccgcggcccgctcgaccgagcgcgccgctgccggtccctgcgccaacgcgcacgcgcggccgtcatccgggtgctggcggctgctgcaggttgcgctagggtggcggaccgggggaggggccagcggctcattgtgcgcagcgctgcgcggcgccggcggccgccgaggcctgggtggaagttggcgctgctgccgccgccctgcagcccactcgctgcctcggcagcgcgctgctcttctaagatggctgccgctaccggtgcggtggcagcctcggccgcctcgggtcaggcggaaggtaaaaagatcaccgatctgcgggtcatcgatctgaagtccgagctgaagcggcggaacttagacatcaccggagtcaagaccgtgctcatctcccgactcaagcaggctattgaagaggaaggaggcgatccagataatattgaattaactgtttcaactgatactccaaacaagaaaccaactaaaggcaaaggtaaaaaacatgaagcagatgagttgagtggagatgcttctgtggaagatgatgcttttatcaaggactgtgaattggagaatcaagaggcacatgagcaagatggaaatgatgaactaaaggactctgaagaatttggtgaaaatgaagaagaaaatgtgcattccaaggagttactctctgcagaagaaaacaagagagctcatgaattaatagaggcagaaggaatagaagatatagaaaaagaggacatcgaaagtcaggaaattgaagctcaagaaggtgaagatgatacctttctaacagcccaagatggtgaggaagaagaaaatgagaaagatatagcaggttctggtgatggtacacaagaagtatctaaacctcttccttcagaagggagcctagctgaggctgatcacacagctcatgaagagatggaagctcatacgactgtgaaagaagctgaggatgacaacatctcggtcacaatccaggctgaagatgccatcactctggattttgatggtgatgacctcctagaaacaggtaaaaatgtgaaaattacagattctgaagcaagtaagccaaaagatgggcaggacgccattgcacagagcccggagaaggaaagcaaggattatgagatgaatgcgaaccataaagatggtaagaaggaagactgcgtgaagggtgaccctgtcgagaaggaagccagagaaagttctaagaaagcagaatctggagacaaagaaaaggatactttgaagaaagggccctcgtctactggggcctctggtcaagcaaagagctcttcaaaggaatctaaagacagcaagacatcatctaaagatgacaaaggaagtacaagtagtactagtggtagcagtggaagctcaactaaaaatatctgggttagtggactttcatctaataccaaagctgctgatttgaagaacctctttggcaaatatggaaaggttctgagtgcaaaagtagttacaaatgctcgaagtcctggggcaaaatgctatggcattgtaactatgtcttcaagcacagaggtgtccaggtgtattgcacatcttcatcgcactgagctgcatggacagctgatttctgttgaaaaagtaaaaggtgatccctctaagaaagaaatgaagaaagaaaatgatgaaaagagtagttcaagaagttctggagataaaaaaaatacgagtgatagaagtagcaagacacaagcctctgtcaaaaaagaagagaaaagatcgtctgagaaatctgaaaaaaaagaaagcaaggatactaagaaaatagaaggtaaagatgagaagaatgataatggagcaagtggccaaacatcagaatcgattaaaaaaagtgaagaaaagaagcgaataagttccaagagtccaggacatatggtaatactagaccaaactaaaggagatcattgtagaccatcaagaagaggaagatatgagaaaattcatggaagaagtaaggaaaaggagagagctagtctagataaaaaaagagataaagactacagaaggaaagagatcttgccttttgaaaagatgaaggaacaaaggttgagagaacatttagttcgttttgaaaggctgcgacgagcaatggaacttcgaaggaacgtcgtaaggaagctgaacggattgctcgagaaagagaggaactcagaaggcaacaacagcagcttcgttatgaacaagaaaaaaggaattccttgaaacgcccacgtgatgtagatcataggtagttactcattttattccttaacagttaaccttgctgttttattccctttaggctaagactagagaattagaaagtacaggctcccatcactggaataaaagtcatgatcaacagggatgggaaggattacagtactggggtagacccagtgcactagcaagtgggaacagtctgtgtttctttccctgtctacctttctgatgccaaatgtttttcattatgactggaaatacattgtcatagtaggcttcaataataattaaacagattttgaacattctta

SEQ ID NO: 434760 - DNA, 2546 bp, Homo sapiens
attctttggactaacagccctagaactgctttgaggtcttttgaatggaactcggggaacctagttcgttggtgcacaccggcgacaatttttcgattattcagcagaactgataaagtatttccttgagaggttcagcgcgcgcacgcgccccctcggtttgtgttgagtaacgcgcgcactatgtcattcagtgcccgcacatcgttgttgctcaagactcaagacgttgcaagaaaatggctaacgaagcgacgagagaacggcggcgcggcggacgttgctgcggtaggacgtgcccgacctcccagtccacacaagggagcgcaccgcccaagtggccgcggcccgctcgaccgagcgcgccgctgccggtccctgcgccaacgcgcacgcgcggccgtcatccgggtgctggcggctgctgcaggttgcgctagggtggcggaccgggggaggggccagcggctcattgtgcgcagcgctgcgcggcgccggcggccgccgaggcctgggtggaagttggcgctgctgccgccgccctgcagcccactcgctgcctcggcagcgcgctgctcttctaagatggctgccgctaccggtgcggtggcagcctcggccgcctcgggtcaggcggaaggtaaaaagatcaccgatctgcgggtcatcgatctgaagtccgagctgaagcggcggaacttagacatcaccggagtcaagaccgtgctcatctcccgactcaagcaggctattgaagaggaaggaggcgatccagataatattgaattaactgtttcaactgatactccaaacaagaaaccaactaaaggcaaaggtaaaaaacatgaagcagatgagttgagtggagatgcttctgtggaagatgatgcttttatcaaggactgtgaattggagaatcaagaggcacatgagcaagatggaaatgatgaactaaaggactctgaagaatttggtgaaaatgaagaagaaaatgtgcattccaaggagttactctctgcagaagaaaacaagagagctcatgaattaatagaggcagaaggaatagaagatatagaaaaagaggacatcgaaagtcaggaaattgaagctcaagaaggtgaagatgatacctttctaacagcccaagatggtgaggaagaagaaaatgagaaagatatagcaggttctggtgatggtacacaagaagtatctaaacctcttccttcagaagggagcctagctgaggctgatcacacagctcatgaagagatggaagctcatacgactgtgaaagaagctgaggatgacaacatctcggtcacaatccaggctgaagatgccatcactctggattttgatggtgatgacctcctagaaacaggtaaaaatgtgaaaattacagattctgaagcaagtaagccaaaagatgggcaggacgccattgcacagagcccggagaaggaaagcaaggattatgagatgaatgcgaaccataaagatggtaagaaggaagactgcgtgaagggtgaccctgtcgagaaggaagccagagaaagttctaagaaagcagaatctggagacaaagaaaaggatactttgaagaaagggccctcgtctactggggcctctggtcaagcaaagagctcttcaaaggaatctaaagacagcaagacatcatctaaagatgacaaaggaagtacaagtagtactagtggtagcagtggaagctcaactaaaaatatctgggttagtggactttcatctaataccaaagctgctgatttgaagaacctctttggcaaatatggaaaggttctgagtgcaaaagtagttacaaatgctcgaagtcctggggcaaaatgctatggcattgtaactatgtcttcaagcacagaggtgtccaggtgtattgcacatcttcatcgcactgagctgcatggacagctgatttctgttgaaaaagtaaaaggtgatccctctaagaaagaaatgaagaaagaaaatgatgaaaagagtagttcaagaagttctggagataaaaaaaatacgagtgatagaagtagcaagacacaagcctctgtcaaaaaagaagagaaaagatcgtctgagaaatctgaaaaaaaagaaagcaaggatactaagaaaatagaaggtaaagatgagaagaatgataatggagcaagtggccaaacatcagaatcgattaaaaaaagtgaagaaaagaagcgaataagttccaagagtccaggacatatggtaatactagaccaaactaaaggagatcattgtagaccatcaagaagaggaagatatgagaaaattcatggaagaagtaaggaaaaggagagagctagtctagataaaaaaagagataaagactacagaaggaaagagatcttgccttttgaaaagatgaaggaacaaaatgatgaaaagagtagttcaagaagttctggagataaaaaaaaatacgagtgatagaagtagcaagacacaagcctctgtcaaaaaagaagaaaaaagatcgtctgagatctgacaacaga

SEQ ID NO: 434761 - DNA, 2293 bp, Homo sapiens
attctttggactaacagccctagaactgctttgaggtcttttgaatggaactcggggaacctagttcgttggtgcacaccggcgacaatttttcgattattcagcagaactgataaagtatttccttgagaggttcagcgcgcgcacgcgccccctcggtttgtgttgagtaacgcgcgcactatgtcattcagtgcccgcacatcgttgttgctcaagactcaagacgttgcaagaaaatggctaacgaagcgacgagagaacggcggcgcggcggacgttgctgcggtaggacgtgcccgacctcccagtccacacaagggagcgcaccgcccaagtggccgcggcccgctcgaccgagcgcgccgctgccggtccctgcgccaacgcgcacgcgcggccgtcatccgggtgctggcggctgctgcaggttgcgctagggtggcggaccgggggaggggccagcggctcattgtgcgcagcgctgcgcggcgccggcggccgccgaggcctgggtggaagttggcgctgctgccgccgccctgcagcccactcgctgcctcggcagcgcgctgctcttctaagatggctgccgctaccggtgcggtggcagcctcggccgcctcgggtcaggcggaaggtaaaaagatcaccgatctgcgggtcatcgatctgaagtccgagctgaagcggcggaacttagacatcaccggagtcaagaccgtgctcatctcccgactcaagcaggctattgaagaggaaggaggcgatccagataatattgaattaactgtttcaactgatactccaaacaagaaaccaactaaaggcaaaggtaaaaaacatgaagcagatgagttgagtggagatgcttctgtggaagatgatgcttttatcaaggactgtgaattggagaatcaagaggcacatgagcaagatggaaatgatgaactaaaggactctgaagaatttggtgaaaatgaagaagaaaatgtgcattccaaggagttactctctgcagaagaaaacaagagagctcatgaattaatagaggcagaaggaatagaagatatagaaaaagaggacatcgaaagtcaggaaattgaagctcaagaaggtgaagatgatacctttctaacagcccaagatggtgaggaagaagaaaatgagaaagatatagcaggttctggtgatggtacacaagaagtatctaaacctcttccttcagaagggagcctagctgaggctgatcacacagctcatgaagagatggaagctcatacgactgtgaaagaagctgaggatgacaacatctcggtcacaatccaggctgaagatgccatcactctggattttgatggtgatgacctcctagaaacaggtaaaaatgtgaaaattacagattctgaagcaagtaagccaaaagatgggcaggacgccattgcacagagcccggagaaggaaagcaaggattatgagatgaatgcgaaccataaagatggtaagaaggaagactgcgtgaagggtgaccctgtcgagaaggaagccagagaaagttctaagaaagcagaatctggagacaaagaaaaggatactttgaagaaagggccctcgtctactggggcctctggtcaagcaaagagctcttcaaaggaatctaaagacagcaagacatcatctaaagatgacaaaggaagtacaagtagtactagtggtagcagtggaagctcaactaaaaatatctgggttagtggactttcatctaataccaaagctgctgatttgaagaacctctttggcaaatatggaaaggttctgagtgcaaaagtagttacaaatgctcgaagtcctggggcaaaatgctatggcattgtaactatgtcttcaagcacagaggtgtccaggtgtattgcacatcttcatcgcactgagctgcatggacagctgatttctgttgaaaaagtaaaaggtgatccctctaagaaagaaatgaagaaagaaaatgatgaaaagagtagttcaagaagttctggagataaaaaaaatacgagtgatagaagtagcaagacacaagcctctgtcaaaaaagaagagaaaagatcgtctgagaaatctgaaaaaaaagaaagcaaggatactaagaaaatagaaggtaaagatgagaagaatgataatggagcaagtggccaaacatcagaatcgattaaaaaaagtgaagaaaagaagcgaataatccaagaggttatccctaggggccctagcaaaggaagaggcggtgagcaggctgcagacg

SEQ ID NO: 434762 - DNA, 1470 bp, Homo sapiens
ttgcacatgcccaccaccaacagagagagcagcatactcgcttgcagaactgaacttagaagctggaaaagtgaaggaagcatgtccactgacaaacgggaaacaagagttgaaaggccagaacgatctgggagagaagtatcagggcacagtgtgagaggcgctccccctgggaatcgtagcagcgcttcggggtacgggagcagagagggagacagaggagtcatcacagaccgaggaggtggatcacagcactatcctgaggagcgacatgtggttgaacgccatggacgggacacaagcggaccaaggaaagagtggcatggtccaccctctcaagggcctagctatcatgatacgaggcgaatgggtgacggccgggcaggagcaggcatgataacccaacattcaagtaacgcatccccaattaatagaattgtacaaatcagtggcaattccatgccaagaggaagtggctccggatttaagccatttaagggtggacctccgcgacgattctgaaaatgagctctctgccaaggttttaagataatttattgaaatctcctgtaaactttacttgactacttatgaagaggacctctgacttgcttgagagttctgtcagacttttctttttaaaaatttaacatgattgcttttctcaattttggagaagatgtttaaatagttctgttgtaacttttaatagttttgtgtatcattcaactttttttcttgcagcaccgaggcacatttgaaaagatggaattgaagtcgttttgtttaacgctgtgtgaatataaagagtagtttgcagctgtgtggtagtggtttaatttgcagccttagctctgtggtgtctggctctagagttacttctttttaccaagcattttcagcctccattttgaaggctgtctacacttaagaagtcttagctgtctaatttttagagaataagattgttcattgcatttctgagtattatgtaacctatttttgcagaaggtactgttacattaagtgcatctgtgtatcctggtttaaaaaaatgtaatcttttttgaaataaaccttcatattctgtatagttgctaaagtgttgagaacctttttaattgtaaaatgagaaccgattttcagtttagtgtagcagcacacttgttcaggtttgcatggtatgaaaccaaatagattcatgaaaccttggccatgaggtttgtttcacaaggttcttagaccgagttgtgcaggtaagtgcacttttaggtaatctgcactgtttgtttgatggataaattccatctctgggaattgtgtgggtattaatgtttccatgttcccaactatgttgagaagtggaaaaaaacccaggttctagatgggtgaatcagttgggttttgtaaatacttgtatgtggggaagacattgttgtctttttgtgaaaataaaaatccacacctgga

SEQ ID NO: 434763 - DNA, 2392 bp, Homo sapiens
attctttggactaacagccctagaactgctttgaggtcttttgaatggaactcggggaacctagttcgttggtgcacaccggcgacaatttttcgattattcagcagaactgataaagtatttccttgagaggttcagcgcgcgcacgcgccccctcggtttgtgttgagtaacgcgcgcactatgtcattcagtgcccgcacatcgttgttgctcaagactcaagacgttgcaagaaaatggctaacgaagcgacgagagaacggcggcgcggcggacgttgctgcggtaggacgtgcccgacctcccagtccacacaagggagcgcaccgcccaagtggccgcggcccgctcgaccgagcgcgccgctgccggtccctgcgccaacgcgcacgcgcggccgtcatccgggtgctggcggctgctgcaggttgcgctagggtggcggaccgggggaggggccagcggctcattgtgcgcagcgctgcgcggcgccggcggccgccgaggcctgggtggaagttggcgctgctgccgccgccctgcagcccactcgctgcctcggcagcgcgctgctcttctaagatggctgccgctaccggtgcggtggcagcctcggccgcctcgggtcaggcggaaggtaaaaagatcaccgatctgcgggtcatcgatctgaagtccgagctgaagcggcggaacttagacatcaccggagtcaagaccgtgctcatctcccgactcaagcaggctattgaagaggaaggaggcgatccagataatattgaattaactgtttcaactgatactccaaacaagaaaccaactaaaggcaaaggtaaaaaacatgaagcagatgagttgagtggagatgcttctgtggaagatgatgcttttatcaaggactgtgaattggagaatcaagaggcacatgagcaagatggaaatgatgaactaaaggactctgaagaatttggtgaaaatgaagaagaaaatgtgcattccaaggagttactctctgcagaagaaaacaagagagctcatgaattaatagaggcagaaggaatagaagatatagaaaaagaggacatcgaaagtcaggaaattgaagctcaagaaggtgaagatgatacctttctaacagcccaagatggtgaggaagaagaaaatgagaaagatatagcaggttctggtgatggtacacaagaagtatctaaacctcttccttcagaagggagcctagctgaggctgatcacacagctcatgaagagatggaagctcatacgactgtgaaagaagctgaggatgacaacatctcggtcacaatccaggctgaagatgccatcactctggattttgatggtgatgacctcctagaaacaggtaaaaatgtgaaaattacagattctgaagcaagtaagccaaaagatgggcaggacgccattgcacagagcccggagaaggaaagcaaggattatgagatgaatgcgaaccataaagatggtaagaaggaagactgcgtgaagggtgaccctgtcgagaaggaagccagagaaagttctaagaaagcagaatctggagacaaagaaaaggatactttgaagaaagggccctcgtctactggggcctctggtcaagcaaagagctcttcaaaggaatctaaagacagcaagacatcatctaaagatgacaaaggaagtacaagtagtactagtggtagcagtggaagctcaactaaaaatatctgggttagtggactttcatctaataccaaagctgctgatttgaagaacctctttggcaaatatggaaaggttctgagtgcaaaagtagttacaaatgctcgaagtcctggggcaaaatgctatggcattgtaactatgtcttcaagcacagaggtgtccaggtgtattgcacatcttcatcgcactgagctgcatggacagctgatttctgttgaaaaagtaaaaggtgatccctctaagaaagaaatgaagaaagaaaatgatgaaaagagtagttcaagaagttctggagataaaaaaaatacgagtgatagaagtagcaagtaaggatttatttttatttatttattttgataagcagatagacttttttggtacattatgaagtactcattctgtttttttgtctggggcggtatggtcagggacacaagcctctgtcaaaaaagaagagaaaagatcgtctgagaaatctgaaaaaaaagaaagcaaggatactaagaaaatagaaggtaaagatgagaagaatgataatggagcaagtggccaaacatcagaatcgattaaaaaaagtgaagaaaagaagcgaataagtatgctatacatcttttcaatccctttctaatgcattctactacttaatttttac

SEQ ID NO: 434764 - DNA, 1787 bp, Homo sapiens
attctttggactaacagccctagaactgctttgaggtcttttgaatggaactcggggaacctagttcgttggtgcacaccggcgacaatttttcgattattcagcagaactgataaagtatttccttgagaggttcagcgcgcgcacgcgccccctcggtttgtgttgagtaacgcgcgcactatgtcattcagtgcccgcacatcgttgttgctcaagactcaagacgttgcaagaaaatggctaacgaagcgacgagagaacggcggcgcggcggacgttgctgcggtaggacgtgcccgacctcccagtccacacaagggagcgcaccgcccaagtggccgcggcccgctcgaccgagcgcgccgctgccggtccctgcgccaacgcgcacgcgcggccgtcatccgggtgctggcggctgctgcaggttgcgctagggtggcggaccgggggaggggccagcggctcattgtgcgcagcgctgcgcggcgccggcggccgccgaggcctgggtggaagttggcgctgctgccgccgccctgcagcccactcgctgcctcggcagcgcgctgctcttctaagatggctgccgctaccggtgcggtggcagcctcggccgcctcgggtcaggcggaaggtaaaaagatcaccgatctgcgggtcatcgatctgaagtccgagctgaagcggcggaacttagacatcaccggagtcaagaccgtgctcatctcccgactcaagcaggctattgaagaggaaggaggcgatccagataatattgaattaactgtttcaactgatactccaaacaagaaaccaactaaaggcaaaggtaaaaaacatgaagcagatgagttgagtggagatgcttctgtggaagatgatgcttttatcaaggactgtgaattggagaatcaagaggcacatgagcaagatggaaatgatgaactaaaggactctgaagaatttggtgaaaatgaagaagaaaatgtgcattccaaggagttactctctgcagaagaaaacaagagagctcatgaattaatagaggcagaaggaatagaagatatagaaaaagaggacatcgaaagtcaggaaattgaagctcaagaaggtgaagatgatacctttctaacagcccaagatggtgaggaagaagaaaatgagaaagatatagcaggttctggtgatggtacacaagaagtatctaaacctcttccttcagaagggagcctagctgaggctgatcacacagctcatgaagagatggaagctcatacgactgtgaaagaagctgaggatgacaacatctcggtcacaatccaggctgaagatgccatcactctggattttgatggtgatgacctcctagaaacaggtaaaaatgtgaaaattacagattctgaagcaagtaagccaaaagatgggcaggacgccattgcacagagcccggagaaggaaagcaaggattatgagatgaatgcgaaccataaagatggtaagaaggaagactgcgtgaagggtgaccctgtcgagaaggaagccagagaaagttctaagaaagcagaatctggagacaaagaaaaggatactttgaagaaagggccctcgtctactggggcctctggtcaagcaaagaggtttgtttttctatgtcagttctttacgatactgaattccagcattcaataagatcactctacattaagggggtggcttcaagaacatgtacagtaattagtgtcttatgatcctgcctataatatttttgaccgtcataagtt

SEQ ID NO: 434765 - DNA, 444 bp, Homo sapiens
tttagttcgttttgaaaggctgcgacgagcaatggaacttcgaaggtaggaagagagtctgttttatacctgtctttaaatataggtaaatatttaacactagttgtaagccatatttctggaaattgtattcccacagaaaactgtttgccaccttaaagaagttacggtagcatctaatgatttcttaagtttgcatagcactttacaatttacaaagtgcttttccatctgttgtctccaactcaacagttctgtaaggctagttatgcccattatacaattgaaaaaaatggaggcccagagaggctaaatgactcttccaatggccacatggctaacaagtggcagagtcgggactcagacccaagtcttctgactccaagtccaatgctctttcctcaacaccaaagctgctgccataaaaaacatgacttcaaagga

SEQ ID NO: 434766 - DNA, 523 bp, Homo sapiens
ttgtttgtttgtttggtttattactgtgtattcaagcacttgaaagttacgtctacagattatactttctggtactgttttgaatagtatatcttagctaagagtacctgtgaactgagtgacgtaaaatacgtcatcaggtcagccttcttattgacagctctttgatatgaggaagaattggattatataaactagttttgaatagtgaaactaatccagtttgttatttatgtactcattgatagatatacctgttttctaaaatgtaccaaacttgtgccacatatctctctacatggactctggttctgattggaatagcctatttatttgttagtgttaggtatccctaaataatatcattaaattatccaccaattttaacttggctgattttgtactattactaaaatctagttttatgtgaattcattttacatttgattattctttgaatttcaggatggtgaggaagaagaaaatgagaaaggtatgtttgatgctagagcttaaaaattgc

SEQ ID NO: 434767 - DNA, 512 bp, Homo sapiens
tctgcaatatcatggcagcctaatagtctgagcataggactatgagtccagagtagttgtaatccaggctctgtcactatcccagtcttagaaaataataacgatttccttacatattatagtgggaatgatttcccaaggctggaaggaaataatgcctctctttgcagaattgcacctcagggttttaaggcacttagtctccatgcatattaagaatgctatttctaattccctttaggtgcttttgttttagtcgaatgattaaactaaacttgaccttcccaaatacttgccaacttttaccacccagtccttgttatttttaatgttgcagaacaatagctacagcctagattattgaaatcaaatttaggtgtcataggtttgtgttttgcctggtctttgcttatgatggtttcttagcaacaggattaaaacaaggttgcatgtatacttatcttatgttttcattttgccttggttggttcttcattctgtgttgtctgaag

SEQ ID NO: 434768 - DNA, 438 bp, Homo sapiens
caatgaaaaattttagacattgttttatataatttttttcccttaggttccaagagtccaggacatatggtaatactagaccaaactaaaggagatcattgtagaccatcaagaagaggaagatatgagaaagtaagtctctgatcaggatggttgtatactacttcagctgtttacaaaagaagataattctgtttttccataaccatctttgcgtacttgcatgctagcaaacccaagaaaaaggaaatgttactagtcatttgaactttttaaatgacctactaaacttgaaaaataaagccccaaaatattttaatttctagtgttcttctaatttttttctacagattcatggaagaagtaaggaaaaggagagagctagtctagataaaaaaagagataaagactacagaaggaaagagatcttgccttttg

SEQ ID NO: 434769 - DNA, 167 bp, Homo sapiens
tgctgagattataggtatgagccactgcgcccggccaagtgacttttcatatgctattcttttagcactatcctgaggagcgacatgtggttgaacgccatggacgggacacaagcggaccaaggaaagagtggcatggtccaccctctcaagggcctagctatcat

SEQ ID NO: 434770 - DNA, 965 bp, Homo sapiens
  misc_feature (886)..(886): n is a, c, g, or t
  misc_feature (888)..(888): n is a, c, g, or t
  misc_feature (890)..(890): n is a, c, g, or t
  misc_feature (893)..(893): n is a, c, g, or t
  misc_feature (900)..(900): n is a, c, g, or t
tacttggcagtacctcagggtaaaggtagcgaggcctgggtgttggagcaatggaacttcgaagacgaagagagattgcagagagagagcgtcgagagcgagaacgcattagaataattcgtgaacgggaagaacgggaacgcttacagagagagagagagcgcctagaaattgaaaggcaaaaactagagagagagagaatggaacgcgaacgcttggaaagggaacgcattcgtattgaacaggaacgtcgtaaggaagctgaacggattgctcgagaaagagaggaactcagaaggcaacaacagcagcttcgttatgaacaagaaaaaaggaattccttgaaacgcccacgtgatgtagatcataggcgagatgatccttactggagcgagaataaaaagttgtctctagatacagatgcacgatttggccatggatccgactactctcgccaacagaacagatttaatgactttgatcaccgagagaggggcaggtttcctgagagttcagcagtacagtcttcatcttttgaaaggcgggatcgctttgttggtcaaagtgaggggaaaaaagcacgacctactgcacgaagggaagatccaagcttcgaaagatatcccaaaaatttcagtgactccagaagaaatgagcctccaccaccaagaaatgaacttagagaatcagacaggcgagaagtacgaggggagcgagacgaaaggagaacggtgattattcatgacaggcctgatatcactcatcctagacatcctcgagaggcagggcccaatccttccagacccaccagctggaaaagtgaaggaagcatgtccactgacaaacgggaaacaagagttgaaggccgaagatctgggagagaagntncnggnccggtgngagggccccccgggaatagggaaggtcggggcgggacaccaaggggaaaggggcccacccggggg

SEQ ID NO: 434771 - DNA, 4410 bp, Homo sapiens
attctttggactaacagccctagaactgctttgaggtcttttgaatggaactcggggaacctagttcgttggtgcacaccggcgacaatttttcgattattcagcagaactgataaagtatttccttgagaggttcagcgcgcgcacgcgccccctcggtttgtgttgagtaacgcgcgcactatgtcattcagtgcccgcacatcgttgttgctcaagactcaagacgttgcaagaaaatggctaacgaagcgacgagagaacggcggcgcggcggacgttgctgcggtaggacgtgcccgacctcccagtccacacaagggagcgcaccgcccaagtggccgcggcccgctcgaccgagcgcgccgctgccggtccctgcgccaacgcgcacgcgcggccgtcatccgggtgctggcggctgctgcaggttgcgctagggtggcggaccgggggaggggccagcggctcattgtgcgcagcgctgcgcggcgccggcggccgccgaggcctgggtggaagttggcgctgctgccgccgccctgcagcccactcgctgcctcggcagcgcgctgctcttctaagatggctgccgctaccggtgcggtggcagcctcggccgcctcgggtcaggcggaaggtaaaaagatcaccgatctgcgggtcatcgatctgaagtccgagctgaagcggcggaacttagacatcaccggagtcaagaccgtgctcatctcccgactcaagcaggctattgaagaggaaggaggcgatccagataatattgaattaactgtttcaactgatactccaaacaagaaaccaactaaaggcaaaggtaaaaaacatgaagcagatgagttgagtggagatgcttctgtggaagatgatgcttttatcaaggactgtgaattggagaatcaagaggcacatgagcaagatggaaatgatgaactaaaggactctgaagaatttggtgaaaatgaagaagaaaatgtgcattccaaggagttactctctgcagaagaaaacaagagagctcatgaattaatagaggcagaaggaatagaagatatagaaaaagaggacatcgaaagtcaggaaattgaagctcaagaaggtgaagatgatacctttctaacagcccaagatggtgaggaagaagaaaatgagaaagattctgaagcaagtaagccaaaagatgggcaggacgccattgcacagagcccggagaaggaaagcaaggattatgagatgaatgcgaaccataaagatggtaagaaggaagactgcgtgaagggtgaccctgtcgagaaggaagccagagaaagttctaagaaagcagaatctggagacaaagaaaaggatactttgaagaaagggccctcgtctactggggcctctggtcaagcaaagagctcttcaaaggaatctaaagacagcaagacatcatctaaagatgacaaaggaagtacaagtagtactagtggtagcagtggaagctcaactaaaaatatctgggttagtggactttcatctaataccaaagctgctgatttgaagaacctctttggcaaatatggaaaggttctgagtgcaaaagtagttacaaatgctcgaagtcctggggcaaaatgctatggcattgtaactatgtcttcaagcacagaggtgtccaggtgtattgcacatcttcatcgcactgagctgcatggacagctgatttctgttgaaaaagtaaaaggtgatccctctaagaaagaaatgaagaaagaaaatgatgaaaagagtagttcaagaagttctggagataaaaaaaatacgagtgatagaagtagcaagacacaagcctctgtcaaaaaagaagagaaaagatcgtctgagaaatctgaaaaaaaagaaagcaaggatactaagaaaatagaaggtaaagatgagaagaatgataatggagcaagtggccaaacatcagaatcgattaaaaaaagtgaagaaaagaagcgaataagttccaagagtccaggacatatggtaatactagaccaaactaaaggagatcattgtagaccatcaagaagaggaagatatgagaaaattcatggaagaagtaaggaaaaggagagagctagtctagataaaaaaagagataaagactacagaaggaaagagatcttgccttttgaaaagatgaaggaacaaaggttgagagaacatttagttcgttttgaaaggctgcgacgagcaatggaacttcgaagacgaagagagattgcagagagagagcgtcgagagcgagaacgcattagaataattcgtgaacgggaagaacgggaacgcttacagagagagagagagcgcctagaaattgaaaggcaaaaactagagagagagagaatggaacgcgaacgcttggaaagggaacgcattcgtattgaacaggaacgtcgtaaggaagctgaacggattgctcgagaaagagaggaactcagaaggcaacaacagcagcttcgttatgaacaagaaaaaaggaattccttgaaacgcccacgtgatgtagatcataggcgagatgatccttactggagcgagaataaaaagttgtctctagatacagatgcacgatttggccatggatccgactactctcgccaacagaacagatttaatgactttgatcaccgagagaggggcaggtttcctgagagttcagcagtacagtcttcatcttttgaaaggcgggatcgctttgttggtcaaagtgaggggaaaaaagcacgacctactgcacgaagggaagatccaagcttcgaaagatatcccaaaaatttcagtgactccagaagaaatgagcctccaccaccaagaaatgaacttagagaatcagacaggcgagaagtacgaggggagcgagacgaaaggagaacggtgattattcatgacaggcctgatatcactcatcctagacatcctcgagaggcagggcccaatccttccagacccaccagctggaaaagtgaaggaagcatgtccactgacaaacgggaaacaagagttgaaaggccagaacgatctgggagagaagtatcagggcacagtgtgagaggcgctccccctgggaatcgtagcagcgcttcggggtacgggagcagagagggagacagaggagtcatcacagaccgaggaggtggatcacagcactatcctgaggagcgacatgtggttgaacgccatggacgggacacaagcggaccaaggaaagagtggcatggtccaccctctcaagggcctagctatcatgatacgaggcgaatgggtgacggccgggcaggagcaggcatgataacccaacattcaagtaacgcatccccaattaatagaattgtacaaatcagtggcaattccatgccaagaggaagtggctccggatttaagccatttaagggtggacctccgcgacgattctgaaaatgagctctctgccaaggttttaagataatttattgaaatctcctgtaaactttacttgactacttatgaagaggacctctgacttgcttgagagttctgtcagacttttctttttaaaaatttaacatgattgcttttctcaattttggagaagatgtttaaatagttctgttgtaacttttaatagttttgtgtatcattcaactttttttcttgcagcaccgaggcacatttgaaaagatggaattgaagtcgttttgtttaacgctgtgtgaatataaagagtagtttgcagctgtgtggtagtggtttaatttgcagccttagctctgtggtgtctggctctagagttacttctttttaccaagcattttcagcctccattttgaaggctgtctacacttaagaagtcttagctgtctaatttttagagaataagattgttcattgcatttctgagtattatgtaacctatttttgcagaaggtactgttacattaagtgcatctgtgtatcctggtttaaaaaaatgtaatcttttttgaaataaaccttcatattctgtatagttgctaaagtgttgagaacctttttaattgtaaaatgagaaccgattttcagtttagtgtagcagcacacttgttcaggtttgcatggtatgaaaccaaatagattcatgaaaccttggccatgaggtttgtttcacaaggttcttagaccgagttgtgcaggtaagtgcacttttaggtaatctgcactgtttgtttgatggataaattccatctctgggaattgtgtgggtattaatgtttccatgttcccaactatgttgagaagtggaaaaaaacccaggttctagatgggtgaatcagttgggttttgtaaatacttgtatgtggggaagacattgttgtctttttgtgaaaataaaaatccacacctgga

SEQ ID NO: 434772 - DNA, 4440 bp, Homo sapiens
attctttggactaacagccctagaactgctttgaggtcttttgaatggaactcggggaacctagttcgttggtgcacaccggcgacaatttttcgattattcagcagaactgataaagtatttccttgagaggttcagcgcgcgcacgcgccccctcggtttgtgttgagtaacgcgcgcactatgtcattcagtgcccgcacatcgttgttgctcaagactcaagacgttgcaagaaaatggctaacgaagcgacgagagaacggcggcgcggcggacgttgctgcggtaggacgtgcccgacctcccagtccacacaagggagcgcaccgcccaagtggccgcggcccgctcgaccgagcgcgccgctgccggtccctgcgccaacgcgcacgcgcggccgtcatccgggtgctggcggctgctgcaggttgcgctagggtggcggaccgggggaggggccagcggctcattgtgcgcagcgctgcgcggcgccggcggccgccgaggcctgggtggaagttggcgctgctgccgccgccctgcagcccactcgctgcctcggcagcgcgctgctcttctaagatggctgccgctaccggtgcggtggcagcctcggccgcctcgggtcaggcggaaggtaaaaagatcaccgatctgcgggtcatcgatctgaagtccgagctgaagcggcggaacttagacatcaccggagtcaagaccgtgctcatctcccgactcaagcaggctattgaagaggaaggaggcgatccagataatattgaattaactgtttcaactgatactccaaacaagaaaccaactaaaggcaaaggtaaaaaacatgaagcagatgagttgagtggagatgcttctgtggaagatgatgcttttatcaaggaaattgaagctcaagaaggtgaagatgatacctttctaacagcccaagatggtgaggaagaagaaaatgagaaagatatagcaggttctggtgatggtacacaagaagtatctaaacctcttccttcagaagggagcctagctgaggctgatcacacagctcatgaagagatggaagctcatacgactgtgaaagaagctgaggatgacaacatctcggtcacaatccaggctgaagatgccatcactctggattttgatggtgatgacctcctagaaacaggtaaaaatgtgaaaattacagattctgaagcaagtaagccaaaagatgggcaggacgccattgcacagagcccggagaaggaaagcaaggattatgagatgaatgcgaaccataaagatggtaagaaggaagactgcgtgaagggtgaccctgtcgagaaggaagccagagaaagttctaagaaagcagaatctggagacaaagaaaaggatactttgaagaaagggccctcgtctactggggcctctggtcaagcaaagagctcttcaaaggaatctaaagacagcaagacatcatctaaagatgacaaaggaagtacaagtagtactagtggtagcagtggaagctcaactaaaaatatctgggttagtggactttcatctaataccaaagctgctgatttgaagaacctctttggcaaatatggaaaggttctgagtgcaaaagtagttacaaatgctcgaagtcctggggcaaaatgctatggcattgtaactatgtcttcaagcacagaggtgtccaggtgtattgcacatcttcatcgcactgagctgcatggacagctgatttctgttgaaaaagtaaaaggtgatccctctaagaaagaaatgaagaaagaaaatgatgaaaagagtagttcaagaagttctggagataaaaaaaatacgagtgatagaagtagcaagacacaagcctctgtcaaaaaagaagagaaaagatcgtctgagaaatctgaaaaaaaagaaagcaaggatactaagaaaatagaaggtaaagatgagaagaatgataatggagcaagtggccaaacatcagaatcgattaaaaaaagtgaagaaaagaagcgaataagttccaagagtccaggacatatggtaatactagaccaaactaaaggagatcattgtagaccatcaagaagaggaagatatgagaaaattcatggaagaagtaaggaaaaggagagagctagtctagataaaaaaagagataaagactacagaaggaaagagatcttgccttttgaaaagatgaaggaacaaaggttgagagaacatttagttcgttttgaaaggctgcgacgagcaatggaacttcgaagacgaagagagattgcagagagagagcgtcgagagcgagaacgcattagaataattcgtgaacgggaagaacgggaacgcttacagagagagagagagcgcctagaaattgaaaggcaaaaactagagagagagagaatggaacgcgaacgcttggaaagggaacgcattcgtattgaacaggaacgtcgtaaggaagctgaacggattgctcgagaaagagaggaactcagaaggcaacaacagcagcttcgttatgaacaagaaaaaaggaattccttgaaacgcccacgtgatgtagatcataggcgagatgatccttactggagcgagaataaaaagttgtctctagatacagatgcacgatttggccatggatccgactactctcgccaacagaacagatttaatgactttgatcaccgagagaggggcaggtttcctgagagttcagcagtacagtcttcatcttttgaaaggcgggatcgctttgttggtcaaagtgaggggaaaaaagcacgacctactgcacgaagggaagatccaagcttcgaaagatatcccaaaaatttcagtgactccagaagaaatgagcctccaccaccaagaaatgaacttagagaatcagacaggcgagaagtacgaggggagcgagacgaaaggagaacggtgattattcatgacaggcctgatatcactcatcctagacatcctcgagaggcagggcccaatccttccagacccaccagctggaaaagtgaaggaagcatgtccactgacaaacgggaaacaagagttgaaaggccagaacgatctgggagagaagtatcagggcacagtgtgagaggcgctccccctgggaatcgtagcagcgcttcggggtacgggagcagagagggagacagaggagtcatcacagaccgaggaggtggatcacagcactatcctgaggagcgacatgtggttgaacgccatggacgggacacaagcggaccaaggaaagagtggcatggtccaccctctcaagggcctagctatcatgatacgaggcgaatgggtgacggccgggcaggagcaggcatgataacccaacattcaagtaacgcatccccaattaatagaattgtacaaatcagtggcaattccatgccaagaggaagtggctccggatttaagccatttaagggtggacctccgcgacgattctgaaaatgagctctctgccaaggttttaagataatttattgaaatctcctgtaaactttacttgactacttatgaagaggacctctgacttgcttgagagttctgtcagacttttctttttaaaaatttaacatgattgcttttctcaattttggagaagatgtttaaatagttctgttgtaacttttaatagttttgtgtatcattcaactttttttcttgcagcaccgaggcacatttgaaaagatggaattgaagtcgttttgtttaacgctgtgtgaatataaagagtagtttgcagctgtgtggtagtggtttaatttgcagccttagctctgtggtgtctggctctagagttacttctttttaccaagcattttcagcctccattttgaaggctgtctacacttaagaagtcttagctgtctaatttttagagaataagattgttcattgcatttctgagtattatgtaacctatttttgcagaaggtactgttacattaagtgcatctgtgtatcctggtttaaaaaaatgtaatcttttttgaaataaaccttcatattctgtatagttgctaaagtgttgagaacctttttaattgtaaaatgagaaccgattttcagtttagtgtagcagcacacttgttcaggtttgcatggtatgaaaccaaatagattcatgaaaccttggccatgaggtttgtttcacaaggttcttagaccgagttgtgcaggtaagtgcacttttaggtaatctgcactgtttgtttgatggataaattccatctctgggaattgtgtgggtattaatgtttccatgttcccaactatgttgagaagtggaaaaaaacccaggttctagatgggtgaatcagttgggttttgtaaatacttgtatgtggggaagacattgttgtctttttgtgaaaataaaaatccacacctgga

SEQ ID NO: 434773 - DNA, 4488 bp, Homo sapiens
attctttggactaacagccctagaactgctttgaggtcttttgaatggaactcggggaacctagttcgttggtgcacaccggcgacaatttttcgattattcagcagaactgataaagtatttccttgagaggttcagcgcgcgcacgcgccccctcggtttgtgttgagtaacgcgcgcactatgtcattcagtgcccgcacatcgttgttgctcaagactcaagacgttgcaagaaaatggctaacgaagcgacgagagaacggcggcgcggcggacgttgctgcggtaggacgtgcccgacctcccagtccacacaagggagcgcaccgcccaagtggccgcggcccgctcgaccgagcgcgccgctgccggtccctgcgccaacgcgcacgcgcggccgtcatccgggtgctggcggctgctgcaggttgcgctagggtggcggaccgggggaggggccagcggctcattgtgcgcagcgctgcgcggcgccggcggccgccgaggcctgggtggaagttggcgctgctgccgccgccctgcagcccactcgctgcctcggcagcgcgctgctcttctaagatggctgccgctaccggtgcggtggcagcctcggccgcctcgggtcaggcggaaggtaaaaagatcaccgatctgcgggtcatcgatctgaagtccgagctgaagcggcggaacttagacatcaccggagtcaagaccgtgctcatctcccgactcaagcaggctattgaagaggaaggaggcgatccagataatattgaattaactgtttcaactgatactccaaacaagaaaccaactaaaggcaaaggtaaaaaacatgaagcagatgagttgagtggagatgcttctgtggaagatgatgcttttatcaaggactgtgaattggagaatcaagaggcacatgagcaagatggaaatgatgaactaaaggactctgaagaatttggtgaaaatgaagaagaaaatgtgcattccaaggagttactctctgcagaagaaaacaagagagctcatgaattaatagaggcagaaggaatagaagatatagaaaaagaggacatcgaaagtcaggaaattgaagctcaagaaggtgaagatgatacctttctaacagcccaagatggtgaggaagaagaaaatgagaaagatatagcaggttctggtgatggtacacaagaagtatctaaacctcttccttcagaagggagcctagctgaggctgatcacacagctcatgaagagatggaagctcatacgactgtgaaagaagctgaggatgacaacatctcggtcacaatccaggctgaagatgccatcactctggattttgatggtgatgacctcctagaaacaggtaaaaatgtgaaaattacagattctgaagcaagtaagccaaaagatgggcaggacgccattgcacagagcccggagaaggaaagcaaggattatgagatgaatgcgaaccataaagatggtaagaaggaagactgcgtgaagggtgaccctgtcgagaaggaagccagagaaagttctaagaaagcagaatctggagacaaagaaaaggatactttgaagaaagggccctcgtctactggggcctctggtcaagcaaagagctcttcaaaggaatctaaagacagcaagacatcatctaaagatgacaaaggaagtacaagtagtactagtggtagcagtggaagctcaactaaaaatatctgggttagtggactttcatctaataccaaagctgctgatttgaagaacctctttggcaaatatggaaaggtaaaaggtgatccctctaagaaagaaatgaagaaagaaaatgatgaaaagagtagttcaagaagttctggagataaaaaaaatacgagtgatagaagtagcaagacacaagcctctgtcaaaaaagaagagaaaagatcgtctgagaaatctgaaaaaaaagaaagcaaggatactaagaaaatagaaggtaaagatgagaagaatgataatggagcaagtggccaaacatcagaatcgattaaaaaaagtgaagaaaagaagcgaataagttccaagagtccaggacatatggtaatactagaccaaactaaaggagatcattgtagaccatcaagaagaggaagatatgagaaaattcatggaagaagtaaggaaaaggagagagctagtctagataaaaaaagagataaagactacagaaggaaagagatcttgccttttgaaaagatgaaggaacaaaggttgagagaacatttagttcgttttgaaaggctgcgacgagcaatggaacttcgaagacgaagagagattgcagagagagagcgtcgagagcgagaacgcattagaataattcgtgaacgggaagaacgggaacgcttacagagagagagagagcgcctagaaattgaaaggcaaaaactagagagagagagaatggaacgcgaacgcttggaaagggaacgcattcgtattgaacaggaacgtcgtaaggaagctgaacggattgctcgagaaagagaggaactcagaaggcaacaacagcagcttcgttatgaacaagaaaaaaggaattccttgaaacgcccacgtgatgtagatcataggcgagatgatccttactggagcgagaataaaaagttgtctctagatacagatgcacgatttggccatggatccgactactctcgccaacagaacagatttaatgactttgatcaccgagagaggggcaggtttcctgagagttcagcagtacagtcttcatcttttgaaaggcgggatcgctttgttggtcaaagtgaggggaaaaaagcacgacctactgcacgaagggaagatccaagcttcgaaagatatcccaaaaatttcagtgactccagaagaaatgagcctccaccaccaagaaatgaacttagagaatcagacaggcgagaagtacgaggggagcgagacgaaaggagaacggtgattattcatgacaggcctgatatcactcatcctagacatcctcgagaggcagggcccaatccttccagacccaccagctggaaaagtgaaggaagcatgtccactgacaaacgggaaacaagagttgaaaggccagaacgatctgggagagaagtatcagggcacagtgtgagaggcgctccccctgggaatcgtagcagcgcttcggggtacgggagcagagagggagacagaggagtcatcacagaccgaggaggtggatcacagcactatcctgaggagcgacatgtggttgaacgccatggacgggacacaagcggaccaaggaaagagtggcatggtccaccctctcaagggcctagctatcatgatacgaggcgaatgggtgacggccgggcaggagcaggcatgataacccaacattcaagtaacgcatccccaattaatagaattgtacaaatcagtggcaattccatgccaagaggaagtggctccggatttaagccatttaagggtggacctccgcgacgattctgaaaatgagctctctgccaaggttttaagataatttattgaaatctcctgtaaactttacttgactacttatgaagaggacctctgacttgcttgagagttctgtcagacttttctttttaaaaatttaacatgattgcttttctcaattttggagaagatgtttaaatagttctgttgtaacttttaatagttttgtgtatcattcaactttttttcttgcagcaccgaggcacatttgaaaagatggaattgaagtcgttttgtttaacgctgtgtgaatataaagagtagtttgcagctgtgtggtagtggtttaatttgcagccttagctctgtggtgtctggctctagagttacttctttttaccaagcattttcagcctccattttgaaggctgtctacacttaagaagtcttagctgtctaatttttagagaataagattgttcattgcatttctgagtattatgtaacctatttttgcagaaggtactgttacattaagtgcatctgtgtatcctggtttaaaaaaatgtaatcttttttgaaataaaccttcatattctgtatagttgctaaagtgttgagaacctttttaattgtaaaatgagaaccgattttcagtttagtgtagcagcacacttgttcaggtttgcatggtatgaaaccaaatagattcatgaaaccttggccatgaggtttgtttcacaaggttcttagaccgagttgtgcaggtaagtgcacttttaggtaatctgcactgtttgtttgatggataaattccatctctgggaattgtgtgggtattaatgtttccatgttcccaactatgttgagaagtggaaaaaaacccaggttctagatgggtgaatcagttgggttttgtaaatacttgtatgtggggaagacattgttgtctttttgtgaaaataaaaatccacacctgga

SEQ ID NO: 434774 - DNA, 4386 bp, Homo sapiens
attctttggactaacagccctagaactgctttgaggtcttttgaatggaactcggggaacctagttcgttggtgcacaccggcgacaatttttcgattattcagcagaactgataaagtatttccttgagaggttcagcgcgcgcacgcgccccctcggtttgtgttgagtaacgcgcgcactatgtcattcagtgcccgcacatcgttgttgctcaagactcaagacgttgcaagaaaatggctaacgaagcgacgagagaacggcggcgcggcggacgttgctgcggtaggacgtgcccgacctcccagtccacacaagggagcgcaccgcccaagtggccgcggcccgctcgaccgagcgcgccgctgccggtccctgcgccaacgcgcacgcgcggccgtcatccgggtgctggcggctgctgcaggttgcgctagggtggcggaccgggggaggggccagcggctcattgtgcgcagcgctgcgcggcgccggcggccgccgaggcctgggtggaagttggcgctgctgccgccgccctgcagcccactcgctgcctcggcagcgcgctgctcttctaagatggctgccgctaccggtgcggtggcagcctcggccgcctcgggtcaggcggaaggtaaaaagatcaccgatctgcgggtcatcgatctgaagtccgagctgaagcggcggaacttagacatcaccggagtcaagaccgtgctcatctcccgactcaagcaggctattgaagaggaaggaggcgatccagataatattgaattaactgtttcaactgatactccaaacaagaaaccaactaaaggcaaaggtaaaaaacatgaagcagatgagttgagtggagatgcttctgtggaagatgatgcttttatcaaggaaattgaagctcaagaaggtgaagatgatacctttctaacagcccaagatggtgaggaagaagaaaatgagaaagaagggagcctagctgaggctgatcacacagctcatgaagagatggaagctcatacgactgtgaaagaagctgaggatgacaacatctcggtcacaatccaggctgaagatgccatcactctggattttgatggtgatgacctcctagaaacaggtaaaaatgtgaaaattacagattctgaagcaagtaagccaaaagatgggcaggacgccattgcacagagcccggagaaggaaagcaaggattatgagatgaatgcgaaccataaagatggtaagaaggaagactgcgtgaagggtgaccctgtcgagaaggaagccagagaaagttctaagaaagcagaatctggagacaaagaaaaggatactttgaagaaagggccctcgtctactggggcctctggtcaagcaaagagctcttcaaaggaatctaaagacagcaagacatcatctaaagatgacaaaggaagtacaagtagtactagtggtagcagtggaagctcaactaaaaatatctgggttagtggactttcatctaataccaaagctgctgatttgaagaacctctttggcaaatatggaaaggttctgagtgcaaaagtagttacaaatgctcgaagtcctggggcaaaatgctatggcattgtaactatgtcttcaagcacagaggtgtccaggtgtattgcacatcttcatcgcactgagctgcatggacagctgatttctgttgaaaaagtaaaaggtgatccctctaagaaagaaatgaagaaagaaaatgatgaaaagagtagttcaagaagttctggagataaaaaaaatacgagtgatagaagtagcaagacacaagcctctgtcaaaaaagaagagaaaagatcgtctgagaaatctgaaaaaaaagaaagcaaggatactaagaaaatagaaggtaaagatgagaagaatgataatggagcaagtggccaaacatcagaatcgattaaaaaaagtgaagaaaagaagcgaataagttccaagagtccaggacatatggtaatactagaccaaactaaaggagatcattgtagaccatcaagaagaggaagatatgagaaaattcatggaagaagtaaggaaaaggagagagctagtctagataaaaaaagagataaagactacagaaggaaagagatcttgccttttgaaaagatgaaggaacaaaggttgagagaacatttagttcgttttgaaaggctgcgacgagcaatggaacttcgaagacgaagagagattgcagagagagagcgtcgagagcgagaacgcattagaataattcgtgaacgggaagaacgggaacgcttacagagagagagagagcgcctagaaattgaaaggcaaaaactagagagagagagaatggaacgcgaacgcttggaaagggaacgcattcgtattgaacaggaacgtcgtaaggaagctgaacggattgctcgagaaagagaggaactcagaaggcaacaacagcagcttcgttatgaacaagaaaaaaggaattccttgaaacgcccacgtgatgtagatcataggcgagatgatccttactggagcgagaataaaaagttgtctctagatacagatgcacgatttggccatggatccgactactctcgccaacagaacagatttaatgactttgatcaccgagagaggggcaggtttcctgagagttcagcagtacagtcttcatcttttgaaaggcgggatcgctttgttggtcaaagtgaggggaaaaaagcacgacctactgcacgaagggaagatccaagcttcgaaagatatcccaaaaatttcagtgactccagaagaaatgagcctccaccaccaagaaatgaacttagagaatcagacaggcgagaagtacgaggggagcgagacgaaaggagaacggtgattattcatgacaggcctgatatcactcatcctagacatcctcgagaggcagggcccaatccttccagacccaccagctggaaaagtgaaggaagcatgtccactgacaaacgggaaacaagagttgaaaggccagaacgatctgggagagaagtatcagggcacagtgtgagaggcgctccccctgggaatcgtagcagcgcttcggggtacgggagcagagagggagacagaggagtcatcacagaccgaggaggtggatcacagcactatcctgaggagcgacatgtggttgaacgccatggacgggacacaagcggaccaaggaaagagtggcatggtccaccctctcaagggcctagctatcatgatacgaggcgaatgggtgacggccgggcaggagcaggcatgataacccaacattcaagtaacgcatccccaattaatagaattgtacaaatcagtggcaattccatgccaagaggaagtggctccggatttaagccatttaagggtggacctccgcgacgattctgaaaatgagctctctgccaaggttttaagataatttattgaaatctcctgtaaactttacttgactacttatgaagaggacctctgacttgcttgagagttctgtcagacttttctttttaaaaatttaacatgattgcttttctcaattttggagaagatgtttaaatagttctgttgtaacttttaatagttttgtgtatcattcaactttttttcttgcagcaccgaggcacatttgaaaagatggaattgaagtcgttttgtttaacgctgtgtgaatataaagagtagtttgcagctgtgtggtagtggtttaatttgcagccttagctctgtggtgtctggctctagagttacttctttttaccaagcattttcagcctccattttgaaggctgtctacacttaagaagtcttagctgtctaatttttagagaataagattgttcattgcatttctgagtattatgtaacctatttttgcagaaggtactgttacattaagtgcatctgtgtatcctggtttaaaaaaatgtaatcttttttgaaataaaccttcatattctgtatagttgctaaagtgttgagaacctttttaattgtaaaatgagaaccgattttcagtttagtgtagcagcacacttgttcaggtttgcatggtatgaaaccaaatagattcatgaaaccttggccatgaggtttgtttcacaaggttcttagaccgagttgtgcaggtaagtgcacttttaggtaatctgcactgtttgtttgatggataaattccatctctgggaattgtgtgggtattaatgtttccatgttcccaactatgttgagaagtggaaaaaaacccaggttctagatgggtgaatcagttgggttttgtaaatacttgtatgtggggaagacattgttgtctttttgtgaaaataaaaatccacacctgga

SEQ ID NO: 434775 - DNA, 3106 bp, Homo sapiens
tataaagcaaagctattgtatacccttttacttaggaaattgaagctcaagaaggtgaagatgatacctttctaacagcccaagatggtgaggaagaagaaaatgagaaagctcttcaaaggaatctaaagacagcaagacatcatctaaagatgacaaaggaagtacaagtagtactagtggtagcagtggaagctcaactaaaaatatctgggttagtggactttcatctaataccaaagctgctgatttgaagaacctctttggcaaatatggaaaggttctgagtgcaaaagtagttacaaatgctcgaagtcctggggcaaaatgctatggcattgtaactatgtcttcaagcacagaggtgtccaggtgtattgcacatcttcatcgcactgagctgcatggacagctgatttctgttgaaaaagtaaaaggtgatccctctaagaaagaaatgaagaaagaaaatgatgaaaagagtagttcaagaagttctggagataaaaaaaatacgagtgatagaagtagcaagacacaagcctctgtcaaaaaagaagagaaaagatcgtctgagaaatctgaaaaaaaagaaagcaaggatactaagaaaatagaaggtaaagatgagaagaatgataatggagcaagtggccaaacatcagaatcgattaaaaaaagtgaagaaaagaagcgaataagttccaagagtccaggacatatggtaatactagaccaaactaaaggagatcattgtagaccatcaagaagaggaagatatgagaaaattcatggaagaagtaaggaaaaggagagagctagtctagataaaaaaagagataaagactacagaaggaaagagatcttgccttttgaaaagatgaaggaacaaaggttgagagaacatttagttcgttttgaaaggctgcgacgagcaatggaacttcgaagacgaagagagattgcagagagagagcgtcgagagcgagaacgcattagaataattcgtgaacgggaagaacgggaacgcttacagagagagagagagcgcctagaaattgaaaggcaaaaactagagagagagagaatggaacgcgaacgcttggaaagggaacgcattcgtattgaacaggaacgtcgtaaggaagctgaacggattgctcgagaaagagaggaactcagaaggcaacaacagcagcttcgttatgaacaagaaaaaaggaattccttgaaacgcccacgtgatgtagatcataggcgagatgatccttactggagcgagaataaaaagttgtctctagatacagatgcacgatttggccatggatccgactactctcgccaacagaacagatttaatgactttgatcaccgagagaggggcaggtttcctgagagttcagcagtacagtcttcatcttttgaaaggcgggatcgctttgttggtcaaagtgaggggaaaaaagcacgacctactgcacgaagggaagatccaagcttcgaaagatatcccaaaaatttcagtgactccagaagaaatgagcctccaccaccaagaaatgaacttagagaatcagacaggcgagaagtacgaggggagcgagacgaaaggagaacggtgattattcatgacaggcctgatatcactcatcctagacatcctcgagaggcagggcccaatccttccagacccaccagctggaaaagtgaaggaagcatgtccactgacaaacgggaaacaagagttgaaaggccagaacgatctgggagagaagtatcagggcacagtgtgagaggcgctccccctgggaatcgtagcagcgcttcggggtacgggagcagagagggagacagaggagtcatcacagaccgaggaggtggatcacagcactatcctgaggagcgacatgtggttgaacgccatggacgggacacaagcggaccaaggaaagagtggcatggtccaccctctcaagggcctagctatcatgatacgaggcgaatgggtgacggccgggcaggagcaggcatgataacccaacattcaagtaacgcatccccaattaatagaattgtacaaatcagtggcaattccatgccaagaggaagtggctccggatttaagccatttaagggtggacctccgcgacgattctgaaaatgagctctctgccaaggttttaagataatttattgaaatctcctgtaaactttacttgactacttatgaagaggacctctgacttgcttgagagttctgtcagacttttctttttaaaaatttaacatgattgcttttctcaattttggagaagatgtttaaatagttctgttgtaacttttaatagttttgtgtatcattcaactttttttcttgcagcaccgaggcacatttgaaaagatggaattgaagtcgttttgtttaacgctgtgtgaatataaagagtagtttgcagctgtgtggtagtggtttaatttgcagccttagctctgtggtgtctggctctagagttacttctttttaccaagcattttcagcctccattttgaaggctgtctacacttaagaagtcttagctgtctaatttttagagaataagattgttcattgcatttctgagtattatgtaacctatttttgcagaaggtactgttacattaagtgcatctgtgtatcctggtttaaaaaaatgtaatcttttttgaaataaaccttcatattctgtatagttgctaaagtgttgagaacctttttaattgtaaaatgagaaccgattttcagtttagtgtagcagcacacttgttcaggtttgcatggtatgaaaccaaatagattcatgaaaccttggccatgaggtttgtttcacaaggttcttagaccgagttgtgcaggtaagtgcacttttaggtaatctgcactgtttgtttgatggataaattccatctctgggaattgtgtgggtattaatgtttccatgttcccaactatgttgagaagtggaaaaaaacccaggttctagatgggtgaatcagttgggttttgtaaatacttgtatgtggggaagacattgttgtctttttgtgaaaataaaaatccacacctgga

SEQ ID NO: 434776 - DNA, 4557 bp, Homo sapiens
attctttggactaacagccctagaactgctttgaggtcttttgaatggaactcggggaacctagttcgttggtgcacaccggcgacaatttttcgattattcagcagaactgataaagtatttccttgagaggttcagcgcgcgcacgcgccccctcggtttgtgttgagtaacgcgcgcactatgtcattcagtgcccgcacatcgttgttgctcaagactcaagacgttgcaagaaaatggctaacgaagcgacgagagaacggcggcgcggcggacgttgctgcggtaggacgtgcccgacctcccagtccacacaagggagcgcaccgcccaagtggccgcggcccgctcgaccgagcgcgccgctgccggtccctgcgccaacgcgcacgcgcggccgtcatccgggtgctggcggctgctgcaggttgcgctagggtggcggaccgggggaggggccagcggctcattgtgcgcagcgctgcgcggcgccggcggccgccgaggcctgggtggaagttggcgctgctgccgccgccctgcagcccactcgctgcctcggcagcgcgctgctcttctaagatggctgccgctaccggtgcggtggcagcctcggccgcctcgggtcaggcggaaggtaaaaagatcaccgatctgcgggtcatcgatctgaagtccgagctgaagcggcggaacttagacatcaccggagtcaagaccgtgctcatctcccgactcaagcaggctattgaagaggaaggaggcgatccagataatattgaattaactgtttcaactgatactccaaacaagaaaccaactaaaggcaaaggtaaaaaacatgaagcagatgagttgagtggagatgcttctgtggaagatgatgcttttatcaaggactgtgaattggagaatcaagaggcacatgagcaagatggaaatgatgaactaaaggactctgaagaatttggtgaaaatgaagaagaaaatgtgcattccaaggagttactctctgcagaagaaaacaagagagctcatgaattaatagaggcagaaggaatagaagatatagaaaaagaggacatcgaaagtcaggaaattgaagctcaagaaggtgaagatgatacctttctaacagcccaagatggtgaggaagaagaaaatgagaaagatatagcaggttctggtgatggtacacaagaagtatctaaacctcttccttcagaagggagcctagctgaggctgatcacacagctcatgaagagatggaagctcatacgactgtgaaagaagctgaggatgacaacatctcggtcacaatccaggctgaagatgccatcactctggattttgatggtgatgacctcctagaaacaggtaaaaatgtgaaaattacagattctgaagcaagtaagccaaaagatgggcaggacgccattgcacagagcccggagaaggaaagcaaggattatgagatgaatgcgaaccataaagatggtaagaaggaagactgcgtgaagggtgaccctgtcgagaaggaagccagagaaagttctaagaaagcagaatctggagacaaagaaaaggatactttgaagaaagggccctcgtctactggggcctctggtcaagcaaagagctcttcaaaggaatctaaagacagcaagacatcatctaaagatgacaaaggaagtacaagtagtactagtggtagcagtggaagctcaactaaaaatatctgggttagtggactttcatctaataccaaagctgctgatttgaagaacctctttggcaaatatggaaaggttctgagtgcaaaagtagttacaaatgctcgaagtcctggggcaaaatgctatggcattgtaactatgtcttcaagcacagaggtgtccaggtgtattgcacatcttcatcgcactgagctgcatggacagctgatttctgttgaaaaagtaaaaggtgatccctctaagaaagaaatgaagaaagaaaatgatgaaaagagtagttcaagaagttctggagataaaaaaaatacgagtgatagaagtagcaagacacaagcctctgtcaaaaaagaagagaaaagatcgtctgagaaatctgaaaaaaaagaaagcaaggatactaagaaaatagaaggttccaagagtccaggacatatggtaatactagaccaaactaaaggagatcattgtagaccatcaagaagaggaagatatgagaaaattcatggaagaagtaaggaaaaggagagagctagtctagataaaaaaagagataaagactacagaaggaaagagatcttgccttttgaaaagatgaaggaacaaaggttgagagaacatttagttcgttttgaaaggctgcgacgagcaatggaacttcgaagacgaagagagattgcagagagagagcgtcgagagcgagaacgcattagaataattcgtgaacgggaagaacgggaacgcttacagagagagagagagcgcctagaaattgaaaggcaaaaactagagagagagagaatggaacgcgaacgcttggaaagggaacgcattcgtattgaacaggaacgtcgtaaggaagctgaacggattgctcgagaaagagaggaactcagaaggcaacaacagcagcttcgttatgaacaagaaaaaaggaattccttgaaacgcccacgtgatgtagatcataggcgagatgatccttactggagcgagaataaaaagttgtctctagatacagatgcacgatttggccatggatccgactactctcgccaacagaacagatttaatgactttgatcaccgagagaggggcaggtttcctgagagttcagcagtacagtcttcatcttttgaaaggcgggatcgctttgttggtcaaagtgaggggaaaaaagcacgacctactgcacgaagggaagatccaagcttcgaaagatatcccaaaaatttcagtgactccagaagaaatgagcctccaccaccaagaaatgaacttagagaatcagacaggcgagaagtacgaggggagcgagacgaaaggagaacggtgattattcatgacaggcctgatatcactcatcctagacatcctcgagaggcagggcccaatccttccagacccaccagctggaaaagtgaaggaagcatgtccactgacaaacgggaaacaagagttgaaaggccagaacgatctgggagagaagtatcagggcacagtgtgagaggcgctccccctgggaatcgtagcagcgcttcggggtacgggagcagagagggagacagaggagtcatcacagaccgaggaggtggatcacagcactatcctgaggagcgacatgtggttgaacgccatggacgggacacaagcggaccaaggaaagagtggcatggtccaccctctcaagggcctagctatcatgatacgaggcgaatgggtgacggccgggcaggagcaggcatgataacccaacattcaagtaacgcatccccaattaatagaattgtacaaatcagtggcaattccatgccaagaggaagtggctccggatttaagccatttaagggtggacctccgcgacgattctgaaaatgagctctctgccaaggttttaagataatttattgaaatctcctgtaaactttacttgactacttatgaagaggacctctgacttgcttgagagttctgtcagacttttctttttaaaaatttaacatgattgcttttctcaattttggagaagatgtttaaatagttctgttgtaacttttaatagttttgtgtatcattcaactttttttcttgcagcaccgaggcacatttgaaaagatggaattgaagtcgttttgtttaacgctgtgtgaatataaagagtagtttgcagctgtgtggtagtggtttaatttgcagccttagctctgtggtgtctggctctagagttacttctttttaccaagcattttcagcctccattttgaaggctgtctacacttaagaagtcttagctgtctaatttttagagaataagattgttcattgcatttctgagtattatgtaacctatttttgcagaaggtactgttacattaagtgcatctgtgtatcctggtttaaaaaaatgtaatcttttttgaaataaaccttcatattctgtatagttgctaaagtgttgagaacctttttaattgtaaaatgagaaccgattttcagtttagtgtagcagcacacttgttcaggtttgcatggtatgaaaccaaatagattcatgaaaccttggccatgaggtttgtttcacaaggttcttagaccgagttgtgcaggtaagtgcacttttaggtaatctgcactgtttgtttgatggataaattccatctctgggaattgtgtgggtattaatgtttccatgttcccaactatgttgagaagtggaaaaaaacccaggttctagatgggtgaatcagttgggttttgtaaatacttgtatgtggggaagacattgttgtctttttgtgaaaataaaaatccacacctgga

SEQ ID NO: 434777 - DNA, 4980 bp, Homo sapiens
attctttggactaacagccctagaactgctttgaggtcttttgaatggaactcggggaacctagttcgttggtgcacaccggcgacaatttttcgattattcagcagaactgataaagtatttccttgagaggttcagcgcgcgcacgcgccccctcggtttgtgttgagtaacgcgcgcactatgtcattcagtgcccgcacatcgttgttgctcaagactcaagacgttgcaagaaaatggctaacgaagcgacgagagaacggcggcgcggcggacgttgctgcggtaggacgtgcccgacctcccagtccacacaagggagcgcaccgcccaagtggccgcggcccgctcgaccgagcgcgccgctgccggtccctgcgccaacgcgcacgcgcggccgtcatccgggtgctggcggctgctgcaggttgcgctagggtggcggaccgggggaggggccagcggctcattgtgcgcagcgctgcgcggcgccggcggccgccgaggcctgggtggaagttggcgctgctgccgccgccctgcagcccactcgctgcctcggcagcgcgctgctcttctaagatggctgccgctaccggtgcggtggcagcctcggccgcctcgggtcaggcggaaggtaaaaagatcaccgatctgcgggtcatcgatctgaagtccgagctgaagcggcggaacttagacatcaccggagtcaagaccgtgctcatctcccgactcaagcaggctattgaagaggaaggaggcgatccagataatattgaattaactgtttcaactgatactccaaacaagaaaccaactaaaggcaaaggtaaaaaacatgaagcagatgagttgagtggagatgcttctgtggaagatgatgcttttatcaaggactgtgaattggagaatcaagaggcacatgagcaagatggaaatgatgaactaaaggactctgaagaatttggtgaaaatgaagaagaaaatgtgcattccaaggagttactctctgcagaagaaaacaagagagctcatgaattaatagaggcagaaggaatagaagatatagaaaaagaggacatcgaaagtcaggaaattgaagctcaagaaggtgaagatgatacctttctaacagcccaagatggtgaggaagaagaaaatgagaaagatatagcaggttctggtgatggtacacaagaagtatctaaacctcttccttcagaagggagcctagctgaggctgatcacacagctcatgaagagatggaagctcatacgactgtgaaagaagctgaggatgacaacatctcggtcacaatccaggctgaagatgccatcactctggattttgatggtgatgacctcctagaaacaggtaaaaatgtgaaaattacagattctgaagcaagtaagccaaaagatgggcaggacgccattgcacagagcccggagaaggaaagcaaggattatgagatgaatgcgaaccataaagatggtaagaaggaagactgcgtgaagggtgaccctgtcgagaaggaagccagagaaagttctaagaaagcagaatctggagacaaagaaaaggatactttgaagaaagggccctcgtctactggggcctctggtcaagcaaagagctcttcaaaggaatctaaagacagcaagacatcatctaaagatgacaaaggaagtacaagtagtactagtggtagcagtggaagctcaactaaaaatatctgggttagtggactttcatctaataccaaagctgctgatttgaagaacctctttggcaaatatggaaaggttctgagtgcaaaagtagttacaaatgctcgaagtcctggggcaaaatgctatggcattgtaactatgtcttcaagcacagaggtgtccaggtgtattgcacatcttcatcgcactgagctgcatggacagctgatttctgttgaaaaagtaagcttccctaactgtttatcaaagcaagtctaatttgatggctagttctcaactcatagctgttaacagtagcagggagtagaatttgcagtgatttttaatttttatgtatttgtagtttttactctccttatatttttcctatcgtttccaaattttctgccattagcacacttcttataatcacaaaaatgtaaccatatgtacaaattgtttttctggttcgaacctttcaggtaaaaggtgatccctctaagaaagaaatgaagaaagaaaatgatgaaaagagtagttcaagaagttctggagataaaaaaaatacgagtgatagaagtagcaagtaaggatttatttttatttatttattttgataagcagatagacttttttggtacattatgaagtactcattctgtttttttgtctggggcggtatggtcagggacacaagcctctgtcaaaaaagaagagaaaagatcgtctgagaaatctgaaaaaaaagaaagcaaggatactaagaaaatagaaggtaaagatgagaagaatgataatggagcaagtggccaaacatcagaatcgattaaaaaaagtgaagaaaagaagcgaataagttccaagagtccaggacatatggtaatactagaccaaactaaaggagatcattgtagaccatcaagaagaggaagatatgagaaaattcatggaagaagtaaggaaaaggagagagctagtctagataaaaaaagagataaagactacagaaggaaagagatcttgccttttgaaaagatgaaggaacaaaggttgagagaacatttagttcgttttgaaaggctgcgacgagcaatggaacttcgaagacgaagagagattgcagagagagagcgtcgagagcgagaacgcattagaataattcgtgaacgggaagaacgggaacgcttacagagagagagagagcgcctagaaattgaaaggcaaaaactagagagagagagaatggaacgcgaacgcttggaaagggaacgcattcgtattgaacaggaacgtcgtaaggaagctgaacggattgctcgagaaagagaggaactcagaaggcaacaacagcagcttcgttatgaacaagaaaaaaggaattccttgaaacgcccacgtgatgtagatcataggcgagatgatccttactggagcgagaataaaaagttgtctctagatacagatgcacgatttggccatggatccgactactctcgccaacagaacagatttaatgactttgatcaccgagagaggggcaggtttcctgagagttcagcagtacagtcttcatcttttgaaaggcgggatcgctttgttggtcaaagtgaggggaaaaaagcacgacctactgcacgaagggaagatccaagcttcgaaagatatcccaaaaatttcagtgactccagaagaaatgagcctccaccaccaagaaatgaacttagagaatcagacaggcgagaagtacgaggggagcgagacgaaaggagaacggtgattattcatgacaggcctgatatcactcatcctagacatcctcgagaggcagggcccaatccttccagacccaccagctggaaaagtgaaggaagcatgtccactgacaaacgggaaacaagagttgaaaggccagaacgatctgggagagaagtatcagggcacagtgtgagaggcgctccccctgggaatcgtagcagcgcttcggggtacgggagcagagagggagacagaggagtcatcacagaccgaggaggtggatcacagcactatcctgaggagcgacatgtggttgaacgccatggacgggacacaagcggaccaaggaaagagtggcatggtccaccctctcaagggcctagctatcatgatacgaggcgaatgggtgacggccgggcaggagcaggcatgataacccaacattcaagtaacgcatccccaattaatagaattgtacaaatcagtggcaattccatgccaagaggaagtggctccggatttaagccatttaagggtggacctccgcgacgattctgaaaatgagctctctgccaaggttttaagataatttattgaaatctcctgtaaactttacttgactacttatgaagaggacctctgacttgcttgagagttctgtcagacttttctttttaaaaatttaacatgattgcttttctcaattttggagaagatgtttaaatagttctgttgtaacttttaatagttttgtgtatcattcaactttttttcttgcagcaccgaggcacatttgaaaagatggaattgaagtcgttttgtttaacgctgtgtgaatataaagagtagtttgcagctgtgtggtagtggtttaatttgcagccttagctctgtggtgtctggctctagagttacttctttttaccaagcattttcagcctccattttgaaggctgtctacacttaagaagtcttagctgtctaatttttagagaataagattgttcattgcatttctgagtattatgtaacctatttttgcagaaggtactgttacattaagtgcatctgtgtatcctggtttaaaaaaatgtaatcttttttgaaataaaccttcatattctgtatagttgctaaagtgttgagaacctttttaattgtaaaatgagaaccgattttcagtttagtgtagcagcacacttgttcaggtttgcatggtatgaaaccaaatagattcatgaaaccttggccatgaggtttgtttcacaaggttcttagaccgagttgtgcaggtaagtgcacttttaggtaatctgcactgtttgtttgatggataaattccatctctgggaattgtgtgggtattaatgtttccatgttcccaactatgttgagaagtggaaaaaaacccaggttctagatgggtgaatcagttgggttttgtaaatacttgtatgtggggaagacattgttgtctttttgtgaaaataaaaatccacacctgga

SEQ ID NO: 434778 - DNA, 2461 bp, Homo sapiens
gggacttagctggtatcacaggccctcggctgacatgtaagaaaagaagcgaataagttccaagagtccaggacatatggtaatactagaccaaactaaaggagatcattgtagaccatcaagaagaggaagatatgagaaaattcatggaagaagtaaggaaaaggagagagctagtctagataaaaaaagagataaagactacagaaggaaagagatcttgccttttgaaaagatgaaggaacaaaggttgagagaacatttagttcgttttgaaaggctgcgacgagcaatggaacttcgaagacgaagagagattgcagagagagagcgtcgagagcgagaacgcattagaataattcgtgaacgggaagaacgggaacgcttacagagagagagagagcgcctagaaattgaaaggcaaaaactagagagagagagaatggaacgcgaacgcttggaaagggaacgcattcgtattgaacaggaacgtcgtaaggaagctgaacggattgctcgagaaagagaggaactcagaaggcaacaacagcagcttcgttatgaacaagaaaaaaggaattccttgaaacgcccacgtgatgtagatcataggcgagatgatccttactggagcgagaataaaaagttgtctctagatacagatgcacgatttggccatggatccgactactctcgccaacagaacagatttaatgactttgatcaccgagagaggggcaggtttcctgagagttcagcagtacagtcttcatcttttgaaaggcgggatcgctttgttggtcaaagtgaggggaaaaaagcacgacctactgcacgaagggaagatccaagcttcgaaagatatcccaaaaatttcagtgactccagaagaaatgagcctccaccaccaagaaatgaacttagagaatcagacaggcgagaagtacgaggggagcgagacgaaaggagaacggtgattattcatgacaggcctgatatcactcatcctagacatcctcgagaggcagggcccaatccttccagacccaccagctggaaaagtgaaggaagcatgtccactgacaaacgggaaacaagagttgaaaggccagaacgatctgggagagaagtatcagggcacagtgtgagaggcgctccccctgggaatcgtagcagcgcttcggggtacgggagcagagagggagacagaggagtcatcacagaccgaggaggtggatcacagcactatcctgaggagcgacatgtggttgaacgccatggacgggacacaagcggaccaaggaaagagtggcatggtccaccctctcaagggcctagctatcatgatacgaggcgaatgggtgacggccgggcaggagcaggcatgataacccaacattcaagtaacgcatccccaattaatagaattgtacaaatcagtggcaattccatgccaagaggaagtggctccggatttaagccatttaagggtggacctccgcgacgattctgaaaatgagctctctgccaaggttttaagataatttattgaaatctcctgtaaactttacttgactacttatgaagaggacctctgacttgcttgagagttctgtcagacttttctttttaaaaatttaacatgattgcttttctcaattttggagaagatgtttaaatagttctgttgtaacttttaatagttttgtgtatcattcaactttttttcttgcagcaccgaggcacatttgaaaagatggaattgaagtcgttttgtttaacgctgtgtgaatataaagagtagtttgcagctgtgtggtagtggtttaatttgcagccttagctctgtggtgtctggctctagagttacttctttttaccaagcattttcagcctccattttgaaggctgtctacacttaagaagtcttagctgtctaatttttagagaataagattgttcattgcatttctgagtattatgtaacctatttttgcagaaggtactgttacattaagtgcatctgtgtatcctggtttaaaaaaatgtaatcttttttgaaataaaccttcatattctgtatagttgctaaagtgttgagaacctttttaattgtaaaatgagaaccgattttcagtttagtgtagcagcacacttgttcaggtttgcatggtatgaaaccaaatagattcatgaaaccttggccatgaggtttgtttcacaaggttcttagaccgagttgtgcaggtaagtgcacttttaggtaatctgcactgtttgtttgatggataaattccatctctgggaattgtgtgggtattaatgtttccatgttcccaactatgttgagaagtggaaaaaaacccaggttctagatgggtgaatcagttgggttttgtaaatacttgtatgtggggaagacattgttgtctttttgtgaaaataaaaatccacacctgga

SEQ ID NO: 434779 - DNA, 2219 bp, Homo sapiens
tacttggcagtacctcagggtaaaggtagcgaggcctgggtgttggagcaatggaacttcgaagacgaagagagattgcagagagagagcgtcgagagcgagaacgcattagaataattcgtgaacgggaagaacgggaacgcttacagagagagagagagcgcctagaaattgaaaggcaaaaactagagagagagagaatggaacgcgaacgcttggaaagggaacgcattcgtattgaacaggaacgtcgtaaggaagctgaacggattgctcgagaaagagaggaactcagaaggcaacaacagcagcttcgttatgaacaagaaaaaaggaattccttgaaacgcccacgtgatgtagatcataggcgagatgatccttactggagcgagaataaaaagttgtctctagatacagatgcacgatttggccatggatccgactactctcgccaacagaacagatttaatgactttgatcaccgagagaggggcaggtttcctgagagttcagcagtacagtcttcatcttttgaaaggcgggatcgctttgttggtcaaagtgaggggaaaaaagcacgacctactgcacgaagggaagatccaagcttcgaaagatatcccaaaaatttcagtgactccagaagaaatgagcctccaccaccaagaaatgaacttagagaatcagacaggcgagaagtacgaggggagcgagacgaaaggagaacggtgattattcatgacaggcctgatatcactcatcctagacatcctcgagaggcagggcccaatccttccagacccaccagctggaaaagtgaaggaagcatgtccactgacaaacgggaaacaagagttgaaaggccagaacgatctgggagagaagtatcagggcacagtgtgagaggcgctccccctgggaatcgtagcagcgcttcggggtacgggagcagagagggagacagaggagtcatcacagaccgaggaggtggatcacagcactatcctgaggagcgacatgtggttgaacgccatggacgggacacaagcggaccaaggaaagagtggcatggtccaccctctcaagggcctagctatcatgatacgaggcgaatgggtgacggccgggcaggagcaggcatgataacccaacattcaagtaacgcatccccaattaatagaattgtacaaatcagtggcaattccatgccaagaggaagtggctccggatttaagccatttaagggtggacctccgcgacgattctgaaaatgagctctctgccaaggttttaagataatttattgaaatctcctgtaaactttacttgactacttatgaagaggacctctgacttgcttgagagttctgtcagacttttctttttaaaaatttaacatgattgcttttctcaattttggagaagatgtttaaatagttctgttgtaacttttaatagttttgtgtatcattcaactttttttcttgcagcaccgaggcacatttgaaaagatggaattgaagtcgttttgtttaacgctgtgtgaatataaagagtagtttgcagctgtgtggtagtggtttaatttgcagccttagctctgtggtgtctggctctagagttacttctttttaccaagcattttcagcctccattttgaaggctgtctacacttaagaagtcttagctgtctaatttttagagaataagattgttcattgcatttctgagtattatgtaacctatttttgcagaaggtactgttacattaagtgcatctgtgtatcctggtttaaaaaaatgtaatcttttttgaaataaaccttcatattctgtatagttgctaaagtgttgagaacctttttaattgtaaaatgagaaccgattttcagtttagtgtagcagcacacttgttcaggtttgcatggtatgaaaccaaatagattcatgaaaccttggccatgaggtttgtttcacaaggttcttagaccgagttgtgcaggtaagtgcacttttaggtaatctgcactgtttgtttgatggataaattccatctctgggaattgtgtgggtattaatgtttccatgttcccaactatgttgagaagtggaaaaaaacccaggttctagatgggtgaatcagttgggttttgtaaatacttgtatgtggggaagacattgttgtctttttgtgaaaataaaaatccacacctgga

SEQ ID NO: 434780 - DNA, 2460 bp, Homo sapiens
gctgttctagatgaccccttcgacggtgctctggcgcatcgcaacatacgagatgatagaagtagtcaagacacaagcctctgtcaaaaaagaagagaaaagatcgtctgagaaatctgaaaaaaaagaaagcaaggatactaagaaaatagaaggtaaagatgagaagaatgataatggagcaagtggccaaacatcagaatcgattaaaaaaagtgaagaaaagaagcgaataagttccaagagtccaggacatatggtaatactagaccaaactaaaggagatcattgtagaccatcaagaagaggaagatatgagaaaattcatggaagaagtaaggaaaaggagagagctagtctagataaaaaaagagataaagactacagaaggaaagagatcttgccttttgaaaagatgaaggaacaaaggttgagagaacatttagttcgttttgaaaggctgcgacgagcaatggaacttcgaaggaacgtcgtaaggaagctgaacggattgctcgagaaagagaggaactcagaaggcaacaacagcagcttcgttatgaacaagaaaaaaggaattccttgaaacgcccacgtgatgtagatcataggcgagatgatccttactggagcgagaataaaaagttgtctctagatacagatgcacgatttggccatggatccgactactctcgccaacagaacagatttaatgactttgatcaccgagagaggggcaggtttcctgagagttcagcagtacagtcttcatcttttgaaaggcgggatcgctttgttggtcaaagtgaggggaaaaaagcacgacctactgcacgaagggaagatccaagcttcgaaagatatcccaaaaatttcagtgactccagaagaaatgagcctccaccaccaagaaatgaacttagagaatcagacaggcgagaagtacgaggggagcgagacgaaaggagaacggtgattattcatgacaggcctgatatcactcatcctagacatcctcgagaggcagggcccaatccttccagacccaccagctggaaaagtgaaggaagcatgtccactgacaaacgggaaacaagagttgaaaggccagaacgatctgggagagaagtatcagggcacagtgtgagaggcgctccccctgggaatcgtagcagcgcttcggggtacgggagcagagagggagacagaggagtcatcacagaccgaggaggtggatcacagcactatcctgaggagcgacatgtggttgaacgccatggacgggacacaagcggaccaaggaaagagtggcatggtccaccctctcaagggcctagctatcatgatacgaggcgaatgggtgacggccgggcaggagcaggcatgataacccaacattcaagtaacgcatccccaattaatagaattgtacaaatcagtggcaattccatgccaagaggaagtggctccggatttaagccatttaagggtggacctccgcgacgattctgaaaatgagctctctgccaaggttttaagataatttattgaaatctcctgtaaactttacttgactacttatgaagaggacctctgacttgcttgagagttctgtcagacttttctttttaaaaatttaacatgattgcttttctcaattttggagaagatgtttaaatagttctgttgtaacttttaatagttttgtgtatcattcaactttttttcttgcagcaccgaggcacatttgaaaagatggaattgaagtcgttttgtttaacgctgtgtgaatataaagagtagtttgcagctgtgtggtagtggtttaatttgcagccttagctctgtggtgtctggctctagagttacttctttttaccaagcattttcagcctccattttgaaggctgtctacacttaagaagtcttagctgtctaatttttagagaataagattgttcattgcatttctgagtattatgtaacctatttttgcagaaggtactgttacattaagtgcatctgtgtatcctggtttaaaaaaatgtaatcttttttgaaataaaccttcatattctgtatagttgctaaagtgttgagaacctttttaattgtaaaatgagaaccgattttcagtttagtgtagcagcacacttgttcaggtttgcatggtatgaaaccaaatagattcatgaaaccttggccatgaggtttgtttcacaaggttcttagaccgagttgtgcaggtaagtgcacttttaggtaatctgcactgtttgtttgatggataaattccatctctgggaattgtgtgggtattaatgtttccatgttcccaactatgttgagaagtggaaaaaaacccaggttctagatgggtgaatcagttgggttttgtaaatacttgtatgtggggaagacattgttgtctttttgtgaaaataaaaatccacacctgga

SEQ ID NO: 434781 - DNA, 2446 bp, Homo sapiens
attctttggactaacagccctagaactgctttgaggtcttttgaatggaactcggggaacctagttcgttggtgcacaccggcgacaatttttcgattattcagcagaactgataaagtatttccttgagaggttcagcgcgcgcacgcgccccctcggtttgtgttgagtaacgcgcgcactatgtcattcagtgcccgcacatcgttgttgctcaagactcaagacgttgcaagaaaatggctaacgaagcgacgagagaacggcggcgcggcggacgttgctgcggtaggacgtgcccgacctcccagtccacacaagggagcgcaccgcccaagtggccgcggcccgctcgaccgagcgcgccgctgccggtccctgcgccaacgcgcacgcgcggccgtcatccgggtgctggcggctgctgcaggttgcgctagggtggcggaccgggggaggggccagcggctcattgtgcgcagcgctgcgcggcgccggcggccgccgaggcctgggtggaagttggcgctgctgccgccgccctgcagcccactcgctgcctcggcagcgcgctgctcttctaagatggctgccgctaccggtgcggtggcagcctcggccgcctcgggtcaggcggaaggtaaaaagatcaccgatctgcgggtcatcgatctgaagtccgagctgaagcggcggaacttagacatcaccggagtcaagaccgtgctcatctcccgactcaagcaggctattgaagaggaaggaggcgatccagataatattgaattaactgtttcaactgatactccaaacaagaaaccaactaaaggcaaaggtaaaaaacatgaagcagatgagttgagtggagatgcttctgtggaagatgatgcttttatcaaggactgtgaattggagaatcaagaggcacatgagcaagatggaaatgatgaactaaaggactctgaagaatttggtgaaaatgaagaagaaaatgtgcattccaaggagttactctctgcagaagaaaacaagagagctcatgaattaatagaggcagaaggaatagaagatatagaaaaagaggacatcgaaagtcaggaaattgaagctcaagaaggtgaagatgatacctttctaacagcccaagatggtgaggaagaagaaaatgagaaagatatagcaggttctggtgatggtacacaagaagtatctaaacctcttccttcagaagggagcctagctgaggctgatcacacagctcatgaagagatggaagctcatacgactgtgaaagaagctgaggatgacaacatctcggtcacaatccaggctgaagatgccatcactctggattttgatggtgatgacctcctagaaacaggtaaaaatgtgaaaattacagattctgaagcaagtaagccaaaagatgggcaggacgccattgcacagagcccggagaaggaaagcaaggattatgagatgaatgcgaaccataaagatggtaagaaggaagactgcgtgaagggtgaccctgtcgagaaggaagccagagaaagttctaagaaagcagaatctggagacaaagaaaaggatactttgaagaaagggccctcgtctactggggcctctggtcaagcaaagagctcttcaaaggaatctaaagacagcaagacatcatctaaagatgacaaaggaagtacaagtagtactagtggtagcagtggaagctcaactaaaaatatctgggttagtggactttcatctaataccaaagctgctgatttgaagaacctctttggcaaatatggaaaggttctgagtgcaaaagtagttacaaatgctcgaagtcctggggcaaaatgctatggcattgtaactatgtcttcaagcacagaggtgtccaggtgtattgcacatcttcatcgcactgagctgcatggacagctgatttctgttgaaaaagtaaaaggtgatccctctaagaaagaaatgaagaaagaaaatgatgaaaagagtagttcaagaagttctggagataaaaaaaatacgagtgatagaagtagcaagtaaggatttatttttatttatttattttgataagcagatagacttttttggtacattatgaagtactcattctgtttttttgtctggggcggtatggtcaggctttttcagactctgtgattttagccctaaaacttgctttacttgttgtaaagcgtctatagaatgagtttagctaaggagcttttaagtgtccctgaaagataacagtgaattaggtactagttaaaaatagaattagtagtgactttgttctagataactggtaataattctagctctgcaatatcatggcagcctaatagtctgagcataggactatgagtccagagtagttgtaatccaggctctgtcactatcccagtcttagaaaataata

SEQ ID NO: 434782 - DNA, 2237 bp, Homo sapiens
attctttggactaacagccctagaactgctttgaggtcttttgaatggaactcggggaacctagttcgttggtgcacaccggcgacaatttttcgattattcagcagaactgataaagtatttccttgagaggttcagcgcgcgcacgcgccccctcggtttgtgttgagtaacgcgcgcactatgtcattcagtgcccgcacatcgttgttgctcaagactcaagacgttgcaagaaaatggctaacgaagcgacgagagaacggcggcgcggcggacgttgctgcggtaggacgtgcccgacctcccagtccacacaagggagcgcaccgcccaagtggccgcggcccgctcgaccgagcgcgccgctgccggtccctgcgccaacgcgcacgcgcggccgtcatccgggtgctggcggctgctgcaggttgcgctagggtggcggaccgggggaggggccagcggctcattgtgcgcagcgctgcgcggcgccggcggccgccgaggcctgggtggaagttggcgctgctgccgccgccctgcagcccactcgctgcctcggcagcgcgctgctcttctaagatggctgccgctaccggtgcggtggcagcctcggccgcctcgggtcaggcggaaggtaaaaagatcaccgatctgcgggtcatcgatctgaagtccgagctgaagcggcggaacttagacatcaccggagtcaagaccgtgctcatctcccgactcaagcaggctattgaagaggaaggaggcgatccagataatattgaattaactgtttcaactgatactccaaacaagaaaccaactaaaggcaaaggtaaaaaacatgaagcagatgagttgagtggagatgcttctgtggaagatgatgcttttatcaaggactgtgaattggagaatcaagaggcacatgagcaagatggaaatgatgaactaaaggactctgaagaatttggtgaaaatgaagaagaaaatgtgcattccaaggagttactctctgcagaagaaaacaagagagctcatgaattaatagaggcagaaggaatagaagatatagaaaaagaggacatcgaaagtcaggaaattgaagctcaagaaggtgaagatgatacctttctaacagcccaagatggtgaggaagaagaaaatgagaaagatatagcaggttctggtgatggtacacaagaagtatctaaacctcttccttcagaagggagcctagctgaggctgatcacacagctcatgaagagatggaagctcatacgactgtgaaagaagctgaggatgacaacatctcggtcacaatccaggctgaagatgccatcactctggattttgatggtgatgacctcctagaaacaggtaaaaatgtgaaaattacagattctgaagcaagtaagccaaaagatgggcaggacgccattgcacagagcccggagaaggaaagcaaggattatgagatgaatgcgaaccataaagatggtaagaaggaagactgcgtgaagggtgaccctgtcgagaaggaagccagagaaagttctaagaaagcagaatctggagacaaagaaaaggatactttgaagaaagggccctcgtctactggggcctctggtcaagcaaagagctcttcaaaggaatctaaagacagcaagacatcatctaaagatgacaaaggaagtacaagtagtactagtggtagcagtggaagctcaactaaaaatatctgggttagtggactttcatctaataccaaagctgctgatttgaagaacctctttggcaaatatggaaaggttctgagtgcaaaagtagttacaaatgctcgaagtcctggggcaaaatgctatggcattgtaactatgtcttcaagcacagaggtgtccaggtgtattgcacatcttcatcgcactgagctgcatggacagctgatttctgttgaaaaaaaggtgatccctctaagaaagaaatgtcaacgcccttgaggaaataatttaacctgtgtcccaacccccctcacaggtcctcttgaccaaggaaggcttagtgtgtcaaggtgtttacggaaaccttctgaccaaacagtggctgggcactaagcaatgctgattcagagatggacccctaggaagccagtcttgaaaataaaagcaagaatcacaaaacaaaacagaggcttcctttagtggcttcaagttataaacaaccaaacagacaaagg

SEQ ID NO: 434783 - DNA, 727 bp, Homo sapiens
gcacacaagcccacacaagcccgggccccgctcctctgaactcccgcgtgtgttctgactatggcaaagaaggtctttgccgcgtgcacggcccgacttaaatctctgcaatggctaacgaagcttatccttgtccgtgtgacattggccacagacttgagtatggagggctaggccgtgaagttcaagtcgagcacatcaaggcttatgtcaccaaatcccccgttgatgcaggcaaagctgtgattgtcattcaagatatatttggctggcagttgcccaataccagatatatagctgacatgatctcaggaaatggatacacaaccattgttccagacttctttgtagggcaagagccttgggacccctctggcgactggtctatcttccctgagtggctgaaaacaagaaatgcccagaagatcgatagagagatcagtgctatcttgaagtatctgaaacaacagtgtcatgcccagaaaattggcatcgtgggattctgctggggtggaactgctgtccatcatttgatgatgaaatactcagaattcagggcaggggtgtccgtctatggtaaatctgccttgtgcatttttactccatgcagaagggaggggtggaagagtgacaacaatcacaagcctccccatccagtgtaacacaacccccaataatgtgaagactgcccatcttatggaaatgggttttaagaatctgaaaatag

SEQ ID NO: 434784 - DNA, 2327 bp, Homo sapiens
accccctctccctgcacctttctttatcttggagcctctcccatctctccctccctcttcctccctaccccaccctccgaccaccccacttcttcccctcccctcacacttccctccctcccttctctcgtctcctccccactgcgcctccctccctcctggccttccttcccttccccgactttgcagatttctcttcccccaggcctccctcctccacctctccgccccctccgggcttggctctcccaggaggctacgactggagccactggtcccgcaggatccccgcgtcctcggtcgccgcgtccacgtccctctcgcgtccccgcccggcgccacgccgcctcctctgggttcggcctccgcgcggtgcagcgcagtctcaggccgcgggacaagcccgacttaaatctctgcaatggctaacgaagcttatccttgtccgtgtgacattggccacagacttgagtatggagggctaggccgtgaagttcaagtcgagcacatcaaggcttatgtcaccaaatcccccgttgatgcaggcaaagctgtgattgtcattcaagatatatttggctggcagttgcccaataccagatatatagctgacatgatctcaggaaatggatacacaaccattgttccagacttctttgtagggcaagagccttgggacccctctggcgactggtctatcttccctgagtggctgaaaacaagaaatgcccagaagatcgatagagagatcagtgctatcttgaagtatctgaaacaacagtgtcatgcccagaaaattggcatcgtgggattctgctggggtggaactgctgtccatcatttgatgatgaaatactcagaattcagggcaggggtgtccgtctatggcatcgtcaaggattctgaagacatttacaatttaaagaaccccactttgttcatttttgctgaaaatgatgttgtgattccactcaaggacgtatctttgctgactcagaagttgaaagaacactgcaaagttgaatatcaaattaaaacattttctgggcagactcatgggttcgtgcatcggaagagagaagattgctcacctgcagacaagccctacattgacgaggccagaaggaatttaattgagtggctgaacaagtacatgtagcaagaatcaagggcaagccttcctagaatagctttcatcccaaaatttgcttggaaatagttagatcatttgatttaattttcacttttataaaataagtgtaggaatcctaaaattgattatttcatttgaaacacaaattcagtaggacgtaatgcatgaaataatttaatttttgacatgtacatcgaatcataatttaaaaacaaggtctgaccaggtgtagtgcctcatgcctgtaattccagcactttgggaggccaaagtgggtggatcacctgaggtcaggagtttgagaccagcctggccaacatggtgagaccccatctctacaaaaaatacaaaaattagcctggtgtggtggtgcacgcctgtagtcccagctacttgggaggctgaggcacaagaatcaatagaacccaggaggtggagactgcagtgagccaagattgtgccactactgtactctagcctgggcagcagagtgagaccctgtctcaaaaataaataagtaaataaataaataaataaaataaaaaccaggtcagtacctggagaatttgaatgatagagaatgatagagtaataccctaattattagttaaaacctacaggccgggtgcggtggctcacgcctgtaatcccagcactttgggaggccgaggtgggtggatcacttgaggtcaggagttcaagaccagcctggccaacatggtgaaaccccatctctactaaaaatataaaaatcagccgggcatggtggcatgtgcctgtaatcccagctactcaggagtctgaggaggagaatcacttgaacctggaggcagaggttgcagtgagtcgaggttgcgctactgcactccagcctggacaacagagggagactctgtctcaaaaaaaaaaaaacctacagctgttcaaggaccagctgacaggtcaagtgtggccttttctggtctttgaacacatcatagaaagtgacaaatgctgcaaagccatgaagaacatgaactataaacgggtagactaactgcccagcttagacacttatctatgccacaaaacagctgaatttgtcacatttatatattgcaatatgggaagtattgagatcaaaacaggattccattgacctaattatattaagctaataaactaattttttgaa

SEQ ID NO: 434785 - DNA, 2722 bp, Homo sapiens
accccctctccctgcacctttctttatcttggagcctctcccatctctccctccctcttcctccctaccccaccctccgaccaccccacttcttcccctcccctcacacttccctccctcccttctctcgtctcctccccactgcgcctccctccctcctggccttccttcccttccccgactttgcagatttctcttcccccaggcctccctcctccacctctccgccccctccgggcttggctctcccaggaggctacgactggagccactggtcccgcaggatccccgcgtcctcggtcgccgcgtccacgtccctctcgcgtccccgcccggcgccacgccgcctcctctgggttcggcctccgcgcggtgcagcgcagtctcaggccgcgggacaagcccgacttaaatctctgcaatggctaacgaagcttatccttgtccgtgtgacattggccacagacttgagtatggagggctaggccgtgaagttcaagtcgagcacatcaaggcttatgtcaccaaatcccccgttgatgcaggcaaagctgtgattgtcattcaagatatatttggctggcagttgcccaataccagatatatagctgacatgatctcaggaaatggatacacaaccattgttccagacttctttgtagggcaagagccttgggacccctctggcgactggtctatcttccctgagtggctgaaaacaagaaatgcccagaagatcgatagagagatcagtgctatcttgaagtatctgaaacaacagtgtcatgcccagaaaattggcatcgtgggattctgctggggtggaactgctgtccatcatttgatgatgaaatactcagaattcagggcaggggtgtccgtctatggcatcgtcaaggattctgaagacatttacaatttaaagaaccccactttgttcatttttgctgaaaatgatgttgtgattccactcaaggacgtatctttgctgactcagaagttgaaagaacactgcaaagttgaatatcaaattaaaacattttctgggcagactcatgggttcgtgcatcggaagagagaagattgctcacctgcagacaagccctacattgacgaggccagaaggaatttaattgagtggctgaacaagtacatgtagcaagaatcaagggcaagccttcctagaatagctttcatcccaaaatttgcttggaaatagttagatcatttgatttaattttcacttttataaaataagtgtaggaatcctaaaattgattatttcatttgaaacacaaattcagtaggacgtaatgcatgaaataatttaatttttgacatgtacatcgaatcataatttaaaaacaaggtctgaccaggtgtagtgcctcatgcctgtaattccagcactttgggaggccaaagtgggtggatcacctgaggtcaggagtttgagaccagcctggccaacatggtgagaccccatctctacaaaaaatacaaaaattagcctggtgtggtggtgcacgcctgtagtcccagctacttgggaggctgaggcacaagaatcaatagaacccaggaggtggagactgcagtgagccaagattgtgccactactgtactctagcctgggcagcagagtgagaccctgtctcaaaaataaataagtaaataaataaataaataaaataaaaaccaggtcagtacctggagaatttgaatgatagagaatgatagagtaataccctaattattagttaaaacctacaggccgggtgcggtggctcacgcctgtaatcccagcactttgggaggccgaggtgggtggatcacttgaggtcaggagttcaagaccagcctggccaacatggtgaaaccccatctctactaaaaatataaaaatcagccgggcatggtggcatgtgcctgtaatcccagctactcaggagtctgaggaggagaatcacttgaacctggaggcagaggttgcagtgagtcgaggttgcgctactgcactccagcctggacaacagagggagactctgtctcaaaaaaaaaaaaacctacagctgttcaaggaccagctgacaggtcaagtgtggccttttctggtctttgaacacatcatagaaagtgacaaatgctgcaaagccatgaagaacatgaactataaacgggtagactaactgcccagcttagacacttatctatgccacaaaacagctgaatttgtcacatttatatattgcaatatgggaagtattgagatcaaaacaggattccattgacctaattatattaagctaataaactaattttttgaaaaaaaaaaaaaaaaaaaaaaaaaaaacaaaaaaaaaaaaaaaaacaaaaaaaaaaaaaaaaaaaaaaaaaagaaggggggggggccgcccccaaaaaatgtactccccgaggcggaggccacataagcagcgacgccccacacatttttttgtgctgacaagaggagggcgcccacatctatgggggcgtaattataacaaaccgaccgagcgcggcgccgacctcttcatcaaaaaacatcctcatactaacagtggggaaacaacaactactacggtcggggcaaccatttattgtaggaaaagcccactaatactcggaacgagggagcaaacaaactctgaggacacaaccccccccaagagaattaaaagaacccccaccagagaggaaa

SEQ ID NO: 434786 - DNA, 2273 bp, Homo sapiens
accccctctccctgcacctttctttatcttggagcctctcccatctctccctccctcttcctccctaccccaccctccgaccaccccacttcttcccctcccctcacacttccctccctcccttctctcgtctcctccccactgcgcctccctccctcctggccttccttcccttccccgactttgcagatttctcttcccccaggcctccctcctccacctctccgccccctccgggcttggctctcccaggaggctacgactggagccactggtcccgcaggatccccgcgtcctcggtcgccgcgtccacgtccctctcgcgtccccgcccggcgccacgccgcctcctctgggttcggcctccgcgcggtgcagcgcagtctcaggccgcgggacaagcccgacttaaatctctgcaatggctaacgaagcttatccttgtccgtgtgacattggccacagacttgagtatggagggctaggccgtgaagttcaagtcgagcacatcaaggcttatgtcaccaaatcccccgttgatgcaggcaaagctgtgattgtcattcaagatatatttggctggcagttgcccaataccagatatatagctgacatgatctcaggaaatggatacacaaccattgttccagacttctttgtagggcaagagccttgggacccctctggcgactggtctatcttccctgagtggctgaaaacaagaaatgcccagaagatcgatagagagatcagtgctatcttgaagtatctgaaacaacagtgtcatgcccagatgaaatactcagaattcagggcaggggtgtccgtctatggcatcgtcaaggattctgaagacatttacaatttaaagaaccccactttgttcatttttgctgaaaatgatgttgtgattccactcaaggacgtatctttgctgactcagaagttgaaagaacactgcaaagttgaatatcaaattaaaacattttctgggcagactcatgggttcgtgcatcggaagagagaagattgctcacctgcagacaagccctacattgacgaggccagaaggaatttaattgagtggctgaacaagtacatgtagcaagaatcaagggcaagccttcctagaatagctttcatcccaaaatttgcttggaaatagttagatcatttgatttaattttcacttttataaaataagtgtaggaatcctaaaattgattatttcatttgaaacacaaattcagtaggacgtaatgcatgaaataatttaatttttgacatgtacatcgaatcataatttaaaaacaaggtctgaccaggtgtagtgcctcatgcctgtaattccagcactttgggaggccaaagtgggtggatcacctgaggtcaggagtttgagaccagcctggccaacatggtgagaccccatctctacaaaaaatacaaaaattagcctggtgtggtggtgcacgcctgtagtcccagctacttgggaggctgaggcacaagaatcaatagaacccaggaggtggagactgcagtgagccaagattgtgccactactgtactctagcctgggcagcagagtgagaccctgtctcaaaaataaataagtaaataaataaataaataaaataaaaaccaggtcagtacctggagaatttgaatgatagagaatgatagagtaataccctaattattagttaaaacctacaggccgggtgcggtggctcacgcctgtaatcccagcactttgggaggccgaggtgggtggatcacttgaggtcaggagttcaagaccagcctggccaacatggtgaaaccccatctctactaaaaatataaaaatcagccgggcatggtggcatgtgcctgtaatcccagctactcaggagtctgaggaggagaatcacttgaacctggaggcagaggttgcagtgagtcgaggttgcgctactgcactccagcctggacaacagagggagactctgtctcaaaaaaaaaaaaacctacagctgttcaaggaccagctgacaggtcaagtgtggccttttctggtctttgaacacatcatagaaagtgacaaatgctgcaaagccatgaagaacatgaactataaacgggtagactaactgcccagcttagacacttatctatgccacaaaacagctgaatttgtcacatttatatattgcaatatgggaagtattgagatcaaaacaggattccattgacctaattatattaagctaataaactaattttttgaa

SEQ ID NO: 434787 - DNA, 2270 bp, Homo sapiens
accccctctccctgcacctttctttatcttggagcctctcccatctctccctccctcttcctccctaccccaccctccgaccaccccacttcttcccctcccctcacacttccctccctcccttctctcgtctcctccccactgcgcctccctccctcctggccttccttcccttccccgactttgcagatttctcttcccccaggcctccctcctccacctctccgccccctccgggcttggctctcccaggaggctacgactggagccactggtcccgcaggatccccgcgtcctcggtcgccgcgtccacgtccctctcgcgtccccgcccggcgccacgccgcctcctctgggttcggcctccgcgcggtgcagcgcagtctcaggccgcgggacaagcccgacttaaatctctgcaatggctaacgaagcttatccttgtccgtgtgacattggccacagacttgagtatggagggctaggccgtgaagttcaagtcgagcacatcaaggcttatgtcaccaaatcccccgttgatgcaggcaaagctgtgattgtcattcaagatatatttggctggcagttgcccaataccagatatatagctgacatgatctcaggaaatggatacacaaccattgttccagacttctttgtagggcaagagccttgggacccctctggcgactggtctatcttccctgagtggctgaaaacaagaaatgcccagaagatcgatagagagatcagtgctatcttgaagtatctgaaacaacagtgtcatgcccagaaaattggcatcgtgggattctgctggggtggaactgctgtccatcatttgatgatgaaatactcagaattcagggcaggggtgtccgtctatggcatcgtcaaggattctgaagacatttacaatttaaagaaccccactttgttcatttttgctgaaaatgatgttgtgattccactcaaggacgtatctttgctgactcagaagttgaaagaacactgcaaagttgaatatcaaattaaaacattttctgggcagactcatgggttcgtgcatcggaagagagaagattgctcacctgcagacaagccctacattgacgaggccagaaggaatttaattgagtggctgaacaagtacatgtagcaagaatcaagggcaagccttcctagaatagctttcatcccaaaatttgcttggaaatagttagatcatttgatttaattttcacttttataaaataagtgtaggaatcctaaaattgattatttcatttgaaacacaaattcagtaggacgtaatgcatgaaataatttaatttttgacatgtacatcgaatcataatttaaaaacaaggtctgaccaggtgtagtgcctcatgcctgtaattccagcactttgggaggccaaagtgggtggatcacctgaggtcaggagtttgagaccagcctggccaacatggtgagaccccatctctacaaaaaatacaaaaattagcctggtgtggtggtgcacgcctgtagtcccagctacttgggaggctgaggcacaagaatcaatagaacccaggaggtggagactgcagtgagccaagattgtgccactactgtactctagcctgggcagcagagtgagaccctgtctcaaaaataaataagtaaataaataaataaataaaataaaaaccaggtcagtacctggagaatttgaatgatagagaatgatagagtaataccctaattattagttaaaacctacaggccgggtgcggtggctcacgcctgtaatcccagcactttgggaggccgaggtgggtggatcacttgaggtcaggagttcaagaccagcctggccaacatggtgaaaccccatctctactaaaaatataaaaatcagccgggcatggtggcatgtgcctgtaatcccagctactcaggagtctgaggaggagaatcacttgaacctggaggcagaggttgcagtgagtcgaggttgcgctactgcactccagcctggacaacagagggagactctgtctcaaaaaatctttgaacacatcatagaaagtgacaaatgctgcaaagccatgaagaacatgaactataaacgggtagactaactgcccagcttagacacttatctatgccacaaaacagctgaatttgtcacatttatatattgcaatatgggaagtattgagatcaaaacaggattccattgacctaattatattaagctaataaactaattttttgaa

SEQ ID NO: 434788 - DNA, 1983 bp, Homo sapiens
accccctctccctgcacctttctttatcttggagcctctcccatctctccctccctcttcctccctaccccaccctccgaccaccccacttcttcccctcccctcacacttccctccctcccttctctcgtctcctccccactgcgcctccctccctcctggccttccttcccttccccgactttgcagatttctcttcccccaggcctccctcctccacctctccgccccctccgggcttggctctcccaggaggctacgactggagccactggtcccgcaggatccccgcgtcctcggtcgccgcgtccacgtccctctcgcgtccccgcccggcgccacgccgcctcctctgggttcggcctccgcgcggtgcagcgcagtctcaggccgcgggacaagcccgacttaaatctctgcaatggctaacgaagcttatccttgtccgtgtgacattggccacagacttgagtatggagggctaggccgtgaagttcaagtcgagcacatcaaggcttatgtcaccaaatcccccgttgatgcaggcaaagctgtgattgtcattcaagatatatttggctggcagttgcccaataccagatatatagctgacatgatctcaggaaatggatacacaaccattgttccagacttctttgtagggcaagagccttgggacccctctggcgactggtctatcttccctgagtggctgaaaacaagaaatgcccagaagatcgatagagagatcagtgctatcttgaagtatctgaaacaacagtgtcatgcccagaaaattggcatcgtgggattctgctggggtggaactgctgtccatcatttgatgatgaaatactcagaattcagggcaggggtgtccgtctatggcatcgtcaaggattctgaagacatttacaatttaaagaaccccactttgttcatttttgctgaaaatgatgttgtgattccactcaaggacgtatctttgctgactcagaagttgaaagaacactgcaaagttgaatatcaaattaaaacattttctgggcagactcatgggttcgtgcatcggaagagagaagattgctcacctgcagacaagccctacattgacgaggccagaaggaatttaattgagtggctgaacaagtacatgtagcaagaatcaagggcaagccttcctagaatagctttcatcccaaaatttgcttggaaatagttagatcatttgatttaattttcacttttataaaataagtgtaggaatcctaaaattgattatttcatttgaaacacaaattcagtaggacgtaatgcatgaaataatttaatttttgacatgtacatcgaatcataatttaaaaacaaggtctgaccaggtgtagtgcctcatgcctgtaattccagcactttgggaggccaaagtgggtggatcacctgaggtcaggagtttgagaccagcctggccaacatggtgagaccccatctctacaaaaaatacaaaaattagcctggtgtggtggtgcacgcctgtagtcccagctacttgggaggctgaggcacaagaatcaatagaacccaggaggtggagactgcagtgagccaagattgtgccactactgtactctagcctgggcagcagagtgagaccctgtctcaaaaataaataagtaaataaataaataaataaaataaaaagggggggggggcaaaaatttccccgggggggcccagggttttgccgcttacccgacttttctttgtcccaatgtgggcctcctaaatgggaggcgccggatattttataaccaaagggaaagggcgcggggttctacccacctccccgcctcgcgcaacccctgcttctcttgggacctcgtggggcaggggaccctactttgtgtgggcgcagccatacttgggcacttacctcgcggagtttaacactcaagggagttttaccttcactgttcttgtgtcacc

SEQ ID NO: 434789 - DNA, 1459 bp, Homo sapiens
  misc_feature (27)..(27): n is a, c, g, or t
attgtccaggggattccctgaaggacntttaccaatttaaaggaaccccccccactttggtccatttttggcctgaaaatggatgttggtgattcccccactcaagggcccgtatctttgctgactcagaagttgaaagaacactgcaaagttgaatatcaaattaaaacattttctgggcagactcatgggttcgtgcatcggaagagagaagattgctcacctgcagacaagccctacattgacgaggccagaaggaatttaattgagtggctgaacaagtacatgtagcaagaatcaagggcaagccttcctagaatagctttcatcccaaaatttgcttggaaatagttagatcatttgatttaattttcacttttataaaataagtgtaggaatcctaaaattgattatttcatttgaaacacaaattcagtaggacgtaatgcatgaaataatttaatttttgacatgtacatcgaatcataatttaaaaacaaggtctgaccaggtgtagtgcctcatgcctgtaattccagcactttgggaggccaaagtgggtggatcacctgaggtcaggagtttgagaccagcctggccaacatggtgagaccccatctctacaaaaaatacaaaaattagcctggtgtggtggtgcacgcctgtagtcccagctacttgggaggctgaggcacaagaatcaatagaacccaggaggtggagactgcagtgagccaagattgtgccactactgtactctagcctgggcagcagagtgagaccctgtctcaaaaataaataagtaaataaataaataaataaaataaaaaccaggtcagtacctggagaatttgaatgatagagaatgatagagtaataccctaattattagttaaaacctacaggccgggtgcggtggctcacgcctgtaatcccagcactttgggaggccgaggtgggtggatcacttgaggtcaggagttcaagaccagcctggccaacatggtgaaaccccatctctactaaaaatataaaaatcagccgggcatggtggcatgtgcctgtaatcccagctactcaggagtctgaggaggagaatcacttgaacctggaggcagaggttgcagtgagtcgaggttgcgctactgcactccagcctggacaacagagggagactctgtctcaaaaaaaaaaaaacctacagctgttcaaggaccagctgacaggtcaagtgtggccttttctggtctttgaacacatcatagaaagtgacaaatgctgcaaagccatgaagaacatgaactataaacgggtagactaactgcccagcttagacacttatctatgccacaaaacagctgaatttgtcacatttatatattgcaatatgggaagtattgagatcaaaacaggattccattgacctaattatattaagctaataaactaattttttgaa

SEQ ID NO: 434790 - DNA, 1627 bp, Homo sapiens
accccctctccctgcacctttctttatcttggagcctctcccatctctccctccctcttcctccctaccccaccctccgaccaccccacttcttcccctcccctcacacttccctccctcccttctctcgtctcctccccactgcgcctccctccctcctggccttccttcccttccccgactttgcagatttctcttcccccaggcctccctcctccacctctccgccccctccgggcttggctctcccaggaggctacgactggagccactggtcccgcaggatccccgcgtcctcggtcgccgcgtccacgtccctctcgcgtccccgcccggcgccacgccgcctcctctgggttcggcctccgcgcggtgcagcgcagtctcaggccgcgggacaagcccgacttaaatctctgcaatggctaacgaagcttatccttgtccgtgtgacattggccacagacttgagtatggagggctaggccgtgaagttcaagtcgagcacatcaaggcttatgtcaccaaatcccccgttgatgcaggcaaagctgtgattgtcattcaagatatatttggctggcagttgcccaataccagatatatagctgacatgatctcaggaaatggatacacaaccattgttccagacttctttgtagggcaagagccttgggacccctctggcgactggtctatcttccctgagtggctgaaaacaagaaatgcccagaagatcgatagagagatcagtgctatcttgaagtatctgaaacaacagtgtcatgcccagaaaattggcatcgtgggattctgctggggtggaactgctgtccatcatttgatgatgaaatactcagaattcagggcaggggtgtccgtctatggcatcgtcaaggattctgaagacatttacaatttaaagaaccccactttgttcatttttgctgaaaatgatgttgtgattccactcaaggacccctgcagctggttgtgaaagaaaatagacgctcaggacccgaaagtcactatgccagagggaaagttcagcttgggaactgcgcaatactgccttcctttccttcccaaacagacagctgcaatgtcacaaccctgtgttagagcctcgtccgtaagccaggatcccacaaccatggaaggccacacatctccccagatggcctccctcccaaagcgctcacacagaaattccttgtgagcagctagatctttcaggctatatccaccccctataaactagccctgaaacaagttttttggatctcacccctgacgatgtcaattaccaggtgatcctcacagagaggacaaagacaagaccagaaatcatccctgagacaaatgcataattgacttttcctgtgcttcctttcttcacgtgtaaaatgtagatttactgagactcagagcctcacaagaatgcgagcatctgcctcactgcgtccctcccccgtcttttccctcctgcttgcccttgcctttttaaatattgccgtgccccagaccccctttggaaaaagcacagctcacagatgtttctgtggcttgtggttgttttcgtgggctcgttctcaaccttggcgaaataaacctctgtggattgaca

SEQ ID NO: 434791 - DNA, 486 bp, Homo sapiens
gacggagtcttgctctgttgcccagagctggagtgcaatggcatgatcttggctcactgcaacctccacctcccgggttcaagccattctcctgcctcagctactcaggagtctgaggaggagaatcacttgaacctggaggcagaggttgcagtgagtcgaggttgcgctactgcactccagcctggacaacagagggagactctgtctcaaaaaaaaaaaaacctacagctgttcaaggaccagctgacaggtcaagtgtggccttttctggtctttgaacacatcatagaaagtgacaaatgctgcaaagccatgaagaacatgaactataaacgggtagactaactgcccagcttagacacttatctatgccacaaaacagctgaatttgtcacatttatatattgcaatatgggaagtattgagatcaaaacaggattccattgacctaattatattaagctaataaactaattttttgaa

SEQ ID NO: 434792 - DNA, 456 bp, Homo sapiens
gggtcggagctacaggaggactccaactccctgaaatctggagtgaagaacgccgcaatccagccaccattccaaggtaagccagaaatgaagtgggccgttgggttctttcttttctttctttcttttttttgagacaaggtctcgctccagcctggacaacagagggagactctgtctcaaaaaaaaaaaaacctacagctgttcaaggaccagctgacaggtcaagtgtggccttttctggtctttgaacacatcatagaaagtgacaaatgctgcaaagccatgaagaacatgaactataaacgggtagactaactgcccagcttagacacttatctatgccacaaaacagctgaatttgtcacatttatatattgcaatatgggaagtattgagatcaaaacaggattccattgacctaattatattaagctaataaactaattttttgaa

SEQ ID NO: 434793 - DNA, 290 bp, Homo sapiens
gcacacaagcccacacaagcccgggccccgctcctctgaactcccgcgtgtgttctgactatggcaaagaaggtctttgccgcgtgcacgggtgtttcgccatgcattttaaagacatagtggaaatcacaccgtatgcaaacttgcgttcgttttggccatttagcacggaggagcctttccaccatgccgttaaatactccttgtaactctcttcctgcagtgagacattctggttgtagcgtttttactaatataaaactattaaaaaactgagcatatttgcaact

SEQ ID NO: 434794 - DNA, 2610 bp, Homo sapiens
  misc_feature (1)..(1): n is a, c, g, or t
ncacacacaaacgccttcttcccggagtattgaatagttgggaattggaacccctccagggggaaccaaacattgtcgttcagaagaagacaaagagagattgaaatgaagctgttgatttcaacacacaaattctggtggtagatgaaagcaaagcaagtaagtttctccgaatccctagtcaactggaggtagagacggactgcgcaggttaactacagctcccagcatgcctgaggggcgggctcagcggctgcgcagactggcgcgcgcggacggtcatgggacttcagcatggcggtgtttgcagatttggacctgcgagcgggttctgacctgaaggctctgcgcggacttgtggagacagccgctcaccttggctattcagttgttgctatcaatcatatcgttgactttaaggaaaagaaacaggaaattgaaaaaccagtagctgtttctgaactcttcacaactttgccaattgtacagggaaaatcaagaccaattaaaattttaactagattaacaattattgtctcggatccatctcactgcaatgttttgagagcaacttcttcaagggcccggctctatgatgttgttgcagtttttccaaagacagaaaagctttttcatattgcttgcacacatttagatgtggatttagtctgcataactgtaacagagaaactaccattttacttcaaaagacctcctattaatgtggcgattgaccgaggcctggcttttgaacttgtctatagccctgctatcaaagactccacaatgagaaggtatacaatttccagtgccctcaatttgatgcaaatctgcaaaggaaagaatgtaattatatctagtgctgcagaaaggcctttagaaataagagggccatatgacgtggcaaatctaggcttgctgtttgggctctctgaaagtgacgccaaggctgcggtgtccaccaactgccgagcagcgcttctccatggagaaactagaaaaactgcttttggaattatctctacagtgaagaaacctcggccatcagaaggagatgaagattgtcttccagcttccaagaaagccaagtgtgagggctgaaaagaatgccccagtctctgtcagcactcccttcttcccttttatagttcatcagccacaacaaaaataaaacctttgtgtgatttactgttttcatttggagctagaaatcaatagtctataaaaacagttttacttgcaatccattaaaacaacaaacgaaacctagtgaagcatctttttaaaaggctgccagcttaatgaatttagatgtactttaagagagaaagactggttatttctcctttgtgtaagtgataaacaacagcaaatatacttgaataaaatgtttcaggtatttttgtttcattttgtttttgagatagggtctttgttgctcaggctggagtacagtggcataatcacagctcactgcaacctcaatcctgggctcaagtgatcctcccgcttcagcctctcaagcagcgggaactacaggtgtgcactaccacacctggctattttttttttttttttttttttcccttgtagagacatggtctcactatgttgctgaggctggtctcaaactcctaggatcaagccatcctcccgctttggcctcctaaagtgctgggattacatgagccaccacatgcagccagatgtttgaatattttaagagcttctttcgaaagtttcttgttcatactcaaatagtagttattttgaagatattcaaacttatattgaagaagtgactttagttcctcttgttttaagcttctttcatgtattcaaatcagcatttttttctaagaaattgctatagaatttgtggaaggagagaggatacacatgtaaaattacatctggtctcttccttcactgcttcatgcctacgtaaggtctttgaaataggattccttacttttagttagaaacccctaaaacgctaatattgattttcctgatagctgtattaaaaatagcaaagcatcggactgaaccaactttggaaataatttatttttataatgggatcatgttaagtagaagtagctttttatgcaaatacatgcatttatgcaatattaatgtaagggctctaaaacaatggagtagagccagaggtataactgaataagaaatttttttaagcaagagaaagacaactgttctgcgggttggagaaaatacaatttttttttttttttttgagacagtctcgctctgtcccccaggctggagtgcagtggctcgatctctgctcactgcaagctccgcctcctgggttcatgccattctcctgcctcagcctcctgagtagctgggactacaggcgctcgccatgtatttagcagagacggggtttcaccgtgttagccaggatggtctcaatctcctgacctcatattccacccgcctcggcctcccaaagtgctgggattacaggcgttagccactgcgcccggcccgagaaaatacagttttaaaaagagaaagctttataacctcaccaatgaatacaaatgtttaaataaaatattgattaaaaaaacattaaaa

SEQ ID NO: 434795 - DNA, 1123 bp, Homo sapiens
caaaaatatttcaaaccattctcacaactctatatgtgtctatgaccagataactggaagaccttctggttatggactatgcgtatacactctcccagatagttagaggcatatctaagaggttaacatatatgatcttatccaaaatgggtctcttggtgctagtgttttacatcagacttcactggctttcacgtatttccacaagtgccaaacatttctcatatccttgctgtattccatagagcagtgttcctgctacctggaacacttgattcttgaataactcctgtttacctttcagacaaaacctaaaggttaccacctcaaagaagtctttatagaagcctcatcatcttagacactctgtattgtttccttcatcgtatttacaacagacagatactgtgcacttactgcctcacttaacgacagggatacgttctgaaaggtgcatcattaggcggttttgttgtgtgaacatcacagagtgttacttacacaaacctaaatgatacagcctactaaacacctaggctatatgagcaatacagcctattgctcttaggcttcaaacttgtacgacatgtcactgtactgaatactgtaggcaattataacacagtggtaagtatattgtgtatctaaacaaacatagaaaaggtaatgcactgtactatgatgttacaacagctaggatgttgctatcaatagaaatttttcagcttcattttatttttatgggaccacctttgtatatgtggttcattgttggccgaaacaccattctgtggcacatgactatgtatttattcctcattattcctttaatattcatctcttccaggagggcatgtcatggacaatctctttttcttaccacaggtcttaggacctggcctagcacctggccaagaactactggcatacctccttttattgtgcttcaatttattgtgctttgcaaatactgaattttttacaagttgaagatttgtggcacctctgtaaccagcaagtctattggtgccattttttcaacatcatgtgcctgtttcctgtctcgctcatgtcacattttggtaattttcacaatattaaaaactttttcattattattaaa

SEQ ID NO: 434796 - DNA, 523 bp, Homo sapiens
tatataatcagtttttcttttatactgttacaaaatgcctttcaagcttctcttatattttcaaaagctatgaaacccatcaaaattataaggacttaaatttatgtaatttttttatttttggatacttaaattttctattaatttgctataagtcattgaaatgttataaataattttctcatatctactctttgttcattttatttcagcctttagaaataagagggccatatgacgtggcaaatctaggcttgctgtttgggctctctgaaagtgacgccaaggctgcggtgtccaccaactgccgagcagcgcttctccatggagaaactagaaaaactgcttttggaattatctctacagtgaagaaacctcggccatcagaaggagatgaagattgtcttccagcttccaagaaagccaagtgtgagggctgaaaagaatgccccagtctctgtcagcactcccttcttcccttttatagttcatcagccacaacaaaaataaaacctttgtgtga

SEQ ID NO: 434797 - DNA, 638 bp, Homo sapiens
cagaggtaccttgatgttctaataagagagatagggtacatgctgtaaaatgaggcaagcatgtgctccacatgggagccatacacttgattgctgtgtttgctctcttgatttgtctgtctaccatatataaagtgtctgctacatcaatgtctgtgactgggttctggctacataagatgccatggacagaccattagagataacactgtcctgcagttttacccatgaggtaatctttaggaatgaattagatgttaataatatactgatatttgtgtctgttgggaaaaaaagataatgacggtaaatggcactagcagccatagcagttcattatggcttatcatttgctattgctgtaagccaaagtaatatgttaaaccacctcattttaaattatgtcttaacttcaagcacagtggtttccctgtttgttttacagaaactagaaaaactgcttttggaattatctctacagtgaagaaacctcggccatcagaaggagatgaagattgtcttccagcttccaagaaagccaagtgtgagggctgaaaagaatgccccagtctctgtcagcactcccttcttcccttttatagttcatcagccacaacaaaaataaaacctttgtgtga

SEQ ID NO: 434798 - DNA, 3624 bp, Homo sapiens
  misc_feature (1)..(1): n is a, c, g, or t
ncacacacaaacgccttcttcccggagtattgaatagttgggaattggaacccctccagggggaaccaaacattgtcgttcagaagaagacaaagagagattgaaatgaagctgttgatttcaacacacaaattctggtggtagatgaaagcaaagcaagtaagtttctccgaatccctagtcaactggaggtagagacggactgcgcaggttaactacagctcccagcatgcctgaggggcgggctcagcggctgcgcagactggcgcgcgcggacggtcatgggacttcagcatggcggtgtttgcagatttggacctgcgagcgggttctgacctgaaggctctgcgcggacttgtggagacagccgctcaccttggctattcagttgttgctatcaatcatatcgttgactttaaggaaaagaaacaggaaattgaaaaaccagtagctgtttctgaactcttcacaactttgccaattgtacagggaaaatcaagaccaattaaaattttaactagattaacaattattgtctcggatccatctcactgcaatgttttgagagcaacttcttcaagggcccggctctatgatgttgttgcagtttttccaaagacagaaaagctttttcatattgcttgcacacatttagatgtggatttagtctgcataactgtaacagagaaactaccattttacttcaaaagacctcctattaatgtggcgattgaccgaggcctggcttttgaacttgtctatagccctgctatcaaagactccacaatgagaaggtatacaatttccagtgccctcaatttgatgcaaatctgcaaaggaaagaatgtaattatatctagtgctgcagaaaggcctttagaaataagagggccatatgacgtggcaaatctaggcttgctgtttgggctctctgaaagtgacgccaaggctgcggtgtccaccaactgccgagcagcgcttctccatggagaaactagaaaaactgcttttggaattatctctacagtgaagaaacctcggccatcagaaggagatgaagattgtcttccagcttccaagaaagccaagtgtgagggctgaaaagaatgccccagtctctgtcagcactcccttcttcccttttatagttcatcagccacaacaaaaataaaacctttgtgtgatttactgttttcatttggagctagaaatcaatagtctataaaaacagttttacttgcaatccattaaaacaacaaacgaaacctagtgaagcatctttttaaaaggctgccagcttaatgaatttagatgtactttaagagagaaagactggttatttctcctttgtgtaagtgataaacaacagcaaatatacttgaataaaatgtttcaggtatttttgtttcattttgtttttgagatagggtctttgttgctcaggctggagtacagtggcataatcacagctcactgcaacctcaatcctgggctcaagtgatcctcccgcttcagcctctcaagcagcgggaactacaggtgtgcactaccacacctggctattttttttttttttttttttttcccttgtagagacatggtctcactatgttgctgaggctggtctcaaactcctaggatcaagccatcctcccgctttggcctcctaaagtgctgggattacatgagccaccacatgcagccagatgtttgaatattttaagagcttctttcgaaagtttcttgttcatactcaaatagtagttattttgaagatattcaaacttatattgaagaagtgactttagttcctcttgttttaagcttctttcatgtattcaaatcagcatttttttctaagaaattgctatagaatttgtggaaggagagaggatacacatgtaaaattacatctggtctcttccttcactgcttcatgcctacgtaaggtctttgaaataggattccttacttttagttagaaacccctaaaacgctaatattgattttcctgatagctgtattaaaaatagcaaagcatcggactgaaccaactttggaaataatttatttttataatgggatcatgttaagtagaagtagctttttatgcaaatacatgcatttatgcaatattaatgtaagggctctaaaacaatggagtagagccagaggtataactgaataagaaatttttttaagcaagagaaagacaactgttctgcgggttggagaaaatacaatttttttttttttttttgagacagtctcgctctgtcccccaggctggagtgcagtggctcgatctctgctcactgcaagctccgcctcctgggttcatgccattctcctgcctcagcctcctgagtagctgggactacaggcgctcgccatgtatttagcagagacggggtttcaccgtgttagccaggatggtctcaatctcctgacctcatattccacccgcctcggcctcccaaagtgctgggattacaggcgttagccactgcgcccggcccgagaaaatacagttttaaaaagagaaagctttataacctcaccaatgaatacaaatgtttaaataaaatattgattaaaaaaacattaaaagtgcatcatgaccaggtgaaatttattctttttttcttcttctttttgagacagggtctcactctgtcacccaggctggagtgcagtggcacaatctcggctcactgcaacctttgcctcttgggctcaagccatcctcccacctcagcctcccaagaactagaattcaacaaagacaacttttgatctctcatcagagagatcatactcccaagaacaggctttgacccttctttaaaagaggattgtcctgggctgatgagagtcactttacctgaagatacctgggaagttttgtctcctctgaggttggcccatggccagtgactgatgcaggacattacagcctggcccactggcctcggtggtacaatttatgctcctgagcaccccatgggattacgctgtgtgtggatttctcctgaaaccacatatttgcctcttctgccctgttctgttttttctcattcccttatagaggactctcagtaagtcacttacacaagaatcctaatttgaaatgctgcttccaggagacctgacttagaaaattggacaaataaagttgatttttttaaatgtccagtaacatgaagatgctgaactttcctagtcatttagggggaaatcaccacaaatatatctggctgatcaggttgaaagttaaaagaaaaaaagatttataaagtgggtattttcaagatggtgtggagggagatacaatttgatgcaagtcttatacttttgatgtcaatttattcttcagaaataactggttaattataaagggtggatggataaggatattcactgcaacaatgtcttaaatgtgaaaatggaaacaacctaaatacccaataataacaggattaaataattcattgtacattaaaagaatactgtctataaagatgtctagaataagttgttcagttgaagttgtaaagctaaatacacaatacccataatgtgcacagaaataatcagaatgtcatgaaaccagaaaaaaaaaaa

SEQ ID NO: 434799 - DNA, 3158 bp, Homo sapiens
  misc_feature (1)..(1): n is a, c, g, or t
ncacacacaaacgccttcttcccggagtattgaatagttgggaattggaacccctccagggggaaccaaacattgtcgttcagaagaagacaaagagagattgaaatgaagctgttgatttcaacacacaaattctggtggtagatgaaagcaaagcaagtaagtttctccgaatccctagtcaactggaggtagagacggactgcgcaggttaactacagctcccagcatgcctgaggggcgggctcagcggctgcgcagactggcgcgcgcggacggtcatgggacttcagcatggcggtgtttgcagatttggacctgcgagcgggttctgacctgaaggctctgcgcggacttgtggagacagccgctcaccttggctattcagttgttgctatcaatcatatcgttgactttaaggaaaagaaacaggaaattgaaaaaccagtagctgtttctgaactcttcacaactttgccaattgtacagggaaaatcaagaccaattaaaattttaactagattaacaattattgtctcggatccatctcactgcaatgttttgagagcaacttcttcaagggcccggctctatgatgttgttgcagtttttccaaagacagaaaagctttttcatattgcttgcacacatttagatgtggatttagtctgcataactgtaacagagaaactaccattttacttcaaaagacctcctattaatgtggcgattgaccgaggcctggcttttgaacttgtctatagccctgctatcaaagactccacaatgagaaggtatacaatttccagtgccctcaatttgatgcaaatctgcaaaggaaagaatgtaattatatctagtgctgcagaaaggcctttagaaataagagggccatatgacgtggcaaatctaggcttgctgtttgggctctctgaaagtgacgccaaggctgcggtgtccaccaactgccgagcagcgcttctccatggagaaactagaaaaactgcttttggaattatctctacagtgaagaaacctcggccatcagaaggagatgaagattgtcttccagcttccaagaaagccaagtgtgagggctgaaaagaatgccccagtctctgtcagcactcccttcttcccttttatagttcatcagccacaacaaaaataaaacctttgtgtgatttactgttttcatttggagctagaaatcaatagtctataaaaacagttttacttgcaatccattaaaacaacaaacgaaacctagtgaagcatctttttaaaaggctgccagcttaatgaatttagatgtactttaagagagaaagactggttatttctcctttgtgtaagtgataaacaacagcaaatatacttgaataaaatgtttcaggtatttttgtttcattttgtttttgagatagggtctttgttgctcaggctggagtacagtggcataatcacagctcactgcaacctcaatcctgggctcaagtgatcctcccgcttcagcctctcaagcagcgggaactacaggtgtgcactaccacacctggctattttttttttttttttttttttcccttgtagagacatggtctcactatgttgctgaggctggtctcaaactcctaggatcaagccatcctcccgctttggcctcctaaagtgctgggattacatgagccaccacatgcagccagatgtttgaatattttaagagcttctttcgaaagtttcttgttcatactcaaatagtagttattttgaagatattcaaacttatattgaagaagtgactttagttcctcttgttttaagcttctttcatgtattcaaatcagcatttttttctaagaaattgctatagaatttgtggaaggagagaggatacacatgtaaaattacatctggtctcttccttcactgcttcatgcctacgtaaggtctttgaaataggattccttacttttagttagaaacccctaaaacgctaatattgattttcctgatagctgtattaaaaatagcaaagcatcggactgaaccaactttggaaataatttatttttataatgggatcatgttaagtagaagtagctttttatgcaaatacatgcatttatgcaatattaatgtaagggctctaaaacaatggagtagagccagaggtataactgaataagaaatttttttaagcaagagaaagacaactgttctgcgggttggagaaaatacaatttttttttttttttttgagacagtctcgctctgtcccccaggctggagtgcagtggctcgatctctgctcactgcaagctccgcctcctgggttcatgccattctcctgcctcagcctcctgagtagctgggactacaggcgctcgccatgtatttagcagagacggggtttcaccgtgttagccaggatggtctcaatctcctgacctcatattccacccgcctcggcctcccaaagtgctgggattacaggcgttagccactgcgcccggcccgagaaaatacagttttaaaaagagaaagctttataacctcaccaatgaatacaaatgtttaaataaaatattgattaaaaaaacattaaaagtgcatcatgaccaggtgaaatttattctttttttcttcttctttttgagacagggtctcactctgtcacccaggctggagtgcagtggcacaatctcggctcactgcaacctttgcctcttgggctcaagccatcctcccacctcagcctcccaagtaagtgggaccagaagcatgcaccaccacatcccagctaatttttgtatttttttgtagagatggggttttgccatgtccaggctagtctcaaactcctggcagattcaagcagtctgtccgcctcagcatcccaaagtgctgggattacaggcacaggcatgagccaccatacccggccttccagttctttttaatgcagtatcctttatcatattcataggtcaaaagagaaaaatcagaatatttttaatagatgccagaaagacatttaataaagttaaatccactcctgatttttaaaatgacaacaataaaaacccatggcaaaattaaagtagaataatattgtatgcatacatatatatgttcatatgtgtctgttttttgtg

SEQ ID NO: 434800 - DNA, 1184 bp, Homo sapiens
  misc_feature (1)..(1): n is a, c, g, or t
ncacacacaaacgccttcttcccggagtattgaatagttgggaattggaacccctccagggggaaccaaacattgtcgttcagaagaagacaaagagagattgaaatgaagctgttgatttcaacacacaaattctggtggtagatgaaagcaaagcaagtaagtttctccgaatccctagtcaactggaggtagagacggactgcgcaggttaactacagctcccagcatgcctgaggggcgggctcagcggctgcgcagactggcgcgcgcggacggtcatgggacttcagcatggcggtgtttgcagatttggacctgcgagcgggttctgacctgaaggctctgcgcggacttgtggagacagccgctcaccttggctattcagttgttgctatcaatcatatcgttgactttaaggaaaagaaacaggaaattgaaaaaccagtagctgtttctgaactcttcacaactttgccaattgtacagggaaaatcaagaccaattaaaattttaactagattaacaattattgtctcggatccatctcactgcaatgttttgagagcaacttcttcaagggcccggctctatgatgttgttgcagtttttccaaagacagaaaagctttttcatattgcttgcacacatttagatgtggatttagtctgcataactgtaacagagaaactaccattttacttcaaaagacctcctattaatgtggcgattgaccgaggcctggcttttgaacttgtctatagccctgctatcaaagactccacaatgagaaggtatacaatttccagtgccctcaatttgatgcaaatctgcaaaggaaagaatgtaattatatctagtgctgcagaaaggcctttagaaataagagggccatatgacgtggcaaatctaggcttgctgtttgggctctctgaaagtgacgccaaggctgcggtgtccaccaactgccgagcagcgcttctccatggagaaactagaaaaactgcttttggaattatctctacagtgaagaaacctcggccatcagaaggagatgaagattgtcttccagcttccaagaaagccaagtgtgagggctgaaaagaatgccccagtctctgtcagcactcccttcttcccttttatagttcatcagccacaacaaaaataaaacctttgtgtga

SEQ ID NO: 434801 - DNA, 2050 bp, Homo sapiens
  misc_feature (1)..(1): n is a, c, g, or t
ncacacacaaacgccttcttcccggagtattgaatagttgggaattggaacccctccagggggaaccaaacattgtcgttcagaagaagacaaagagagattgaaatgaagctgttgatttcaacacacaaattctggtggtagatgaaagcaaagcaagtaagtttctccgaatccctagtcaactggaggtagagacggactgcgcaggttaactacagctcccagcatgcctgaggggcgggctcagcggctgcgcagactggcgcgcgcggacggtcatgggacttcagcatggcggtgtttgcagatttggacctgcgagcgggttctgacctgaaggctctgcgcggacttgtggagacagccgctcaccttggctattcagttgttgctatcaatcatatcgttgactttaaggaaaagaaacaggaaattgaaaaaccagtagctgtttctgaactcttcacaactttgccaattgtacagggaaaatcaagaccaattaaaattttaactagattaacaattattgtctcggatccatctcactgcaatgttttgagagcaacttcttcaagggcccggctctatgatgttgttgcagtttttccaaagacagaaaagctttttcatattgcttgcacacatttagatgtggatttagtctgcataactgtaacagagaaactaccattttacttcaaaagacctcctattaatgtggcgattgaccgaggcctggcttttgaacttgtctatagccctgctatcaaagactccacaatgagaaggtatacaatttccagtgccctcaatttgatgcaaatctgcaaaggaaagaatgtaattatatctagtgctgcagaaaggcctttagaaataagagggccatatgacgtggcaaatctaggcttgctgtttgggctctctgaaagtgacgccaaggctgcggtgtccaccaactgccgagcagcgcttctccatggagaaactagaaaaactgcttttggaattatctctacagtgaagaaacctcggccatcagaaggagatgaagattgtcttccagcttccaagaaagccaagtggtctcactctgtcacccaggctggagtgcagtggcacaatctcggctcactgcaacctttgcctcttgggctcaagccatcctcccacctcagcctcccaagaactagaattcaacaaagacaacttttgatctctcatcagagagatcatactcccaagaacaggctttgacccttctttaaaagaggattgtcctgggctgatgagagtcactttacctgaagatacctgggaagttttgtctcctctgaggttggcccatggccagtgactgatgcaggacattacagcctggcccactggcctcggtggtacaatttatgctcctgagcaccccatgggattacgctgtgtgtggatttctcctgaaaccacatatttgcctcttctgccctgttctgttttttctcattcccttatagaggactctcagtaagtcacttacacaagaatcctaatttgaaatgctgcttccaggagacctgacttagaaaattggacaaataaagttgatttttttaaatgtccagtaacatgaagatgctgaactttcctagtcatttagggggaaatcaccacaaatatatctggctgatcaggttgaaagttaaaagaaaaaaagatttataaagtgggtattttcaagatggtgtggagggagatacaatttgatgcaagtcttatacttttgatgtcaatttattcttcagaaataactggttaattataaagggtggatggataaggatattcactgcaacaatgtcttaaatgtgaaaatggaaacaacctaaatacccaataataacaggattaaataattcattgtacattaaaagaatactgtctataaagatgtctagaataagttgttcagttgaagttgtaaagctaaatacacaatacccataatgtgcacagaaataatcagaatgtcatgaaaccagaaaaaaaaaaa

SEQ ID NO: 434802 - DNA, 1863 bp, Homo sapiens
  misc_feature (1)..(1): n is a, c, g, or t
ncacacacaaacgccttcttcccggagtattgaatagttgggaattggaacccctccagggggaaccaaacattgtcgttcagaagaagacaaagagagattgaaatgaagctgttgatttcaacacacaaattctggtggtagatgaaagcaaagcaagtaagtttctccgaatccctagtcaactggaggtagagacggactgcgcaggttaactacagctcccagcatgcctgaggggcgggctcagcggctgcgcagactggcgcgcgcggacggtcatgggacttcagcatggcggtgtttgcagatttggacctgcgagcgggttctgacctgaaggctctgcgcggacttgtggagacagccgctcaccttggctattcagttgttgctatcaatcatatcgttgactttaaggaaaagaaacaggaaattgaaaaaccagtagctgtttctgaactcttcacaactttgccaattgtacagggaaaatcaagaccaattaaaattttaactagattaacaattattgtctcggatccatctcactgcaatgttttgagagcaacttcttcaagggcccggctctatgatgttgttgcagtttttccaaagacagaaaagctttttcatattgcttgcacacatttagatgtggatttagtctgcataactgtaacagagaaactaccattttacttcaaaagacctcctattaatgtggcgattgaccgaggcctggcttttgaacttgtctatagccctgctatcaaagactccacaatgagaaggtatacaatttccagtgccctcaatttgatgcaaatctgcaaaggaaagaatgtaattatatctagtgctgcagaaaggcctttagaaataagagggccatatgacgtggcaaatctaggcttgctgtttgggctctctgaaagtgacgccaaggctgcggtgtccaccaactgccgagcagcgcttctccatggagaaactagaaaaactgcttttggaattatctctacagtgaagaaacctcggccatcagaaggagatgaagattgtcttccagcttccaagaaagccaagtaggattgtcctgggctgatgagagtcactttacctgaagatacctgggaagttttgtctcctctgaggttggcccatggccagtgactgatgcaggacattacagcctggcccactggcctcggtggtacaatttatgctcctgagcaccccatgggattacgctgtgtgtggatttctcctgaaaccacatatttgcctcttctgccctgttctgttttttctcattcccttatagaggactctcagtaagtcacttacacaagaatcctaatttgaaatgctgcttccaggagacctgacttagaaaattggacaaataaagttgatttttttaaatgtccagtaacatgaagatgctgaactttcctagtcatttagggggaaatcaccacaaatatatctggctgatcaggttgaaagttaaaagaaaaaaagatttataaagtgggtattttcaagatggtgtggagggagatacaatttgatgcaagtcttatacttttgatgtcaatttattcttcagaaataactggttaattataaagggtggatggataaggatattcactgcaacaatgtcttaaatgtgaaaatggaaacaacctaaatacccaataataacaggattaaataattcattgtacattaaaagaatactgtctataaagatgtctagaataagttgttcagttgaagttgtaaagctaaatacacaatacccataatgtgcacagaaataatcagaatgtcatgaaaccagaaaaaaaaaaa

SEQ ID NO: 434803 - DNA, 4186 bp, Homo sapiens
  misc_feature (1)..(1): n is a, c, g, or t
ncacacacaaacgccttcttcccggagtattgaatagttgggaattggaacccctccagggggaaccaaacattgtcgttcagaagaagacaaagagagattgaaatgaagctgttgatttcaacacacaaattctggtggtagatgaaagcaaagcaagtaagtttctccgaatccctagtcaactggaggtagagacggactgcgcaggttaactacagctcccagcatgcctgaggggcgggctcagcggctgcgcagactggcgcgcgcggacggtcatgggacttcagcatggcggtgtttgcagatttggacctgcgagcgggttctgacctgaaggctctgcgcggacttgtggagacagccgctcaccttggctattcagttgttgctatcaatcatatcgttgactttaaggaaaagaaacaggaaattgaaaaaccagtagctgtttctgaactcttcacaactttgccaattgtacagggaaaatcaagaccaattaaaattttaactagattaacaattattgtctcggatccatctcactgcaatgttttgagagcaacttcttcaagggcccggctctatgatgttgttgcagtttttccaaagacagaaaagctttttcatattgcttgcacacatttagatgtggatttagtctgcataactgtaacagagaaactaccattttacttcaaaagacctcctattaatgtggcgattgaccgaggcctggcttttgaacttgtctatagccctgctatcaaagactccacaatgagaaggtatacaatttccagtgccctcaatttgatgcaaatctgcaaaggaaaggtatggttctataattttaggatgtttttcgcatctggcagtttattattagtagtacactggaattgtcaaactgactccttttccttaaagcagaatgttctcatagcataggaacaaattctgccatttcagtgagctctgcaaattttaagggaaagaaaaataccaagggaagaataatgtaagggagaaaaagatgtgttggaagccatatcttttgataaaaatttgcaatttacatactgtgaaagaaaagtctagaataacaatggtcctcactgagttgaattaagatatgtgaccttttcatcttgttttttaaacttaattcacctttactaagatctgttaggaaaacatattttgttttttattacagattgcctttagtttgacatgaagtcttttcatttttttcaccttaattatttaccttatctttaaaagaagttggtatttgagccttaaatgttaaaatatgattactggctatttatattatgaaactcctttttttacatttatctaagattaatattagtcactttctattttgtagaatgtaattatatctagtgctgcagaaaggcctttagaaataagagggccatatgacgtggcaaatctaggcttgctgtttgggctctctgaaagtgacgccaaggctgcggtgtccaccaactgccgagcagcgcttctccatggagaaactagaaaaactgcttttggaattatctctacagtgaagaaacctcggccatcagaaggagatgaagattgtcttccagcttccaagaaagccaagtgtgagggctgaaaagaatgccccagtctctgtcagcactcccttcttcccttttatagttcatcagccacaacaaaaataaaacctttgtgtgatttactgttttcatttggagctagaaatcaatagtctataaaaacagttttacttgcaatccattaaaacaacaaacgaaacctagtgaagcatctttttaaaaggctgccagcttaatgaatttagatgtactttaagagagaaagactggttatttctcctttgtgtaagtgataaacaacagcaaatatacttgaataaaatgtttcaggtatttttgtttcattttgtttttgagatagggtctttgttgctcaggctggagtacagtggcataatcacagctcactgcaacctcaatcctgggctcaagtgatcctcccgcttcagcctctcaagcagcgggaactacaggtgtgcactaccacacctggctattttttttttttttttttttttcccttgtagagacatggtctcactatgttgctgaggctggtctcaaactcctaggatcaagccatcctcccgctttggcctcctaaagtgctgggattacatgagccaccacatgcagccagatgtttgaatattttaagagcttctttcgaaagtttcttgttcatactcaaatagtagttattttgaagatattcaaacttatattgaagaagtgactttagttcctcttgttttaagcttctttcatgtattcaaatcagcatttttttctaagaaattgctatagaatttgtggaaggagagaggatacacatgtaaaattacatctggtctcttccttcactgcttcatgcctacgtaaggtctttgaaataggattccttacttttagttagaaacccctaaaacgctaatattgattttcctgatagctgtattaaaaatagcaaagcatcggactgaaccaactttggaaataatttatttttataatgggatcatgttaagtagaagtagctttttatgcaaatacatgcatttatgcaatattaatgtaagggctctaaaacaatggagtagagccagaggtataactgaataagaaatttttttaagcaagagaaagacaactgttctgcgggttggagaaaatacaatttttttttttttttttgagacagtctcgctctgtcccccaggctggagtgcagtggctcgatctctgctcactgcaagctccgcctcctgggttcatgccattctcctgcctcagcctcctgagtagctgggactacaggcgctcgccatgtatttagcagagacggggtttcaccgtgttagccaggatggtctcaatctcctgacctcatattccacccgcctcggcctcccaaagtgctgggattacaggcgttagccactgcgcccggcccgagaaaatacagttttaaaaagagaaagctttataacctcaccaatgaatacaaatgtttaaataaaatattgattaaaaaaacattaaaagtgcatcatgaccaggtgaaatttattctttttttcttcttctttttgagacagggtctcactctgtcacccaggctggagtgcagtggcacaatctcggctcactgcaacctttgcctcttgggctcaagccatcctcccacctcagcctcccaagaactagaattcaacaaagacaacttttgatctctcatcagagagatcatactcccaagaacaggctttgacccttctttaaaagaggattgtcctgggctgatgagagtcactttacctgaagatacctgggaagttttgtctcctctgaggttggcccatggccagtgactgatgcaggacattacagcctggcccactggcctcggtggtacaatttatgctcctgagcaccccatgggattacgctgtgtgtggatttctcctgaaaccacatatttgcctcttctgccctgttctgttttttctcattcccttatagaggactctcagtaagtcacttacacaagaatcctaatttgaaatgctgcttccaggagacctgacttagaaaattggacaaataaagttgatttttttaaatgtccagtaacatgaagatgctgaactttcctagtcatttagggggaaatcaccacaaatatatctggctgatcaggttgaaagttaaaagaaaaaaagatttataaagtgggtattttcaagatggtgtggagggagatacaatttgatgcaagtcttatacttttgatgtcaatttattcttcagaaataactggttaattataaagggtggatggataaggatattcactgcaacaatgtcttaaatgtgaaaatggaaacaacctaaatacccaataataacaggattaaataattcattgtacattaaaagaatactgtctataaagatgtctagaataagttgttcagttgaagttgtaaagctaaatacacaatacccataatgtgcacagaaataatcagaatgtcatgaaaccagaaaaaaaaaaa

SEQ ID NO: 434804 - DNA, 1553 bp, Homo sapiens
  misc_feature (1)..(1): n is a, c, g, or t
ncacacacaaacgccttcttcccggagtattgaatagttgggaattggaacccctccagggggaaccaaacattgtcgttcagaagaagacaaagagagattgaaatgaagctgttgatttcaacacacaaattctggtggtagatgaaagcaaagcaagtaagtttctccgaatccctagtcaactggaggtagagacggactgcgcaggttaactacagctcccagcatgcctgaggggcgggctcagcggctgcgcagactggcgcgcgcggacggtcatgggacttcagcatggcggtgtttgcagatttggacctgcgagcgggttctgacctgaaggctctgcgcggacttgtggagacagccgctcaccttggctattcagttgttgctatcaatcatatcgttgactttaaggaaaagaaacaggaaattgaaaaaccagtagctgtttctgaactcttcacaactttgccaattgtacagggaaaatcaagaccaattaaaattttaactagattaacaattattgtctcggatccatctcactgcaatgttttgagagcaacttcttcaagggcccggctctatgatgttgttgcagtttttccaaagacagaaaagctttttcatattgcttgcacacatttagatgtggatttagtctgcataactgtaacagagaaactaccattttacttcaaaagacctcctattaatgtggcgattgaccgaggcctggcttttgaacttgtctatagccctgctatcaaagactccacaatgagaaggtatacaatttccagtgccctcaatttgatgcaaatctgcaaaggaaagaatgtaattatatctagtgctgcagaaaggcctttagaaataagagggccatatgacgtggcaaatctaggcttgctgtttgggctctctgaaagtgacgccaaggctgcggtgtccaccaactgccgagcagcgcttctccatggagaaactagaaaaactgcttttggaattatctctacagtgaagaaacctcggccatcagaaggagatgaagattgtcttccagcttccaagaaagccaagtggtctcactctgtcacccaggctggagtgcagtggcacaatctcggctcactgcaacctttgcctcttgggctcaagccatcctcccacctcagcctcccaagaactagaattcaacaaagacaacttttgatctctcatcagagagatcatactcccaagaacaggctttgacccttctttaaaaggagggcatgtcatggacaatctctttttcttaccacaggtcttaggacctggcctagcacctggccaagaactactggcatacctccttttattgtgcttcaatttattgtgctttgcaaatactgaattttttacaagttgaagatttgtggcacctctgtaaccagcaagtctattggtgccattttttcaacatcatgtgcctgtttcctgtctcgctcatgtcacattttggtaattttcacaatattaaaaactttttcattattattaaa

SEQ ID NO: 434805 - DNA, 1746 bp, Homo sapiens
  misc_feature (1)..(1): n is a, c, g, or t
ncacacacaaacgccttcttcccggagtattgaatagttgggaattggaacccctccagggggaaccaaacattgtcgttcagaagaagacaaagagagattgaaatgaagctgttgatttcaacacacaaattctggtggtagatgaaagcaaagcaagtaagtttctccgaatccctagtcaactggaggtagagacggactgcgcaggttaactacagctcccagcatgcctgaggggcgggctcagcggctgcgcagactggcgcgcgcggacggtcatgggacttcagcatggcggtgtttgcagatttggacctgcgagcgggttctgacctgaaggctctgcgcggacttgtggagacagccgctcaccttggctattcagttgttgctatcaatcatatcgttgactttaaggaaaagaaacaggaaattgaaaaaccagtagctgtttctgaactcttcacaactttgccaattgtacagggaaaatcaagaccaattaaaattttaactagattaacaattattgtctcggatccatctcactgcaatgttttgagagcaacttcttcaagggcccggctctatgatgttgttgcagtttttccaaagacagaaaagctttttcatattgcttgcacacatttagatgtggatttagtctgcataactgtaacagagaaactaccattttacttcaaaagacctcctattaatgtggcgattgaccgaggcctggcttttgaacttgtctatagccctgctatcaaagactccacaatgagaaggtatacaatttccagtgccctcaatttgatgcaaatctgcaaaggaaaggtatggttctataattttaggatgtttttcgcatctggcagtttattattagtagtacactggaattgtcaaactgactccttttccttaaagcagaatgttctcatagcataggaacaaattctgccatttcagtgagctctgcaaattttaagggaaagaaaaataccaagggaagaataatgtaagggagaaaaagatgtgttggaagccatatcttttgataaaaatttgcaatttacatactgtgaaagaaaagtctagaataacaatggtcctcactgagttgaattaagatatgtgaccttttcatcttgttttttaaacttaattcacctttactaagatctgttaggaaaacatattttgttttttattacagattgcctttagtttgacatgaagtcttttcatttttttcaccttaattatttaccttatctttaaaagaagttggtatttgagccttaaatgttaaaatatgattactggctatttatattatgaaactcctttttttacatttatctaagattaatattagtcactttctattttgtagaatgtaattatatctagtgctgcagaaaggcctttagaaataagagggccatatgacgtggcaaatctaggcttgctgtttgggctctctgaaagtgacgccaaggctgcggtgtccaccaactgccgagcagcgcttctccatggagaaactagaaaaactgcttttggaattatctctacagtgaagaaacctcggccatcagaaggagatgaagattgtcttccagcttccaagaaagccaagtgtgagggctgaaaagaatgccccagtctctgtcagcactcccttcttcccttttatagttcatcagccacaacaaaaataaaacctttgtgtga

SEQ ID NO: 434806 - DNA, 4133 bp, Homo sapiens
  misc_feature (1)..(1): n is a, c, g, or t
ncacacacaaacgccttcttcccggagtattgaatagttgggaattggaacccctccagggggaaccaaacattgtcgttcagaagaagacaaagagagattgaaatgaagctgttgatttcaacacacaaattctggtggtagatgaaagcaaagcaagtaagtttctccgaatccctagtcaactggaggtagagacggactgcgcaggttaactacagctcccagcatgcctgaggggcgggctcagcggctgcgcagactggcgcgcgcggacggtcatgggacttcagcatggcggtgtttgcagatttggacctgcgagcgggttctgacctgaaggctctgcgcggacttgtggagacagccgctcaccttggctattcagttgttgctatcaatcatatcgttgactttaaggaaaagaaacaggaaattgaaaaaccagtagctgtttctgaactcttcacaactttgccaattgtacagggaaaatcaagaccaattaaaattttaactagattaacaattattgtctcggatccatctcactgcaatgttttgagagcaacttcttcaagggcccggctctatgatgttgttgcagtttttccaaagacagaaaagctttttcatattgcttgcacacatttagatgtggatttagtctgcataactgtaacagagaaactaccattttattgtctatagccctgctatcaaagactccacaatgagaaggtatacaatttccagtgccctcaatttgatgcaaatctgcaaaggaaaggtatggttctataattttaggatgtttttcgcatctggcagtttattattagtagtacactggaattgtcaaactgactccttttccttaaagcagaatgttctcatagcataggaacaaattctgccatttcagtgagctctgcaaattttaagggaaagaaaaataccaagggaagaataatgtaagggagaaaaagatgtgttggaagccatatcttttgataaaaatttgcaatttacatactgtgaaagaaaagtctagaataacaatggtcctcactgagttgaattaagatatgtgaccttttcatcttgttttttaaacttaattcacctttactaagatctgttaggaaaacatattttgttttttattacagattgcctttagtttgacatgaagtcttttcatttttttcaccttaattatttaccttatctttaaaagaagttggtatttgagccttaaatgttaaaatatgattactggctatttatattatgaaactcctttttttacatttatctaagattaatattagtcactttctattttgtagaatgtaattatatctagtgctgcagaaaggcctttagaaataagagggccatatgacgtggcaaatctaggcttgctgtttgggctctctgaaagtgacgccaaggctgcggtgtccaccaactgccgagcagcgcttctccatggagaaactagaaaaactgcttttggaattatctctacagtgaagaaacctcggccatcagaaggagatgaagattgtcttccagcttccaagaaagccaagtgtgagggctgaaaagaatgccccagtctctgtcagcactcccttcttcccttttatagttcatcagccacaacaaaaataaaacctttgtgtgatttactgttttcatttggagctagaaatcaatagtctataaaaacagttttacttgcaatccattaaaacaacaaacgaaacctagtgaagcatctttttaaaaggctgccagcttaatgaatttagatgtactttaagagagaaagactggttatttctcctttgtgtaagtgataaacaacagcaaatatacttgaataaaatgtttcaggtatttttgtttcattttgtttttgagatagggtctttgttgctcaggctggagtacagtggcataatcacagctcactgcaacctcaatcctgggctcaagtgatcctcccgcttcagcctctcaagcagcgggaactacaggtgtgcactaccacacctggctattttttttttttttttttttttcccttgtagagacatggtctcactatgttgctgaggctggtctcaaactcctaggatcaagccatcctcccgctttggcctcctaaagtgctgggattacatgagccaccacatgcagccagatgtttgaatattttaagagcttctttcgaaagtttcttgttcatactcaaatagtagttattttgaagatattcaaacttatattgaagaagtgactttagttcctcttgttttaagcttctttcatgtattcaaatcagcatttttttctaagaaattgctatagaatttgtggaaggagagaggatacacatgtaaaattacatctggtctcttccttcactgcttcatgcctacgtaaggtctttgaaataggattccttacttttagttagaaacccctaaaacgctaatattgattttcctgatagctgtattaaaaatagcaaagcatcggactgaaccaactttggaaataatttatttttataatgggatcatgttaagtagaagtagctttttatgcaaatacatgcatttatgcaatattaatgtaagggctctaaaacaatggagtagagccagaggtataactgaataagaaatttttttaagcaagagaaagacaactgttctgcgggttggagaaaatacaatttttttttttttttttgagacagtctcgctctgtcccccaggctggagtgcagtggctcgatctctgctcactgcaagctccgcctcctgggttcatgccattctcctgcctcagcctcctgagtagctgggactacaggcgctcgccatgtatttagcagagacggggtttcaccgtgttagccaggatggtctcaatctcctgacctcatattccacccgcctcggcctcccaaagtgctgggattacaggcgttagccactgcgcccggcccgagaaaatacagttttaaaaagagaaagctttataacctcaccaatgaatacaaatgtttaaataaaatattgattaaaaaaacattaaaagtgcatcatgaccaggtgaaatttattctttttttcttcttctttttgagacagggtctcactctgtcacccaggctggagtgcagtggcacaatctcggctcactgcaacctttgcctcttgggctcaagccatcctcccacctcagcctcccaagaactagaattcaacaaagacaacttttgatctctcatcagagagatcatactcccaagaacaggctttgacccttctttaaaagaggattgtcctgggctgatgagagtcactttacctgaagatacctgggaagttttgtctcctctgaggttggcccatggccagtgactgatgcaggacattacagcctggcccactggcctcggtggtacaatttatgctcctgagcaccccatgggattacgctgtgtgtggatttctcctgaaaccacatatttgcctcttctgccctgttctgttttttctcattcccttatagaggactctcagtaagtcacttacacaagaatcctaatttgaaatgctgcttccaggagacctgacttagaaaattggacaaataaagttgatttttttaaatgtccagtaacatgaagatgctgaactttcctagtcatttagggggaaatcaccacaaatatatctggctgatcaggttgaaagttaaaagaaaaaaagatttataaagtgggtattttcaagatggtgtggagggagatacaatttgatgcaagtcttatacttttgatgtcaatttattcttcagaaataactggttaattataaagggtggatggataaggatattcactgcaacaatgtcttaaatgtgaaaatggaaacaacctaaatacccaataataacaggattaaataattcattgtacattaaaagaatactgtctataaagatgtctagaataagttgttcagttgaagttgtaaagctaaatacacaatacccataatgtgcacagaaataatcagaatgtcatgaaaccagaaaaaaaaaaa

SEQ ID NO: 434807 - DNA, 2920 bp, Homo sapiens
gttctctttatttcctgtgaaggcgattgaccgaggcctggcttttgaacttgtctatagccctgctatcaaagactccacaatgagaaggtatacaatttccagtgccctcaatttgatgcaaatctgcaaaggaaagaatgtaattatatctagtgctgcagaaaggcctttagaaataagagggccatatgacgtggcaaatctaggcttgctgtttgggctctctgaaagtgacgccaaggctgcggtgtccaccaactgccgagcagcgcttctccatggagaaactagaaaaactgcttttggaattatctctacagtgaagaaacctcggccatcagaaggagatgaagattgtcttccagcttccaagaaagccaagtgtgagggctgaaaagaatgccccagtctctgtcagcactcccttcttcccttttatagttcatcagccacaacaaaaataaaacctttgtgtgatttactgttttcatttggagctagaaatcaatagtctataaaaacagttttacttgcaatccattaaaacaacaaacgaaacctagtgaagcatctttttaaaaggctgccagcttaatgaatttagatgtactttaagagagaaagactggttatttctcctttgtgtaagtgataaacaacagcaaatatacttgaataaaatgtttcaggtatttttgtttcattttgtttttgagatagggtctttgttgctcaggctggagtacagtggcataatcacagctcactgcaacctcaatcctgggctcaagtgatcctcccgcttcagcctctcaagcagcgggaactacaggtgtgcactaccacacctggctattttttttttttttttttttttcccttgtagagacatggtctcactatgttgctgaggctggtctcaaactcctaggatcaagccatcctcccgctttggcctcctaaagtgctgggattacatgagccaccacatgcagccagatgtttgaatattttaagagcttctttcgaaagtttcttgttcatactcaaatagtagttattttgaagatattcaaacttatattgaagaagtgactttagttcctcttgttttaagcttctttcatgtattcaaatcagcatttttttctaagaaattgctatagaatttgtggaaggagagaggatacacatgtaaaattacatctggtctcttccttcactgcttcatgcctacgtaaggtctttgaaataggattccttacttttagttagaaacccctaaaacgctaatattgattttcctgatagctgtattaaaaatagcaaagcatcggactgaaccaactttggaaataatttatttttataatgggatcatgttaagtagaagtagctttttatgcaaatacatgcatttatgcaatattaatgtaagggctctaaaacaatggagtagagccagaggtataactgaataagaaatttttttaagcaagagaaagacaactgttctgcgggttggagaaaatacaatttttttttttttttttgagacagtctcgctctgtcccccaggctggagtgcagtggctcgatctctgctcactgcaagctccgcctcctgggttcatgccattctcctgcctcagcctcctgagtagctgggactacaggcgctcgccatgtatttagcagagacggggtttcaccgtgttagccaggatggtctcaatctcctgacctcatattccacccgcctcggcctcccaaagtgctgggattacaggcgttagccactgcgcccggcccgagaaaatacagttttaaaaagagaaagctttataacctcaccaatgaatacaaatgtttaaataaaatattgattaaaaaaacattaaaagtgcatcatgaccaggtgaaatttattctttttttcttcttctttttgagacagggtctcactctgtcacccaggctggagtgcagtggcacaatctcggctcactgcaacctttgcctcttgggctcaagccatcctcccacctcagcctcccaagaactagaattcaacaaagacaacttttgatctctcatcagagagatcatactcccaagaacaggctttgacccttctttaaaagaggattgtcctgggctgatgagagtcactttacctgaagatacctgggaagttttgtctcctctgaggttggcccatggccagtgactgatgcaggacattacagcctggcccactggcctcggtggtacaatttatgctcctgagcaccccatgggattacgctgtgtgtggatttctcctgaaaccacatatttgcctcttctgccctgttctgttttttctcattcccttatagaggactctcagtaagtcacttacacaagaatcctaatttgaaatgctgcttccaggagacctgacttagaaaattggacaaataaagttgatttttttaaatgtccagtaacatgaagatgctgaactttcctagtcatttagggggaaatcaccacaaatatatctggctgatcaggttgaaagttaaaagaaaaaaagatttataaagtgggtattttcaagatggtgtggagggagatacaatttgatgcaagtcttatacttttgatgtcaatttattcttcagaaataactggttaattataaagggtggatggataaggatattcactgcaacaatgtcttaaatgtgaaaatggaaacaacctaaatacccaataataacaggattaaataattcattgtacattaaaagaatactgtctataaagatgtctagaataagttgttcagttgaagttgtaaagctaaatacacaatacccataatgtgcacagaaataatcagaatgtcatgaaaccagaaaaaaaaaaa

SEQ ID NO: 434808 - DNA, 3637 bp, Homo sapiens
  misc_feature (1)..(1): n is a, c, g, or t
ncacacacaaacgccttcttcccggagtattgaatagttgggaattggaacccctccagggggaaccaaacattgtcgttcagaagaagacaaagagagattgaaatgaagctgttgatttcaacacacaaattctggtggtagatgaaagcaaagcaagtaagtttctccgaatccctagtcaactggaggtagagacggactgcgcaggttaactacagctcccagcatgcctgaggggcgggctcagcggctgcgcagactggcgcgcgcggacggtcatgggacttcagcatggcggtgtttgcagatttggacctgcgagcgggttctgacctgaaggctctgcgcggacttgtggagacagccgctcaccgtgagttgccccggcttcgcgcctggccaacctcatgccacccagaccatcgggccacactccggattggctattcagttgttgctatcaatcatatcgttgactttaaggaaaagaaacaggaaattgaaaaaccagtagctgtttctgaactcttcacaactttgccaattgtacagggaaaatcaagaccaattaaaattttaactagattaacaattattgtctcggatccatctcactgcaatgttttgagagcaacttcttcaagggcccggctctatgatgttgttgcagtttttccaaagacagaaaagctttttcatattgcttgcacacatttagatgtggatttagtctgcataactgtaacagagaaactaccattttattgtctatagccctgctatcaaagactccacaatgagaaggtatacaatttccagtgccctcaatttgatgcaaatctgcaaaggaaagaatgtaattatatctagtgctgcagaaaggcctttagaaataagagggccatatgacgtggcaaatctaggcttgctgtttgggctctctgaaagtgacgccaaggctgcggtgtccaccaactgccgagcagcgcttctccatggagaaactagaaaaactgcttttggaattatctctacagtgaagaaacctcggccatcagaaggagatgaagattgtcttccagcttccaagaaagccaagtgtgagggctgaaaagaatgccccagtctctgtcagcactcccttcttcccttttatagttcatcagccacaacaaaaataaaacctttgtgtgatttactgttttcatttggagctagaaatcaatagtctataaaaacagttttacttgcaatccattaaaacaacaaacgaaacctagtgaagcatctttttaaaaggctgccagcttaatgaatttagatgtactttaagagagaaagactggttatttctcctttgtgtaagtgataaacaacagcaaatatacttgaataaaatgtttcaggtatttttgtttcattttgtttttgagatagggtctttgttgctcaggctggagtacagtggcataatcacagctcactgcaacctcaatcctgggctcaagtgatcctcccgcttcagcctctcaagcagcgggaactacaggtgtgcactaccacacctggctattttttttttttttttttttttcccttgtagagacatggtctcactatgttgctgaggctggtctcaaactcctaggatcaagccatcctcccgctttggcctcctaaagtgctgggattacatgagccaccacatgcagccagatgtttgaatattttaagagcttctttcgaaagtttcttgttcatactcaaatagtagttattttgaagatattcaaacttatattgaagaagtgactttagttcctcttgttttaagcttctttcatgtattcaaatcagcatttttttctaagaaattgctatagaatttgtggaaggagagaggatacacatgtaaaattacatctggtctcttccttcactgcttcatgcctacgtaaggtctttgaaataggattccttacttttagttagaaacccctaaaacgctaatattgattttcctgatagctgtattaaaaatagcaaagcatcggactgaaccaactttggaaataatttatttttataatgggatcatgttaagtagaagtagctttttatgcaaatacatgcatttatgcaatattaatgtaagggctctaaaacaatggagtagagccagaggtataactgaataagaaatttttttaagcaagagaaagacaactgttctgcgggttggagaaaatacaatttttttttttttttttgagacagtctcgctctgtcccccaggctggagtgcagtggctcgatctctgctcactgcaagctccgcctcctgggttcatgccattctcctgcctcagcctcctgagtagctgggactacaggcgctcgccatgtatttagcagagacggggtttcaccgtgttagccaggatggtctcaatctcctgacctcatattccacccgcctcggcctcccaaagtgctgggattacaggcgttagccactgcgcccggcccgagaaaatacagttttaaaaagagaaagctttataacctcaccaatgaatacaaatgtttaaataaaatattgattaaaaaaacattaaaagtgcatcatgaccaggtgaaatttattctttttttcttcttctttttgagacagggtctcactctgtcacccaggctggagtgcagtggcacaatctcggctcactgcaacctttgcctcttgggctcaagccatcctcccacctcagcctcccaagaactagaattcaacaaagacaacttttgatctctcatcagagagatcatactcccaagaacaggctttgacccttctttaaaagaggattgtcctgggctgatgagagtcactttacctgaagatacctgggaagttttgtctcctctgaggttggcccatggccagtgactgatgcaggacattacagcctggcccactggcctcggtggtacaatttatgctcctgagcaccccatgggattacgctgtgtgtggatttctcctgaaaccacatatttgcctcttctgccctgttctgttttttctcattcccttatagaggactctcagtaagtcacttacacaagaatcctaatttgaaatgctgcttccaggagacctgacttagaaaattggacaaataaagttgatttttttaaatgtccagtaacatgaagatgctgaactttcctagtcatttagggggaaatcaccacaaatatatctggctgatcaggttgaaagttaaaagaaaaaaagatttataaagtgggtattttcaagatggtgtggagggagatacaatttgatgcaagtcttatacttttgatgtcaatttattcttcagaaataactggttaattataaagggtggatggataaggatattcactgcaacaatgtcttaaatgtgaaaatggaaacaacctaaatacccaataataacaggattaaataattcattgtacattaaaagaatactgtctataaagatgtctagaataagttgttcagttgaagttgtaaagctaaatacacaatacccataatgtgcacagaaataatcagaatgtcatgaaaccagaaaaaaaaaaa

SEQ ID NO: 434809 - DNA, 1139 bp, Homo sapiens
  misc_feature (1)..(1): n is a, c, g, or t
  misc_feature (1023)..(1023): n is a, c, g, or t
ncacacacaaacgccttcttcccggagtattgaatagttgggaattggaacccctccagggggaaccaaacattgtcgttcagaagaagacaaagagagattgaaatgaagctgttgatttcaacacacaaattctggtggtagatgaaagcaaagcaagtaagtttctccgaatccctagtcaactggaggtagagacggactgcgcaggttaactacagctcccagcatgcctgaggggcgggctcagcggctgcgcagactggcgcgcgcggacggtcatgggacttcagcatggcggtgtttgcagatttggacctgcgagcgggttctgacctgaaggctctgcgcggacttgtggagacagccgctcaccttggctattcagttgttgctatcaatcatatcgttgactttaaggaaaagaaacaggaaattgaaaaaccagtagctgtttctgaactcttcacaactttgccaattgtacagggaaaatcaagaccaattaaaattttaactagattaacaattattgtctcggatccatctcactgcaatgttttgagagcaacttcttcaagggcccggctctatgatgttgttgcagtttttccaaagacagaaaagctttttcatattgcttgcacacatttagatgtggatttagtctgcataactgtaacagagaaactaccattttacttcaaaagacctcctattaatgtggcgattgaccgaggcctggcttttgaacttgtctatagccctgctatcaaagactccacaatgagaaggtatacaatttccagtgccctcaatttgatgcaaatctgcaaaggaaaggtatggttctataattttaggatgtttttcgcatctggcagtttattattagtagtacactggaattgtcaaactgactccttttccttaaagcagaatgttctcatagcataggaacaaattctgccatttcagtgagctctgcaaattttaagggaggaaaatcccaggagatatgtnggagaaagagtttggagcatttttgataaattgacttcttgggaaaagttaaaaaaggtgccgggtggattgccgtcgtggttaagatacttagatgtgaattgtgttgggttggt

SEQ ID NO: 434810 - DNA, 3796 bp, Homo sapiens
ttttcgtatattcttcctagatacaatattgtctcgatccatctcacgcaatgtttgaattcacacagtgtaatatgtctgttccacttactcatggcacatgtgtagtgataccacaattaaagaatcccttggcaactgttactcattgaactcacgtgcaccagacttaagagagcaacttcttcaagggcccggctctatgatgttgttgcagtttttccaaagacagaaaagctttttcatattgcttgcacacatttagatgtggatttagtctgcataactgtaacagagaaactaccattttacttcaaaagacctcctattaatgtggcgattgaccgaggcctggcttttgaacttgtctatagccctgctatcaaagactccacaatgagaaggtatacaatttccagtgccctcaatttgatgcaaatctgcaaaggaaaggtatggttctataattttaggatgtttttcgcatctggcagtttattattagtagtacactggaattgtcaaactgactccttttccttaaagcagaatgttctcatagcataggaacaaattctgccatttcagtgagctctgcaaattttaagggaaagaaaaataccaagggaagaataatgtaagggagaaaaagatgtgttggaagccatatcttttgataaaaatttgcaatttacatactgtgaaagaaaagtctagaataacaatggtcctcactgagttgaattaagatatgtgaccttttcatcttgttttttaaacttaattcacctttactaagatctgttaggaaaacatattttgttttttattacagattgcctttagtttgacatgaagtcttttcatttttttcaccttaattatttaccttatctttaaaagaagttggtatttgagccttaaatgttaaaatatgattactggctatttatattatgaaactcctttttttacatttatctaagattaatattagtcactttctattttgtagaatgtaattatatctagtgctgcagaaaggcctttagaaataagagggccatatgacgtggcaaatctaggcttgctgtttgggctctctgaaagtgacgccaaggctgcggtgtccaccaactgccgagcagcgcttctccatggagaaactagaaaaactgcttttggaattatctctacagtgaagaaacctcggccatcagaaggagatgaagattgtcttccagcttccaagaaagccaagtgtgagggctgaaaagaatgccccagtctctgtcagcactcccttcttcccttttatagttcatcagccacaacaaaaataaaacctttgtgtgatttactgttttcatttggagctagaaatcaatagtctataaaaacagttttacttgcaatccattaaaacaacaaacgaaacctagtgaagcatctttttaaaaggctgccagcttaatgaatttagatgtactttaagagagaaagactggttatttctcctttgtgtaagtgataaacaacagcaaatatacttgaataaaatgtttcaggtatttttgtttcattttgtttttgagatagggtctttgttgctcaggctggagtacagtggcataatcacagctcactgcaacctcaatcctgggctcaagtgatcctcccgcttcagcctctcaagcagcgggaactacaggtgtgcactaccacacctggctattttttttttttttttttttttcccttgtagagacatggtctcactatgttgctgaggctggtctcaaactcctaggatcaagccatcctcccgctttggcctcctaaagtgctgggattacatgagccaccacatgcagccagatgtttgaatattttaagagcttctttcgaaagtttcttgttcatactcaaatagtagttattttgaagatattcaaacttatattgaagaagtgactttagttcctcttgttttaagcttctttcatgtattcaaatcagcatttttttctaagaaattgctatagaatttgtggaaggagagaggatacacatgtaaaattacatctggtctcttccttcactgcttcatgcctacgtaaggtctttgaaataggattccttacttttagttagaaacccctaaaacgctaatattgattttcctgatagctgtattaaaaatagcaaagcatcggactgaaccaactttggaaataatttatttttataatgggatcatgttaagtagaagtagctttttatgcaaatacatgcatttatgcaatattaatgtaagggctctaaaacaatggagtagagccagaggtataactgaataagaaatttttttaagcaagagaaagacaactgttctgcgggttggagaaaatacaatttttttttttttttttgagacagtctcgctctgtcccccaggctggagtgcagtggctcgatctctgctcactgcaagctccgcctcctgggttcatgccattctcctgcctcagcctcctgagtagctgggactacaggcgctcgccatgtatttagcagagacggggtttcaccgtgttagccaggatggtctcaatctcctgacctcatattccacccgcctcggcctcccaaagtgctgggattacaggcgttagccactgcgcccggcccgagaaaatacagttttaaaaagagaaagctttataacctcaccaatgaatacaaatgtttaaataaaatattgattaaaaaaacattaaaagtgcatcatgaccaggtgaaatttattctttttttcttcttctttttgagacagggtctcactctgtcacccaggctggagtgcagtggcacaatctcggctcactgcaacctttgcctcttgggctcaagccatcctcccacctcagcctcccaagaactagaattcaacaaagacaacttttgatctctcatcagagagatcatactcccaagaacaggctttgacccttctttaaaagaggattgtcctgggctgatgagagtcactttacctgaagatacctgggaagttttgtctcctctgaggttggcccatggccagtgactgatgcaggacattacagcctggcccactggcctcggtggtacaatttatgctcctgagcaccccatgggattacgctgtgtgtggatttctcctgaaaccacatatttgcctcttctgccctgttctgttttttctcattcccttatagaggactctcagtaagtcacttacacaagaatcctaatttgaaatgctgcttccaggagacctgacttagaaaattggacaaataaagttgatttttttaaatgtccagtaacatgaagatgctgaactttcctagtcatttagggggaaatcaccacaaatatatctggctgatcaggttgaaagttaaaagaaaaaaagatttataaagtgggtattttcaagatggtgtggagggagatacaatttgatgcaagtcttatacttttgatgtcaatttattcttcagaaataactggttaattataaagggtggatggataaggatattcactgcaacaatgtcttaaatgtgaaaatggaaacaacctaaatacccaataataacaggattaaataattcattgtacattaaaagaatactgtctataaagatgtctagaataagttgttcagttgaagttgtaaagctaaatacacaatacccataatgtgcacagaaataatcagaatgtcatgaaaccagaaaaaaaaaaa

SEQ ID NO: 434811 - DNA, 2963 bp, Homo sapiens
tatataatcagtttttcttttatactgttacaaaatgcctttcaagcttctcttatattttcaaaagctatgaaacccatcaaaattataaggacttaaatttatgtaatttttttatttttggatacttaaattttctattaatttgctataagtcattgaaatgttataaataattttctcatatctactctttgttcattttatttcagcctttagaaataagagggccatatgacgtggcaaatctaggcttgctgtttgggctctctgaaagtgacgccaaggctgcggtgtccaccaactgccgagcagcgcttctccatggagaaactagaaaaactgcttttggaattatctctacagtgaagaaacctcggccatcagaaggagatgaagattgtcttccagcttccaagaaagccaagtgtgagggctgaaaagaatgccccagtctctgtcagcactcccttcttcccttttatagttcatcagccacaacaaaaataaaacctttgtgtgatttactgttttcatttggagctagaaatcaatagtctataaaaacagttttacttgcaatccattaaaacaacaaacgaaacctagtgaagcatctttttaaaaggctgccagcttaatgaatttagatgtactttaagagagaaagactggttatttctcctttgtgtaagtgataaacaacagcaaatatacttgaataaaatgtttcaggtatttttgtttcattttgtttttgagatagggtctttgttgctcaggctggagtacagtggcataatcacagctcactgcaacctcaatcctgggctcaagtgatcctcccgcttcagcctctcaagcagcgggaactacaggtgtgcactaccacacctggctattttttttttttttttttttttcccttgtagagacatggtctcactatgttgctgaggctggtctcaaactcctaggatcaagccatcctcccgctttggcctcctaaagtgctgggattacatgagccaccacatgcagccagatgtttgaatattttaagagcttctttcgaaagtttcttgttcatactcaaatagtagttattttgaagatattcaaacttatattgaagaagtgactttagttcctcttgttttaagcttctttcatgtattcaaatcagcatttttttctaagaaattgctatagaatttgtggaaggagagaggatacacatgtaaaattacatctggtctcttccttcactgcttcatgcctacgtaaggtctttgaaataggattccttacttttagttagaaacccctaaaacgctaatattgattttcctgatagctgtattaaaaatagcaaagcatcggactgaaccaactttggaaataatttatttttataatgggatcatgttaagtagaagtagctttttatgcaaatacatgcatttatgcaatattaatgtaagggctctaaaacaatggagtagagccagaggtataactgaataagaaatttttttaagcaagagaaagacaactgttctgcgggttggagaaaatacaatttttttttttttttttgagacagtctcgctctgtcccccaggctggagtgcagtggctcgatctctgctcactgcaagctccgcctcctgggttcatgccattctcctgcctcagcctcctgagtagctgggactacaggcgctcgccatgtatttagcagagacggggtttcaccgtgttagccaggatggtctcaatctcctgacctcatattccacccgcctcggcctcccaaagtgctgggattacaggcgttagccactgcgcccggcccgagaaaatacagttttaaaaagagaaagctttataacctcaccaatgaatacaaatgtttaaataaaatattgattaaaaaaacattaaaagtgcatcatgaccaggtgaaatttattctttttttcttcttctttttgagacagggtctcactctgtcacccaggctggagtgcagtggcacaatctcggctcactgcaacctttgcctcttgggctcaagccatcctcccacctcagcctcccaagaactagaattcaacaaagacaacttttgatctctcatcagagagatcatactcccaagaacaggctttgacccttctttaaaagaggattgtcctgggctgatgagagtcactttacctgaagatacctgggaagttttgtctcctctgaggttggcccatggccagtgactgatgcaggacattacagcctggcccactggcctcggtggtacaatttatgctcctgagcaccccatgggattacgctgtgtgtggatttctcctgaaaccacatatttgcctcttctgccctgttctgttttttctcattcccttatagaggactctcagtaagtcacttacacaagaatcctaatttgaaatgctgcttccaggagacctgacttagaaaattggacaaataaagttgatttttttaaatgtccagtaacatgaagatgctgaactttcctagtcatttagggggaaatcaccacaaatatatctggctgatcaggttgaaagttaaaagaaaaaaagatttataaagtgggtattttcaagatggtgtggagggagatacaatttgatgcaagtcttatacttttgatgtcaatttattcttcagaaataactggttaattataaagggtggatggataaggatattcactgcaacaatgtcttaaatgtgaaaatggaaacaacctaaatacccaataataacaggattaaataattcattgtacattaaaagaatactgtctataaagatgtctagaataagttgttcagttgaagttgtaaagctaaatacacaatacccataatgtgcacagaaataatcagaatgtcatgaaaccagaaaaaaaaaaa

SEQ ID NO: 434812 - DNA, 3078 bp, Homo sapiens
cagaggtaccttgatgttctaataagagagatagggtacatgctgtaaaatgaggcaagcatgtgctccacatgggagccatacacttgattgctgtgtttgctctcttgatttgtctgtctaccatatataaagtgtctgctacatcaatgtctgtgactgggttctggctacataagatgccatggacagaccattagagataacactgtcctgcagttttacccatgaggtaatctttaggaatgaattagatgttaataatatactgatatttgtgtctgttgggaaaaaaagataatgacggtaaatggcactagcagccatagcagttcattatggcttatcatttgctattgctgtaagccaaagtaatatgttaaaccacctcattttaaattatgtcttaacttcaagcacagtggtttccctgtttgttttacagaaactagaaaaactgcttttggaattatctctacagtgaagaaacctcggccatcagaaggagatgaagattgtcttccagcttccaagaaagccaagtgtgagggctgaaaagaatgccccagtctctgtcagcactcccttcttcccttttatagttcatcagccacaacaaaaataaaacctttgtgtgatttactgttttcatttggagctagaaatcaatagtctataaaaacagttttacttgcaatccattaaaacaacaaacgaaacctagtgaagcatctttttaaaaggctgccagcttaatgaatttagatgtactttaagagagaaagactggttatttctcctttgtgtaagtgataaacaacagcaaatatacttgaataaaatgtttcaggtatttttgtttcattttgtttttgagatagggtctttgttgctcaggctggagtacagtggcataatcacagctcactgcaacctcaatcctgggctcaagtgatcctcccgcttcagcctctcaagcagcgggaactacaggtgtgcactaccacacctggctattttttttttttttttttttttcccttgtagagacatggtctcactatgttgctgaggctggtctcaaactcctaggatcaagccatcctcccgctttggcctcctaaagtgctgggattacatgagccaccacatgcagccagatgtttgaatattttaagagcttctttcgaaagtttcttgttcatactcaaatagtagttattttgaagatattcaaacttatattgaagaagtgactttagttcctcttgttttaagcttctttcatgtattcaaatcagcatttttttctaagaaattgctatagaatttgtggaaggagagaggatacacatgtaaaattacatctggtctcttccttcactgcttcatgcctacgtaaggtctttgaaataggattccttacttttagttagaaacccctaaaacgctaatattgattttcctgatagctgtattaaaaatagcaaagcatcggactgaaccaactttggaaataatttatttttataatgggatcatgttaagtagaagtagctttttatgcaaatacatgcatttatgcaatattaatgtaagggctctaaaacaatggagtagagccagaggtataactgaataagaaatttttttaagcaagagaaagacaactgttctgcgggttggagaaaatacaatttttttttttttttttgagacagtctcgctctgtcccccaggctggagtgcagtggctcgatctctgctcactgcaagctccgcctcctgggttcatgccattctcctgcctcagcctcctgagtagctgggactacaggcgctcgccatgtatttagcagagacggggtttcaccgtgttagccaggatggtctcaatctcctgacctcatattccacccgcctcggcctcccaaagtgctgggattacaggcgttagccactgcgcccggcccgagaaaatacagttttaaaaagagaaagctttataacctcaccaatgaatacaaatgtttaaataaaatattgattaaaaaaacattaaaagtgcatcatgaccaggtgaaatttattctttttttcttcttctttttgagacagggtctcactctgtcacccaggctggagtgcagtggcacaatctcggctcactgcaacctttgcctcttgggctcaagccatcctcccacctcagcctcccaagaactagaattcaacaaagacaacttttgatctctcatcagagagatcatactcccaagaacaggctttgacccttctttaaaagaggattgtcctgggctgatgagagtcactttacctgaagatacctgggaagttttgtctcctctgaggttggcccatggccagtgactgatgcaggacattacagcctggcccactggcctcggtggtacaatttatgctcctgagcaccccatgggattacgctgtgtgtggatttctcctgaaaccacatatttgcctcttctgccctgttctgttttttctcattcccttatagaggactctcagtaagtcacttacacaagaatcctaatttgaaatgctgcttccaggagacctgacttagaaaattggacaaataaagttgatttttttaaatgtccagtaacatgaagatgctgaactttcctagtcatttagggggaaatcaccacaaatatatctggctgatcaggttgaaagttaaaagaaaaaaagatttataaagtgggtattttcaagatggtgtggagggagatacaatttgatgcaagtcttatacttttgatgtcaatttattcttcagaaataactggttaattataaagggtggatggataaggatattcactgcaacaatgtcttaaatgtgaaaatggaaacaacctaaatacccaataataacaggattaaataattcattgtacattaaaagaatactgtctataaagatgtctagaataagttgttcagttgaagttgtaaagctaaatacacaatacccataatgtgcacagaaataatcagaatgtcatgaaaccagaaaaaaaaaaa

SEQ ID NO: 434813 - DNA, 2882 bp, Homo sapiens
tagagttaaatgagtcttttctcagatgcatgttccagttggactaagaactgctgttgaattaattagcctctcaagatgaccaggttagctggcactttctgttatgtttgtgttagtctcgtgtccttgggtgactctgggttgaaatctttaatgctcccccaagaggcttgctgtttgggctctctgaaagtgacgccaaggctgcggtgtccaccaactgccgagcagcgcttctccatggagaaactagaaaaactgcttttggaattatctctacagtgaagaaacctcggccatcagaaggagatgaagattgtcttccagcttccaagaaagccaagtgtgagggctgaaaagaatgccccagtctctgtcagcactcccttcttcccttttatagttcatcagccacaacaaaaataaaacctttgtgtgatttactgttttcatttggagctagaaatcaatagtctataaaaacagttttacttgcaatccattaaaacaacaaacgaaacctagtgaagcatctttttaaaaggctgccagcttaatgaatttagatgtactttaagagagaaagactggttatttctcctttgtgtaagtgataaacaacagcaaatatacttgaataaaatgtttcaggtatttttgtttcattttgtttttgagatagggtctttgttgctcaggctggagtacagtggcataatcacagctcactgcaacctcaatcctgggctcaagtgatcctcccgcttcagcctctcaagcagcgggaactacaggtgtgcactaccacacctggctattttttttttttttttttttttcccttgtagagacatggtctcactatgttgctgaggctggtctcaaactcctaggatcaagccatcctcccgctttggcctcctaaagtgctgggattacatgagccaccacatgcagccagatgtttgaatattttaagagcttctttcgaaagtttcttgttcatactcaaatagtagttattttgaagatattcaaacttatattgaagaagtgactttagttcctcttgttttaagcttctttcatgtattcaaatcagcatttttttctaagaaattgctatagaatttgtggaaggagagaggatacacatgtaaaattacatctggtctcttccttcactgcttcatgcctacgtaaggtctttgaaataggattccttacttttagttagaaacccctaaaacgctaatattgattttcctgatagctgtattaaaaatagcaaagcatcggactgaaccaactttggaaataatttatttttataatgggatcatgttaagtagaagtagctttttatgcaaatacatgcatttatgcaatattaatgtaagggctctaaaacaatggagtagagccagaggtataactgaataagaaatttttttaagcaagagaaagacaactgttctgcgggttggagaaaatacaatttttttttttttttttgagacagtctcgctctgtcccccaggctggagtgcagtggctcgatctctgctcactgcaagctccgcctcctgggttcatgccattctcctgcctcagcctcctgagtagctgggactacaggcgctcgccatgtatttagcagagacggggtttcaccgtgttagccaggatggtctcaatctcctgacctcatattccacccgcctcggcctcccaaagtgctgggattacaggcgttagccactgcgcccggcccgagaaaatacagttttaaaaagagaaagctttataacctcaccaatgaatacaaatgtttaaataaaatattgattaaaaaaacattaaaagtgcatcatgaccaggtgaaatttattctttttttcttcttctttttgagacagggtctcactctgtcacccaggctggagtgcagtggcacaatctcggctcactgcaacctttgcctcttgggctcaagccatcctcccacctcagcctcccaagaactagaattcaacaaagacaacttttgatctctcatcagagagatcatactcccaagaacaggctttgacccttctttaaaagaggattgtcctgggctgatgagagtcactttacctgaagatacctgggaagttttgtctcctctgaggttggcccatggccagtgactgatgcaggacattacagcctggcccactggcctcggtggtacaatttatgctcctgagcaccccatgggattacgctgtgtgtggatttctcctgaaaccacatatttgcctcttctgccctgttctgttttttctcattcccttatagaggactctcagtaagtcacttacacaagaatcctaatttgaaatgctgcttccaggagacctgacttagaaaattggacaaataaagttgatttttttaaatgtccagtaacatgaagatgctgaactttcctagtcatttagggggaaatcaccacaaatatatctggctgatcaggttgaaagttaaaagaaaaaaagatttataaagtgggtattttcaagatggtgtggagggagatacaatttgatgcaagtcttatacttttgatgtcaatttattcttcagaaataactggttaattataaagggtggatggataaggatattcactgcaacaatgtcttaaatgtgaaaatggaaacaacctaaatacccaataataacaggattaaataattcattgtacattaaaagaatactgtctataaagatgtctagaataagttgttcagttgaagttgtaaagctaaatacacaatacccataatgtgcacagaaataatcagaatgtcatgaaaccagaaaaaaaaaaa

SEQ ID NO: 434814 - DNA, 1446 bp, Homo sapiens
atggcaaaaccccgtctctactaaaaatacaaaatcagccaggcatggtggcccatgactgtaatccctgctactcgggaggctgaggcaggaaaattgcttgaacccgggaggtagaggttgcactgagctgagatcgcaccactgcattccagtctgggcgacagaatgagactctgtctaaaaaaaagaaagtaccaactattttattatttattacttcattatattaatttaaatattgaagtgtcagctatcatttaggaaaaaactaagtcaaatctctatctcacacccaatacacacccatagtaaatccaggtagattaaagatttaaattttttaacaaacttgtaaaatactagaggaaaatgtaagttaattaaaaaaataataatcttggattgcaatagacctgccgagcatggtcatcaaagccagaaaacaaagtttgattgatttgtctctacataacaacaagtaggaaagtacatttacaatacatattccaggaaggtttcatatgcttagcttttaagaattttttttttttaaatacccaacatgacatgctgttagcatccatagagatccccattcccagggtggtgtacctatattgccagtgcttcagatgttgggtactaatgacttatcttcacccttttccagaggattgtcctgggctgatgagagtcactttacctgaagatacctgggaagttttgtctcctctgaggttggcccatggccagtgactgatgcaggacattacagcctggcccactggcctcggtggtacaatttatgctcctgagcaccccatgggattacgctgtgtgtggatttctcctgaaaccacatatttgcctcttctgccctgttctgttttttctcattcccttatagaggactctcagtaagtcacttacacaagaatcctaatttgaaatgctgcttccaggagacctgacttagaaaattggacaaataaagttgatttttttaaatgtccagtaacatgaagatgctgaactttcctagtcatttagggggaaatcaccacaaatatatctggctgatcaggttgaaagttaaaagaaaaaaagatttataaagtgggtattttcaagatggtgtggagggagatacaatttgatgcaagtcttatacttttgatgtcaatttattcttcagaaataactggttaattataaagggtggatggataaggatattcactgcaacaatgtcttaaatgtgaaaatggaaacaacctaaatacccaataataacaggattaaataattcattgtacattaaaagaatactgtctataaagatgtctagaataagttgttcagttgaagttgtaaagctaaatacacaatacccataatgtgcacagaaataatcagaatgtcatgaaaccagaaaaaaaaaaa

SEQ ID NO: 434815 - DNA, 4375 bp, Homo sapiens
gagctggaattcccttcccgcctggcgccgcccgggagagcccgcgcgaggacgcccgccgcgctccgccggcccttttttggcgctgagggaaaggagaagggcagggccgccgcctcgcgggagcgggccccgggaggaggggccgccggagaggccgggcgagcgcgggcggccctcacctcgccgctcctcccgggccgccatccctcggcgccccgcccggaaccggcgcgcgcgtaggggctgggaggccggcgcgcagatctggcggtgagcgctgccgccccggggcccccagccatgtcggccgaggagatggtgcagatccgcctggaggaccgctgctacccggtgagcaagaggaagctcatcgagcagagcaactacttccgcgccctctaccgctccggcatgcgcgaggccctgagccaggaggccggcggcccggaggtgcagcagctgcgcggcctcagcgcgccgggcctgcggctggtgctggacttcatcaacgccggcggggcccgcgaaggctggctcctgggcccgcgcggggaaaagggcggcggggtggacgaggacgaggagatggatgaggtgagcctgctgtccgagctggtggaggcggcctccttcctgcaggtcacgtccctgctgcagctgctgctgtcccaggtgcggctcaataactgcctggagatgtaccgcctggcgcaggtgtacgggctgcccgacctgcaggaggcctgcctgcgcttcatggtcgtccacttccacgaggtgctgtgcaagccccagttccacctcctggggtctcctccccaagctccaggggatgtcagcctgaagcagaggctgagggaggcccggatgactgggactcctgtcctcgtggccctcggggacttcctggggggacccctggcccctcacccctaccagggggagcccccgtccatgctcaggtacgaggagatgactgagcgttggttcccgctggccaacaaccttcctcccgacctggtcaatgtcaggggctatgggtctgccatcctggacaactacctcttcatagtgggcgggtacaggatcactagccaggagatctccgctgcgcattcctacaaccccagcaccaacgagtggctccaggtggcctccatgaaccagaagaggtctaacttcaaacttgtggctgttaattcaaaactctatgccatcggagggcaggccgtttctaacgttgagtgttacaaccccgagcaggatgcgtggaattttgtggcgcccttacccaatcctctggctgagttctctgcctgtgagtgtaagggaaaaatttatgtcattggaggatacactaccagagaccggaacatgaacattttgcagtactgcccctcttccgacatgtggacgctctttgaaacatgtgacgtccacattcgcaagcagcagatggtgtctgtggaagagaccatctacatcgtgggggggtgtctccacgagctggggcccaaccgcaggagcagccagagcgaggacatgctcaccgtgcagtcctacaacaccgtcacccgccagtggctctacctcaaggagaacacgtccaaatcgggtcttaacttgacttgtgcgctccataacgacggcatctacatcatgagcagagacgtcaccctgtcgaccagcttggaacaccgagtgttcctcaagtacaacatcttttcagatagttgggaagcatttcggcgttttccagcttttggacataacttgctggtttcttctctttatctgcccaataaagcagaaacatgactgaattgaattggtagatgaaaaaaacctggttcaagttttttttaaaatgtggtgtcccattccaagggagaccaattcctaaagggtaaagaagggttaaagtaggtcacatatatacagtagcagctgtaaataagcttacttgaactaattacttgaaaactggtggaaaaaagagaccaactttgttattttttaaattattgatttttaaattatgggagcaaatccatctccaaacatgatactcttgggccaatgacggatcatcaaaatgtagattcattgtgtctgtgtggtaaagggccaaagtcaataattgggacaaatggtaaagatgattttaaaatctgttgtatttaggtcccttgacatatcattagcaccttaagtgagaggttttctttttcttatcagtgtccttgacaagcattcatattaacatattcattctctcttctccatcacccatacccacacatacatctagtatgtttagggttctgtgttcagatattttgtttgcacactactttttaggaaacttataatgatggagccctacagtgaatccttaccagtgttcagtcctccccaaaacttgcataaaaatattcttagctatttttccagccttttttgcagttacaaatgctggataaatagactgataaaacctcttattttatttatgtggcaggttgcatatttatgtggacacataggttgcactgctaggcattctgtattgttttaaagaggatatattatttagaaaaatggacatatgaatattattaaaaattgagtcttaaatttaaatgggaagggaagaaaacaccaaataagaaaaaaatttgcctttaagagttacttttgttgaatgtatttgacttagttcttattttaaggctaaaaaaactttgtcatatttaagtcggcagctttctaatttaatcttagctttgtaattcatgttttgcttttgtggactaaggtaaggacagcatttaaatatttgtgctggagtgaggggaagaagctgttacagaagtggaatggtttctggtggtatttctgaagttaggtaaagtgctttacttgccttggttgttaattgaaatagaattcagctcaagcagttgttttcagtgagtgagttaacaataaaagcttctgccaatcatagatcaacattcctcaaaaatacatacactcatacttatggaaattttattttgattgaaaacactctgaaattatctgatattttgtaatggcatcagttaaactgtgagctggattccatctttctgcagtaacagcgggcagaaccatttcagttagcatgtgcctcactttaagaaagtcctgtaggggaaaaaaaaaactgtcagagcgaattcatgcattcaacaaacacttatgagtgcctggagtatgccgtccactgtgcagatgtaggacaggggctaatcacttagagttcttcagtttattagaggagtgactacaggttttctttacaaccatggcctctagtatacttaaaataagcgtccagttataaaaagcctatttgcacaactttttgggaatacttctattaactaaaatgaggtaagccattattttggacatagaaacagatctttgtatcttgtcaccaaataatcttacctctagtctacttacaactttgtaagggtttctaagctatgcccatttattcccaaatattaagcccttaaaaaaataaaacctctgaaccaaaatcttcccaggaatagtacttaatagattttaatgttaatttatattcattgtagaattgaatttccagtgacctgtaatttcattacatatattttaaaatctatttattttagatggtgttaacttttcgttgctgaagagcttaactttttaaaggctttgtcctatacatttagaagatgagtcagttgaattagtactggacaaacagttggagattagtttgcaaataagcatatcatatcaaatacaatattccagccaaccagttaattctcttcctggttacattcattgggtctatttgcctaatgttgacaattagattcttggaccaagtgagggtgtactctgatccacaaagctcttttataaaccaggtttgaggttgtgtgtgtgtgtgtgtgtgtgtgtgtgtgtgtgtgtgtgtgtgtgtatgtttgcatattatagctctctttaagacagacatctaaaaagattttggttattctgggctgccagcagtacgtgggaaaggtggaatgtgcaataggaacagatctgtgcattttgtgacatcgtccttcctgctgtgcacatcagctgtgatgacattttgagggtagttttaatttagctcggttctcttgttggtgccagtattacattgaagactacctatgatagaggcaatgttgctttgaaaatctcccttcaggcggaggttgcagtgagccgagattgtgccattgcactccagcctgggcgacagtgcaagactctgtctccaaaa

SEQ ID NO: 434816 - DNA, 4018 bp, Homo sapiens
agcggcggagccggcgcgccccgggcgggcggagaggctgcggggacgcgcgccctccgcctcccgcagctgcgcgtccgcagccgaggcgcccgggcccgcagcttcccgggcctcagcgcgccgggcctgcggctggtgctggacttcatcaacgccggcggggcccgcgaaggctggctcctgggcccgcgcggggaaaagggcggcggggtggacgaggacgaggagatggatgaggtgagcctgctgtccgagctggtggaggcggcctccttcctgcaggtcacgtccctgctgcagctgctgctgtcccaggtgcggctcaataactgcctggagatgtaccgcctggcgcaggtgtacgggctgcccgacctgcaggaggcctgcctgcgcttcatggtcgtccacttccacgaggtgctgtgcaagccccagttccacctcctggggtctcctccccaagctccaggggatgtcagcctgaagcagaggctgagggaggcccggatgactgggactcctgtcctcgtggccctcggggacttcctggggggacccctggcccctcacccctaccagggggagcccccgtccatgctcaggtacgaggagatgactgagcgttggttcccgctggccaacaaccttcctcccgacctggtcaatgtcaggggctatgggtctgccatcctggacaactacctcttcatagtgggcgggtacaggatcactagccaggagatctccgctgcgcattcctacaaccccagcaccaacgagtggctccaggtggcctccatgaaccagaagaggtctaacttcaaacttgtggctgttaattcaaaactctatgccatcggagggcaggccgtttctaacgttgagtgttacaaccccgagcaggatgcgtggaattttgtggcgcccttacccaatcctctggctgagttctctgcctgtgagtgtaagggaaaaatttatgtcattggaggatacactaccagagaccggaacatgaacattttgcagtactgcccctcttccgacatgtggacgctctttgaaacatgtgacgtccacattcgcaagcagcagatggtgtctgtggaagagaccatctacatcgtgggggggtgtctccacgagctggggcccaaccgcaggagcagccagagcgaggacatgctcaccgtgcagtcctacaacaccgtcacccgccagtggctctacctcaaggagaacacgtccaaatcgggtcttaacttgacttgtgcgctccataacgacggcatctacatcatgagcagagacgtcaccctgtcgaccagcttggaacaccgagtgttcctcaagtacaacatcttttcagatagttgggaagcatttcggcgttttccagcttttggacataacttgctggtttcttctctttatctgcccaataaagcagaaacatgactgaattgaattggtagatgaaaaaaacctggttcaagttttttttaaaatgtggtgtcccattccaagggagaccaattcctaaagggtaaagaagggttaaagtaggtcacatatatacagtagcagctgtaaataagcttacttgaactaattacttgaaaactggtggaaaaaagagaccaactttgttattttttaaattattgatttttaaattatgggagcaaatccatctccaaacatgatactcttgggccaatgacggatcatcaaaatgtagattcattgtgtctgtgtggtaaagggccaaagtcaataattgggacaaatggtaaagatgattttaaaatctgttgtatttaggtcccttgacatatcattagcaccttaagtgagaggttttctttttcttatcagtgtccttgacaagcattcatattaacatattcattctctcttctccatcacccatacccacacatacatctagtatgtttagggttctgtgttcagatattttgtttgcacactactttttaggaaacttataatgatggagccctacagtgaatccttaccagtgttcagtcctccccaaaacttgcataaaaatattcttagctatttttccagccttttttgcagttacaaatgctggataaatagactgataaaacctcttattttatttatgtggcaggttgcatatttatgtggacacataggttgcactgctaggcattctgtattgttttaaagaggatatattatttagaaaaatggacatatgaatattattaaaaattgagtcttaaatttaaatgggaagggaagaaaacaccaaataagaaaaaaatttgcctttaagagttacttttgttgaatgtatttgacttagttcttattttaaggctaaaaaaactttgtcatatttaagtcggcagctttctaatttaatcttagctttgtaattcatgttttgcttttgtggactaaggtaaggacagcatttaaatatttgtgctggagtgaggggaagaagctgttacagaagtggaatggtttctggtggtatttctgaagttaggtaaagtgctttacttgccttggttgttaattgaaatagaattcagctcaagcagttgttttcagtgagtgagttaacaataaaagcttctgccaatcatagatcaacattcctcaaaaatacatacactcatacttatggaaattttattttgattgaaaacactctgaaattatctgatattttgtaatggcatcagttaaactgtgagctggattccatctttctgcagtaacagcgggcagaaccatttcagttagcatgtgcctcactttaagaaagtcctgtaggggaaaaaaaaaactgtcagagcgaattcatgcattcaacaaacacttatgagtgcctggagtatgccgtccactgtgcagatgtaggacaggggctaatcacttagagttcttcagtttattagaggagtgactacaggttttctttacaaccatggcctctagtatacttaaaataagcgtccagttataaaaagcctatttgcacaactttttgggaatacttctattaactaaaatgaggtaagccattattttggacatagaaacagatctttgtatcttgtcaccaaataatcttacctctagtctacttacaactttgtaagggtttctaagctatgcccatttattcccaaatattaagcccttaaaaaaataaaacctctgaaccaaaatcttcccaggaatagtacttaatagattttaatgttaatttatattcattgtagaattgaatttccagtgacctgtaatttcattacatatattttaaaatctatttattttagatggtgttaacttttcgttgctgaagagcttaactttttaaaggctttgtcctatacatttagaagatgagtcagttgaattagtactggacaaacagttggagattagtttgcaaataagcatatcatatcaaatacaatattccagccaaccagttaattctcttcctggttacattcattgggtctatttgcctaatgttgacaattagattcttggaccaagtgagggtgtactctgatccacaaagctcttttataaaccaggtttgaggttgtgtgtgtgtgtgtgtgtgtgtgtgtgtgtgtgtgtgtgtgtgtgtatgtttgcatattatagctctctttaagacagacatctaaaaagattttggttattctgggctgccagcagtacgtgggaaaggtggaatgtgcaataggaacagatctgtgcattttgtgacatcgtccttcctgctgtgcacatcagctgtgatgacattttgagggtagttttaatttagctcggttctcttgttggtgccagtattacattgaagactacctatgatagaggcaatgttgctttgaaaatctcccttcaggcggaggttgcagtgagccgagattgtgccattgcactccagcctgggcgacagtgcaagactctgtctccaaaa

SEQ ID NO: 434817 - DNA, 4478 bp, Homo sapiens
gagctggaattcccttcccgcctggcgccgcccgggagagcccgcgcgaggacgcccgccgcgctccgccggcccttttttggcgctgagggaaaggagaagggcagggccgccgcctcgcgggagcgggccccgggaggaggggccgccggagaggccgggcgagcgcgggcggccctcacctcgccgctcctcccgggccgccatccctcggcgccccgcccggaaccggcgcgcgcgtaggggctgggaggccggcgcgcagatctggcggtgagcgctgccgccccggggcccccagccatgtcggccgaggagatggtgcagatccgcctggaggaccgctgctacccggtgagcaagaggaagctcatcgagcagagcaactacttccgcgccctctaccgctccggcatgcgcgaggccctgagccaggaggccggcggcccggaggtgcagcagctgcgcggcctcagcgcgccgggcctgcggctggtgctggacttcatcaacgccggcggggcccgcgaaggctggctcctgggcccgcgcggggaaaagggcggcggggtggacgaggacgaggagatggatgaggtgagcctgctgtccgagctggtggaggcggcctccttcctgcaggtcacgtccctgctgcagctgctgctgtcccaggtgcggctcaataactgcctggagatgtaccgcctggcgcaggtgtacgggctgcccgacctgcaggaggcctgcctgcgcttcatggtcgtccacttccacgaggtgctgtgcaagccccagttccacctcctggggtctcctccccaagctccaggggatgtcagcctgaagcagaggctgagggaggcccggatgactgggactcctgtcctcgtggccctcggggacttcctggggggacccctggcccctcacccctaccagggggagcccccgtccatgctcaggtacgaggagatgactgagcgttggttcccgctggccaacaaccttcctcccgacctggtcaatgtcaggggctatgggtctgccatcctggacaactacctcttcatagtgggcgggtacaggatcactagccaggagatctccgctgcgcattcctacaaccccagcaccaacgagtggctccaggtggcctccatgaaccagaagaggtctaacttcaaacttgtggctgttaattcaaaactctatgccatcggagggcaggccgtttctaacgttgagtgttacaaccccgagcaggatgcgtggaattttgtggcgcccttacccaatcctctggctgagttctctgcctgtgagtgtaagggaaaaatttatgtcattggaggatacactaccagagacagcctctggagatcctgtgttgctacttgtcatgtttcttaggatcagctatcaagaataatctacttgctgcccagcctggcttctgtattaagtagtcgaccggaacatgaacattttgcagtactgcccctcttccgacatgtggacgctctttgaaacatgtgacgtccacattcgcaagcagcagatggtgtctgtggaagagaccatctacatcgtgggggggtgtctccacgagctggggcccaaccgcaggagcagccagagcgaggacatgctcaccgtgcagtcctacaacaccgtcacccgccagtggctctacctcaaggagaacacgtccaaatcgggtcttaacttgacttgtgcgctccataacgacggcatctacatcatgagcagagacgtcaccctgtcgaccagcttggaacaccgagtgttcctcaagtacaacatcttttcagatagttgggaagcatttcggcgttttccagcttttggacataacttgctggtttcttctctttatctgcccaataaagcagaaacatgactgaattgaattggtagatgaaaaaaacctggttcaagttttttttaaaatgtggtgtcccattccaagggagaccaattcctaaagggtaaagaagggttaaagtaggtcacatatatacagtagcagctgtaaataagcttacttgaactaattacttgaaaactggtggaaaaaagagaccaactttgttattttttaaattattgatttttaaattatgggagcaaatccatctccaaacatgatactcttgggccaatgacggatcatcaaaatgtagattcattgtgtctgtgtggtaaagggccaaagtcaataattgggacaaatggtaaagatgattttaaaatctgttgtatttaggtcccttgacatatcattagcaccttaagtgagaggttttctttttcttatcagtgtccttgacaagcattcatattaacatattcattctctcttctccatcacccatacccacacatacatctagtatgtttagggttctgtgttcagatattttgtttgcacactactttttaggaaacttataatgatggagccctacagtgaatccttaccagtgttcagtcctccccaaaacttgcataaaaatattcttagctatttttccagccttttttgcagttacaaatgctggataaatagactgataaaacctcttattttatttatgtggcaggttgcatatttatgtggacacataggttgcactgctaggcattctgtattgttttaaagaggatatattatttagaaaaatggacatatgaatattattaaaaattgagtcttaaatttaaatgggaagggaagaaaacaccaaataagaaaaaaatttgcctttaagagttacttttgttgaatgtatttgacttagttcttattttaaggctaaaaaaactttgtcatatttaagtcggcagctttctaatttaatcttagctttgtaattcatgttttgcttttgtggactaaggtaaggacagcatttaaatatttgtgctggagtgaggggaagaagctgttacagaagtggaatggtttctggtggtatttctgaagttaggtaaagtgctttacttgccttggttgttaattgaaatagaattcagctcaagcagttgttttcagtgagtgagttaacaataaaagcttctgccaatcatagatcaacattcctcaaaaatacatacactcatacttatggaaattttattttgattgaaaacactctgaaattatctgatattttgtaatggcatcagttaaactgtgagctggattccatctttctgcagtaacagcgggcagaaccatttcagttagcatgtgcctcactttaagaaagtcctgtaggggaaaaaaaaaactgtcagagcgaattcatgcattcaacaaacacttatgagtgcctggagtatgccgtccactgtgcagatgtaggacaggggctaatcacttagagttcttcagtttattagaggagtgactacaggttttctttacaaccatggcctctagtatacttaaaataagcgtccagttataaaaagcctatttgcacaactttttgggaatacttctattaactaaaatgaggtaagccattattttggacatagaaacagatctttgtatcttgtcaccaaataatcttacctctagtctacttacaactttgtaagggtttctaagctatgcccatttattcccaaatattaagcccttaaaaaaataaaacctctgaaccaaaatcttcccaggaatagtacttaatagattttaatgttaatttatattcattgtagaattgaatttccagtgacctgtaatttcattacatatattttaaaatctatttattttagatggtgttaacttttcgttgctgaagagcttaactttttaaaggctttgtcctatacatttagaagatgagtcagttgaattagtactggacaaacagttggagattagtttgcaaataagcatatcatatcaaatacaatattccagccaaccagttaattctcttcctggttacattcattgggtctatttgcctaatgttgacaattagattcttggaccaagtgagggtgtactctgatccacaaagctcttttataaaccaggtttgaggttgtgtgtgtgtgtgtgtgtgtgtgtgtgtgtgtgtgtgtgtgtgtgtatgtttgcatattatagctctctttaagacagacatctaaaaagattttggttattctgggctgccagcagtacgtgggaaaggtggaatgtgcaataggaacagatctgtgcattttgtgacatcgtccttcctgctgtgcacatcagctgtgatgacattttgagggtagttttaatttagctcggttctcttgttggtgccagtattacattgaagactacctatgatagaggcaatgttgctttgaaaatctcccttcaggcggaggttgcagtgagccgagattgtgccattgcactccagcctgggcgacagtgcaagactctgtctccaaaa

SEQ ID NO: 434818 - DNA, 4770 bp, Homo sapiens
gatgtgtatatttatgtatttaaggagaggcaagacaaagagaagtgaccttttttttttcccactccaagttttcattatttgtcgagctattcccaatgtccctctctggtgactctccactgaagatagttttcaactttttctttacatataattgaaaaagtgattataggtttagactaagccatgggcccctcagtccccctgaactcctgtgtttatgtagtaatccccctctctcgtgtgtgtgtgtatatgtgtgtgtcttttcttctaggaaagtcaatactcccagttatttacctatgagcaattctaagaattctgattcctctctaggttgagtaacacagactgcatcttgtgggctgacataacgcacatatgtgctttgacttctcttgtaaccaagagctgttcaacactgacaggcggcactgtaacccaaagagtactttactggtagatttcctagtttttccatgaccctggctgagcaaatgttctttagatttgacctagaaaacccttcttgtgtgttttgtaacctcacaagccactgctaatgtaccttcttcacttgggccacccaccgtgatttctgtcctggattccctgagccaaatacccatgatgggatggttcagtgatgtggatggatggctatttgtgtaagggccgaaaactagttttctaagatgggagagctgggcagttacttatactctgaagcccttctctttctctgctggggctttcccagcagttcctaatagttccttgtatttcagataagtcatcatgattgttaggaaaaaaagaaaagaaaaagttagtttttagcctcctgacttcttaagtcaagtgagacttctaaaatttagtaaataatagctcattatttttatggtagctatttgattattttaattctttagcagcactgaagaaattcagagaagttcaatagagagtaatagctataaagggaagaagggtgatttgtcaaacttcagaatcaactttaaatgtaaaaacaaaaagatcattccaccaactcaggccaccttgttgagtgaagagagaaaacatttacagaacacctggaaagaccttcgggcctggagctgagaaatacgtggaagcctcactagaatgagttctttattggttcggtggacagccaggttactaaggagcactttttgttaaataagtgaccaaaatccccttgggccatctcctaaaatgatctttatcataatagctacagtaaaaagaaagaaggagaggtattaatgtgggtggaaatcaggacagtttcctaatgccgtggcttacaattctgagatttctccaggcatcaggacatgtgcgcgcacaggacttggctctcttaggagatacttcagtttgtatcagatgtggctgtggagggtgctctttaagcattgctaactatgagtgggtccctctcagaaggaaggactgtaagaggtatgaaacttctgagaaaacgagctgtcttctcttaccaagcgcctgcagccgtcaaaatgctgtaggctttagtcgtctgccagttcccaagctgagctgtctccttcatggataggatttgtttgtttagaaacaacaacaaagttcattctgtttataactcagagcatttgttttttctgctgaggctaaaatacttgtttattctttcctagtggtgttagtggaggcggtgtcatcacttgtctttctttctttcagaccggaacatgaacattttgcagtactgcccctcttccgacatgtggacgctctttgaaacatgtgacgtccacattcgcaagcagcagatggtgtctgtggaagagaccatctacatcgtgggggggtgtctccacgagctggggcccaaccgcaggagcagccagagcgaggacatgctcaccgtgcagtcctacaacaccgtcacccgccagtggctctacctcaaggagaacacgtccaaatcgggtcttaacttgacttgtgcgctccataacgacggcatctacatcatgagcagagacgtcaccctgtcgaccagcttggaacaccgagtgttcctcaagtacaacatcttttcagatagttgggaagcatttcggcgttttccagcttttggacataacttgctggtttcttctctttatctgcccaataaagcagaaacatgactgaattgaattggtagatgaaaaaaacctggttcaagttttttttaaaatgtggtgtcccattccaagggagaccaattcctaaagggtaaagaagggttaaagtaggtcacatatatacagtagcagctgtaaataagcttacttgaactaattacttgaaaactggtggaaaaaagagaccaactttgttattttttaaattattgatttttaaattatgggagcaaatccatctccaaacatgatactcttgggccaatgacggatcatcaaaatgtagattcattgtgtctgtgtggtaaagggccaaagtcaataattgggacaaatggtaaagatgattttaaaatctgttgtatttaggtcccttgacatatcattagcaccttaagtgagaggttttctttttcttatcagtgtccttgacaagcattcatattaacatattcattctctcttctccatcacccatacccacacatacatctagtatgtttagggttctgtgttcagatattttgtttgcacactactttttaggaaacttataatgatggagccctacagtgaatccttaccagtgttcagtcctccccaaaacttgcataaaaatattcttagctatttttccagccttttttgcagttacaaatgctggataaatagactgataaaacctcttattttatttatgtggcaggttgcatatttatgtggacacataggttgcactgctaggcattctgtattgttttaaagaggatatattatttagaaaaatggacatatgaatattattaaaaattgagtcttaaatttaaatgggaagggaagaaaacaccaaataagaaaaaaatttgcctttaagagttacttttgttgaatgtatttgacttagttcttattttaaggctaaaaaaactttgtcatatttaagtcggcagctttctaatttaatcttagctttgtaattcatgttttgcttttgtggactaaggtaaggacagcatttaaatatttgtgctggagtgaggggaagaagctgttacagaagtggaatggtttctggtggtatttctgaagttaggtaaagtgctttacttgccttggttgttaattgaaatagaattcagctcaagcagttgttttcagtgagtgagttaacaataaaagcttctgccaatcatagatcaacattcctcaaaaatacatacactcatacttatggaaattttattttgattgaaaacactctgaaattatctgatattttgtaatggcatcagttaaactgtgagctggattccatctttctgcagtaacagcgggcagaaccatttcagttagcatgtgcctcactttaagaaagtcctgtaggggaaaaaaaaaactgtcagagcgaattcatgcattcaacaaacacttatgagtgcctggagtatgccgtccactgtgcagatgtaggacaggggctaatcacttagagttcttcagtttattagaggagtgactacaggttttctttacaaccatggcctctagtatacttaaaataagcgtccagttataaaaagcctatttgcacaactttttgggaatacttctattaactaaaatgaggtaagccattattttggacatagaaacagatctttgtatcttgtcaccaaataatcttacctctagtctacttacaactttgtaagggtttctaagctatgcccatttattcccaaatattaagcccttaaaaaaataaaacctctgaaccaaaatcttcccaggaatagtacttaatagattttaatgttaatttatattcattgtagaattgaatttccagtgacctgtaatttcattacatatattttaaaatctatttattttagatggtgttaacttttcgttgctgaagagcttaactttttaaaggctttgtcctatacatttagaagatgagtcagttgaattagtactggacaaacagttggagattagtttgcaaataagcatatcatatcaaatacaatattccagccaaccagttaattctcttcctggttacattcattgggtctatttgcctaatgttgacaattagattcttggaccaagtgagggtgtactctgatccacaaagctcttttataaaccaggtttgaggttgtgtgtgtgtgtgtgtgtgtgtgtgtgtgtgtgtgtgtgtgtgtgtatgtttgcatattatagctctctttaagacagacatctaaaaagattttggttattctgggctgccagcagtacgtgggaaaggtggaatgtgcaataggaacagatctgtgcattttgtgacatcgtccttcctgctgtgcacatcagctgtgatgacattttgagggtagttttaatttagctcggttctcttgttggtgccagtattacattgaagactacctatgatagaggcaatgttgctttgaaaatctcccttcaggcggaggttgcagtgagccgagattgtgccattgcactccagcctgggcgacagtgcaagactctgtctccaaaa

SEQ ID NO: 434819 - DNA, 3586 bp, Homo sapiens
attctcgggagccttaaacctggggtgatgtgtgtgccttcccctcttacccttgtgcctgcccctgaaagaaagtgtggagttcagtgtatacacattgtctttggttgctggactaaggctgaacaagattaataacttgttgtattgaactgcttatcttcgatagctagtgtttggacagtgtgccattcccgtggaatcttggggacaggagtgagattcgagaagccatcctttcctcctctgtcctcaggcggaatggcccccaactgggagagcgaattttcttcagatgttcaggagagtctagtagttcatgccattgttacacttttcatcgatcagaagaactaactctgtgggcctttgtgtctctctttcaggtctaacttcaaacttgtggctgttaattcaaaactctatgccatcggagggcaggccgtttctaacgttgagtgttacaaccccgagcaggatgcgtggaattttgtggcgcccttacccaatcctctggctgagttctctgcctgtgagtgtaagggaaaaatttatgtcattggaggatacactaccagagaccggaacatgaacattttgcagtactgcccctcttccgacatgtggacgctctttgaaacatgtgacgtccacattcgcaagcagcagatggtgtctgtggaagagaccatctacatcgtgggggggtgtctccacgagctggggcccaaccgcaggagcagccagagcgaggacatgctcaccgtgcagtcctacaacaccgtcacccgccagtggctctacctcaaggagaacacgtccaaatcgggtcttaacttgacttgtgcgctccataacgacggcatctacatcatgagcagagacgtcaccctgtcgaccagcttggaacaccgagtgttcctcaagtacaacatcttttcagatagttgggaagcatttcggcgttttccagcttttggacataacttgctggtttcttctctttatctgcccaataaagcagaaacatgactgaattgaattggtagatgaaaaaaacctggttcaagttttttttaaaatgtggtgtcccattccaagggagaccaattcctaaagggtaaagaagggttaaagtaggtcacatatatacagtagcagctgtaaataagcttacttgaactaattacttgaaaactggtggaaaaaagagaccaactttgttattttttaaattattgatttttaaattatgggagcaaatccatctccaaacatgatactcttgggccaatgacggatcatcaaaatgtagattcattgtgtctgtgtggtaaagggccaaagtcaataattgggacaaatggtaaagatgattttaaaatctgttgtatttaggtcccttgacatatcattagcaccttaagtgagaggttttctttttcttatcagtgtccttgacaagcattcatattaacatattcattctctcttctccatcacccatacccacacatacatctagtatgtttagggttctgtgttcagatattttgtttgcacactactttttaggaaacttataatgatggagccctacagtgaatccttaccagtgttcagtcctccccaaaacttgcataaaaatattcttagctatttttccagccttttttgcagttacaaatgctggataaatagactgataaaacctcttattttatttatgtggcaggttgcatatttatgtggacacataggttgcactgctaggcattctgtattgttttaaagaggatatattatttagaaaaatggacatatgaatattattaaaaattgagtcttaaatttaaatgggaagggaagaaaacaccaaataagaaaaaaatttgcctttaagagttacttttgttgaatgtatttgacttagttcttattttaaggctaaaaaaactttgtcatatttaagtcggcagctttctaatttaatcttagctttgtaattcatgttttgcttttgtggactaaggtaaggacagcatttaaatatttgtgctggagtgaggggaagaagctgttacagaagtggaatggtttctggtggtatttctgaagttaggtaaagtgctttacttgccttggttgttaattgaaatagaattcagctcaagcagttgttttcagtgagtgagttaacaataaaagcttctgccaatcatagatcaacattcctcaaaaatacatacactcatacttatggaaattttattttgattgaaaacactctgaaattatctgatattttgtaatggcatcagttaaactgtgagctggattccatctttctgcagtaacagcgggcagaaccatttcagttagcatgtgcctcactttaagaaagtcctgtaggggaaaaaaaaaactgtcagagcgaattcatgcattcaacaaacacttatgagtgcctggagtatgccgtccactgtgcagatgtaggacaggggctaatcacttagagttcttcagtttattagaggagtgactacaggttttctttacaaccatggcctctagtatacttaaaataagcgtccagttataaaaagcctatttgcacaactttttgggaatacttctattaactaaaatgaggtaagccattattttggacatagaaacagatctttgtatcttgtcaccaaataatcttacctctagtctacttacaactttgtaagggtttctaagctatgcccatttattcccaaatattaagcccttaaaaaaataaaacctctgaaccaaaatcttcccaggaatagtacttaatagattttaatgttaatttatattcattgtagaattgaatttccagtgacctgtaatttcattacatatattttaaaatctatttattttagatggtgttaacttttcgttgctgaagagcttaactttttaaaggctttgtcctatacatttagaagatgagtcagttgaattagtactggacaaacagttggagattagtttgcaaataagcatatcatatcaaatacaatattccagccaaccagttaattctcttcctggttacattcattgggtctatttgcctaatgttgacaattagattcttggaccaagtgagggtgtactctgatccacaaagctcttttataaaccaggtttgaggttgtgtgtgtgtgtgtgtgtgtgtgtgtgtgtgtgtgtgtgtgtgtgtatgtttgcatattatagctctctttaagacagacatctaaaaagattttggttattctgggctgccagcagtacgtgggaaaggtggaatgtgcaataggaacagatctgtgcattttgtgacatcgtccttcctgctgtgcacatcagctgtgatgacattttgagggtagttttaatttagctcggttctcttgttggtgccagtattacattgaagactacctatgatagaggcaatgttgctttgaaaatctcccttcaggcggaggttgcagtgagccgagattgtgccattgcactccagcctgggcgacagtgcaagactctgtctccaaaa

SEQ ID NO: 434820 - DNA, 3325 bp, Homo sapiens
tacactgacctggtggttcaaaggtgtggggataccagggaggaggggctgtgtgaaagtcagagctgcgctttttcctggttttatccagtctgagtctcccacggaagagacgtttgggagtgggaggtgagtgcggatggatctaaatatatctcttcccagccactttgaaaactgtttttctaacttgtgctttttctgaaagagttttttctctttgttaccaaattatgcaggcagaggtagacatttctgtacagacttgcctagtggtgttagtggaggcggtgtcatcacttgtctttctttctttcagaccggaacatgaacattttgcagtactgcccctcttccgacatgtggacgctctttgaaacatgtgacgtccacattcgcaagcagcagatggtgtctgtggaagagaccatctacatcgtgggggggtgtctccacgagctggggcccaaccgcaggagcagccagagcgaggacatgctcaccgtgcagtcctacaacaccgtcacccgccagtggctctacctcaaggagaacacgtccaaatcgggtcttaacttgacttgtgcgctccataacgacggcatctacatcatgagcagagacgtcaccctgtcgaccagcttggaacaccgagtgttcctcaagtacaacatcttttcagatagttgggaagcatttcggcgttttccagcttttggacataacttgctggtttcttctctttatctgcccaataaagcagaaacatgactgaattgaattggtagatgaaaaaaacctggttcaagttttttttaaaatgtggtgtcccattccaagggagaccaattcctaaagggtaaagaagggttaaagtaggtcacatatatacagtagcagctgtaaataagcttacttgaactaattacttgaaaactggtggaaaaaagagaccaactttgttattttttaaattattgatttttaaattatgggagcaaatccatctccaaacatgatactcttgggccaatgacggatcatcaaaatgtagattcattgtgtctgtgtggtaaagggccaaagtcaataattgggacaaatggtaaagatgattttaaaatctgttgtatttaggtcccttgacatatcattagcaccttaagtgagaggttttctttttcttatcagtgtccttgacaagcattcatattaacatattcattctctcttctccatcacccatacccacacatacatctagtatgtttagggttctgtgttcagatattttgtttgcacactactttttaggaaacttataatgatggagccctacagtgaatccttaccagtgttcagtcctccccaaaacttgcataaaaatattcttagctatttttccagccttttttgcagttacaaatgctggataaatagactgataaaacctcttattttatttatgtggcaggttgcatatttatgtggacacataggttgcactgctaggcattctgtattgttttaaagaggatatattatttagaaaaatggacatatgaatattattaaaaattgagtcttaaatttaaatgggaagggaagaaaacaccaaataagaaaaaaatttgcctttaagagttacttttgttgaatgtatttgacttagttcttattttaaggctaaaaaaactttgtcatatttaagtcggcagctttctaatttaatcttagctttgtaattcatgttttgcttttgtggactaaggtaaggacagcatttaaatatttgtgctggagtgaggggaagaagctgttacagaagtggaatggtttctggtggtatttctgaagttaggtaaagtgctttacttgccttggttgttaattgaaatagaattcagctcaagcagttgttttcagtgagtgagttaacaataaaagcttctgccaatcatagatcaacattcctcaaaaatacatacactcatacttatggaaattttattttgattgaaaacactctgaaattatctgatattttgtaatggcatcagttaaactgtgagctggattccatctttctgcagtaacagcgggcagaaccatttcagttagcatgtgcctcactttaagaaagtcctgtaggggaaaaaaaaaactgtcagagcgaattcatgcattcaacaaacacttatgagtgcctggagtatgccgtccactgtgcagatgtaggacaggggctaatcacttagagttcttcagtttattagaggagtgactacaggttttctttacaaccatggcctctagtatacttaaaataagcgtccagttataaaaagcctatttgcacaactttttgggaatacttctattaactaaaatgaggtaagccattattttggacatagaaacagatctttgtatcttgtcaccaaataatcttacctctagtctacttacaactttgtaagggtttctaagctatgcccatttattcccaaatattaagcccttaaaaaaataaaacctctgaaccaaaatcttcccaggaatagtacttaatagattttaatgttaatttatattcattgtagaattgaatttccagtgacctgtaatttcattacatatattttaaaatctatttattttagatggtgttaacttttcgttgctgaagagcttaactttttaaaggctttgtcctatacatttagaagatgagtcagttgaattagtactggacaaacagttggagattagtttgcaaataagcatatcatatcaaatacaatattccagccaaccagttaattctcttcctggttacattcattgggtctatttgcctaatgttgacaattagattcttggaccaagtgagggtgtactctgatccacaaagctcttttataaaccaggtttgaggttgtgtgtgtgtgtgtgtgtgtgtgtgtgtgtgtgtgtgtgtgtgtgtatgtttgcatattatagctctctttaagacagacatctaaaaagattttggttattctgggctgccagcagtacgtgggaaaggtggaatgtgcaataggaacagatctgtgcattttgtgacatcgtccttcctgctgtgcacatcagctgtgatgacattttgagggtagttttaatttagctcggttctcttgttggtgccagtattacattgaagactacctatgatagaggcaatgttgctttgaaaatctcccttcaggcggaggttgcagtgagccgagattgtgccattgcactccagcctgggcgacagtgcaagactctgtctccaaaa

SEQ ID NO: 434821 - DNA, 2490 bp, Homo sapiens
gagctggaattcccttcccgcctggcgccgcccgggagagcccgcgcgaggacgcccgccgcgctccgccggcccttttttggcgctgagggaaaggagaagggcagggccgccgcctcgcgggagcgggccccgggaggaggggccgccggagaggccgggcgagcgcgggcggccctcacctcgccgctcctcccgggccgccatccctcggcgccccgcccggaaccggcgcgcgcgtaggggctgggaggccggcgcgcagatctggcggtgagcgctgccgccccggggcccccagccatgtcggccgaggagatggtgcagatccgcctggaggaccgctgctacccggtgagcaagaggaagctcatcgagcagagcaactacttccgcgccctctaccgctccggcatgcgcgaggccctgagccaggaggccggcggcccggaggtgcagcagctgcgcggcctcagcgcgccgggcctgcggctggtgctggacttcatcaacgccggcggggcccgcgaaggctggctcctgggcccgcgcggggaaaagggcggcggggtggacgaggacgaggagatggatgaggtgagcctgctgtccgagctggtggaggcggcctccttcctgcaggtcacgtccctgctgcagctgctgctgtcccaggtgcggctcaataactgcctggagatgtaccgcctggcgcaggtgtacgggctgcccgacctgcaggaggcctgcctgcgcttcatggtcgtccacttccacgaggtgctgtgcaagccccagttccacctcctggggtctcctccccaagctccaggggatgtcagcctgaagcagaggctgagggaggcccggatgactgggactcctgtcctcgtggccctcggggacttcctggggggacccctggcccctcacccctaccagggggagcccccgtccatgctcaggtacgaggagatgactgagcgttggttcccgctggccaacaaccttcctcccgacctggtcaatgtcaggggctatgggtctgccatcctggacaactacctcttcatagtgggcgggtacaggatcactagccaggagatctccgctgcgcattcctacaaccccagcaccaacgagtggctccaggtggcctccatgaaccagaagaggtctaacttcaaacttgtggctgttaattcaaaactctatgccatcggagggcaggccgtttctaacgttgagtgttacaaccccgagcaggatgcgtggaattttgtggcgcccttacccaatcctctggctgagttctctgcctgtgagtgtaagggaaaaatttatgtcattggaggatacactaccagagaccggaacatgaacattttgcagtactgcccctcttccgacatgtggacgctctttgaaacatgtgacgtccacattcgcaagcagcagatggtgtctgtggaagagaccatctacatcgtgggggggtgtctccacgagctggggcccaaccgcaggagcagccagagcgaggacatgctcaccgtgcagtcctacaacaccgtcacccgccagtggctctacctcaaggagaacacgtccaaatcgggtcttaacttgacttgtgcgctccataacgacggcatctacatcatgagcagagacgtcaccctgtcgaccagcttggaacaccgagtgttcctcaagtacaacatcttttcagatagttgggaagcatttcggcgttttccagcttttggacataacttgctggtttcttctctttatctgcccaataaagcagaaacatgactgaattgaattggtagatgaaaaaaacctggttcaagttttttttaaaatgtggtgtcccattccaagggagaccaattcctaaagggtaaagaagggttaaagtaggtcacatatatacagtagcagctgtaaataagcttacttgaactaattacttgaaaactggtggaaaaaagagaccaactttgttattttttaaattattgatttttaaattatgggagcaaatccatctccaaacatgatactcttgggccaatgacggatcatcaaaatgtagattcattgtgtctgtgtggtaaagggccaaagtcaataattgggacaaatggtaaagatgattttaaaatctgttgtatttaggtcccttgacatatcattagcaccttaagtgagaggttttctttttcttatcagtgtccttgacaagcattcatattaacatattcattctctcttctccatcacccatacccacacatacatctagtatgtttagggttctgtgttcagatattttgtttgcacactactttttaggaaacttataatgatggagccctacagtgaatccttaccagtgttcagtcctccccaaaacttgcataaaaatattcttagctatttttccagcctgggcgacagtgcaagactctgtctccaaaa

SEQ ID NO: 434822 - DNA, 2344 bp, Homo sapiens
gatgtgtatatttatgtatttaaggagaggcaagacaaagagaagtgaccttttttttttcccactccaagttttcattatttgtcgagctattcccaatgtccctctctggtgactctccactgaagatagttttcaactttttctttacatataattgaaaaagtgattataggtttagactaagccatgggcccctcagtccccctgaactcctgtgtttatgtagtaatccccctctctcgtgtgtgtgtgtatatgtgtgtgtcttttcttctaggaaagtcaatactcccagttatttacctatgagcaattctaagaattctgattcctctctaggttgagtaacacagactgcatcttgtgggctgacataacgcacatatgtgctttgacttctcttgtaaccaagagctgttcaacactgacaggcggcactgtaacccaaagagtactttactggtagatttcctagtttttccatgaccctggctgagcaaatgttctttagatttgacctagaaaacccttcttgtgtgttttgtaacctcacaagccactgctaatgtaccttcttcacttgggccacccaccgtgatttctgtcctggattccctgagccaaatacccatgatgggatggttcagtgatgtggatggatggctatttgtgtaagggccgaaaactagttttctaagatgggagagctgggcagttacttatactctgaagcccttctctttctctgctggggctttcccagcagttcctaatagttccttgtatttcagataagtcatcatgattgttaggaaaaaaagaaaagaaaaagttagtttttagcctcctgacttcttaagtcaagtgagacttctaaaatttagtaaataatagctcattatttttatggtagctatttgattattttaattctttagcagcactgaagaaattcagagaagttcaatagagagtaatagctataaagggaagaagggtgatttgtcaaacttcagaatcaactttaaatgtaaaaacaaaaagatcattccaccaactcaggccaccttgttgagtgaagagagaaaacatttacagaacacctggaaagaccttcgggcctggagctgagaaatacgtggaagcctcactagaatgagttctttattggttcggtggacagccaggttactaaggagcactttttgttaaataagtgaccaaaatccccttgggccatctcctaaaatgatctttatcataatagctacagtaaaaagaaagaaggagaggtattaatgtgggtggaaatcaggacagtttcctaatgccgtggcttacaattctgagatttctccaggcatcaggacatgtgcgcgcacaggacttggctctcttaggagatacttcagtttgtatcagatgtggctgtggagggtgctctttaagcattgctaactatgagtgggtccctctcagaaggaaggactgtaagaggtatgaaacttctgagaaaacgagctgtcttctcttaccaagcgcctgcagccgtcaaaatgctgtaggctttagtcgtctgccagttcccaagctgagctgtctccttcatggataggatttgtttgtttagaaacaacaacaaagttcattctgtttataactcagagcatttgttttttctgctgaggctaaaatacttgtttattctttcctagtggtgttagtggaggcggtgtcatcacttgtctttctttctttcagaccggaacatgaacattttgcagtactgcccctcttccgacatgtggacgctctttgaaacatgtgacgtccacattcgcaagcagcagatggtgtctgtggaagagaccatctacatcgtgggggggtgtctccacgagctggggcccaaccgcaggagcagccagagcgaggacatgctcaccgtgcagtcctacaacaccgtcacccgccagtggctctacctcaaggagaacacgtccaaatcgggtcttaacttgacttgtgcgctccataacgacggcatctacatcatgagcagagacgtcaccctgtcgaccagcttggaacaccgagtgttcctcaagtacaacatcttttcagatagttgggaagcatttcggcgttttccagcttttggacataacttgctggtttcttctctttatctgcccaataaagcagaaacatgactgaattgaattggtaaaaaacaaaccaaacagttctcaccatgattgtgaatggtaacttggggggggcccggtaccaaattccccttatagggagggtttaaaaataccggcccgagttttcaacg

SEQ ID NO: 434823 - DNA, 1871 bp, Homo sapiens
gatgtgtatatttatgtatttaaggagaggcaagacaaagagaagtgaccttttttttttcccactccaagttttcattatttgtcgagctattcccaatgtccctctctggtgactctccactgaagatagttttcaactttttctttacatataattgaaaaagtgattataggtttagactaagccatgggcccctcagtccccctgaactcctgtgtttatgtagtaatccccctctctcgtgtgtgtgtgtatatgtgtgtgtcttttcttctaggaaagtcaatactcccagttatttacctatgagcaattctaagaattctgattcctctctaggttgagtaacacagactgcatcttgtgggctgacataacgcacatatgtgctttgacttctcttgtaaccaagagctgttcaacactgacaggcggcactgtaacccaaagagtactttactggtagatttcctagtttttccatgaccctggctgagcaaatgttctttagatttgacctagaaaacccttcttgtgtgttttgtaacctcacaagccactgctaatgtaccttcttcacttgggccacccaccgtgatttctgtcctggattccctgagccaaatacccatgatgggatggttcagtgatgtggatggatggctatttgtgtaagggccgaaaactagttttctaagatgggagagctgggcagttacttatactctgaagcccttctctttctctgctggggctttcccagcagttcctaatagttccttgtatttcagataagtcatcatgattgttaggaaaaaaagaaaagaaaaagttagtttttagcctcctgacttcttaagtcaagtgagacttctaaaatttagtaaataatagctcattatttttatggtagctatttgattattttaattctttagcagcactgaagaaattcagagaagttcaatagagagtaatagctataaagggaagaagggtgatttgtcaaacttcagaatcaactttaaatgtaaaaacaaaaagatcattccaccaactcaggccaccttgttgagtgaagagagaaaacatttacagaacacctggaaagaccttcgggcctggagctgagaaatacgtggaagcctcactagaatgagttctttattggttcggtggacagccaggttactaaggagcactttttgttaaataagtgaccaaaatccccttgggccatctcctaaaatgatctttatcataatagctacagtaaaaagaaagaaggagaggtattaatgtgggtggaaatcaggacagtttcctaatgccgtggcttacaattctgagatttctccaggcatcaggacatgtgcgcgcacaggacttggctctcttaggagatacttcagtttgtatcagatgtggctgtggagggtgctctttaagcattgctaactatgagtgggtccctctcagaaggaaggactgtaagaggtatgaaacttctgagaaaacgagctgtcttctcttaccaagcgcctgcagccgtcaaaatgctgtaggctttagtcgtctgccagttcccaagctgagctgtctccttcatggataggatttgtttgtttagaaacaacaacaaagttcattctgtttataactcagagcatttgttttttctgctgaggctaaaatacttgtttattctttcctagaggagaaaagaaaaagagaacaattaaaaacaagaaaaacaaaactagatattctaaatttcacaagcgtttttcaaaaagagacgaggccatatttttccttaaagaaaattactttttttttgacagagtgagacccagtctctaaaataa

SEQ ID NO: 434824 - DNA, 2321 bp, Homo sapiens
gatgtgtatatttatgtatttaaggagaggcaagacaaagagaagtgaccttttttttttcccactccaagttttcattatttgtcgagctattcccaatgtccctctctggtgactctccactgaagatagttttcaactttttctttacatataattgaaaaagtgattataggtttagactaagccatgggcccctcagtccccctgaactcctgtgtttatgtagtaatccccctctctcgtgtgtgtgtgtatatgtgtgtgtcttttcttctaggaaagtcaatactcccagttatttacctatgagcaattctaagaattctgattcctctctaggttgagtaacacagactgcatcttgtgggctgacataacgcacatatgtgctttgacttctcttgtaaccaagagctgttcaacactgacaggcggcactgtaacccaaagagtactttactggtagatttcctagtttttccatgaccctggctgagcaaatgttctttagatttgacctagaaaacccttcttgtgtgttttgtaacctcacaagccactgctaatgtaccttcttcacttgggccacccaccgtgatttctgtcctggattccctgagccaaatacccatgatgggatggttcagtgatgtggatggatggctatttgtgtaagggccgaaaactagttttctaagatgggagagctgggcagttacttatactctgaagcccttctctttctctgctggggctttcccagcagttcctaatagttccttgtatttcagataagtcatcatgattgttaggaaaaaaagaaaagaaaaagttagtttttagcctcctgacttcttaagtcaagtgagacttctaaaatttagtaaataatagctcattatttttatggtagctatttgattattttaattctttagcagcactgaagaaattcagagaagttcaatagagagtaatagctataaagggaagaagggtgatttgtcaaacttcagaatcaactttaaatgtaaaaacaaaaagatcattccaccaactcaggccaccttgttgagtgaagagagaaaacatttacagaacacctggaaagaccttcgggcctggagctgagaaatacgtggaagcctcactagaatgagttctttattggttcggtggacagccaggttactaaggagcactttttgttaaataagtgaccaaaatccccttgggccatctcctaaaatgatctttatcataatagctacagtaaaaagaaagaaggagaggtattaatgtgggtggaaatcaggacagtttcctaatgccgtggcttacaattctgagatttctccaggcatcaggacatgtgcgcgcacaggacttggctctcttaggagatacttcagtttgtatcagatgtggctgtggagggtgctctttaagcattgctaactatgagtgggtccctctcagaaggaaggactgtaagaggtatgaaacttctgagaaaacgagctgtcttctcttaccaagcgcctgcagccgtcaaaatgctgtaggctttagtcgtctgccagttcccaagctgagctgtctccttcatggataggatttgtttgtttagaaacaacaacaaagttcattctgtttataactcagagcatttgttttttctgctgaggctaaaatacttgtttattctttcctagaggagaaaagaaaaagagaacaattaaaaacaagaaaaacaaaactagatattctaaatttcacaagcgtttttcaaaaagagacgaggccatatttttccttaaagaaaattacttttttttttgagagaacaggatctcactctgtcaccctggctggaatgcagtgacatgatcacagctcactgcagcctcaccctaccatgctaaagtgatcctcccacctcagccttccaagtagcagctggtaccataggtgcacaccaccatgcctggctaattttttattttttttagagacaggaggtctcaccatattgcccaggctggtctcgaacccctaggctcaagtgatcctcctgcttcagcccacccaaagagttgggattacaggcatgagacaccatgcttggccgaaaatcattattaattaaaaatgtcagagcaaccttttatctagacgttgatcttatctacgctacaactgtcatcttgtgagggacatgggaaatgggaaaagggagaggggaggacctttgttagtgtctctctggtgatataatggggaaactaaggctaggcatggtaaagatcctgtcttta

SEQ ID NO: 434825 - DNA, 1462 bp, Homo sapiens
gagctggaattcccttcccgcctggcgccgcccgggagagcccgcgcgaggacgcccgccgcgctccgccggcccttttttggcgctgagggaaaggagaagggcagggccgccgcctcgcgggagcgggccccgggaggaggggccgccggagaggccgggcgagcgcgggcggccctcacctcgccgctcctcccgggccgccatccctcggcgccccgcccggaaccggcgcgcgcgtaggggctgggaggccggcgcgcagatctggcggtgagcgctgccgccccggggcccccagccatgtcggccgaggagatggtgcagatccgcctggaggaccgctgctacccggtgagcaagaggaagctcatcgagcagagcaactacttccgcgccctctaccgctccggcatgcgcgaggccctgagccaggaggccggcggcccggaggtgcagcagctgcgcggcctcagcgcgccgggcctgcggctggtgctggacttcatcaacgccggcggggcccgcgaaggctggctcctgggcccgcgcggggaaaagggcggcggggtggacgaggacgaggagatggatgaggtgagcctgctgtccgagctggtggaggcggcctccttcctgcaggtcacgtccctgctgcagctgctgctgtcccaggtgcggctcaataactgcctggagatgtaccgcctggcgcaggtgtacgggctgcccgacctgcaggaggcctgcctgcgcttcatggtcgtccacttccacgaggtgctgtgcaagccccagttccacctcctggggtctcctccccaagctccaggggatgtcagcctgaagcagaggctgagggaggcccggatgactgggactcctgtcctcgtggccctcggggacttcctggggggacccctggcccctcacccctaccagggggagcccccgtccatgctcaggtacgaggagatgactgagcgttggttcccgctggccaacaaccttcctcccgacctggtcaatgtcaggggctatgggtctgccatcctggacaactacctcttcatagtgggcgggtacaggatcactagccaggagatctccgctgcgcattcctacaaccccagcaccaacgagtggctccaggtggcctccatgaaccagaagaggtctaacttcaaacttgtggctgttaattcaaaactctatgccatcggagggcaggccgtttctaacgttgagtgttacaaccccgagcaggatgcgtggaattttgtggcgcccttacccaatcctctggctgagttctctgcctgtgagtgtaagggaaaaatttatgtcattggaggatacactaccagaggtaagtgaagggaccaggtaggtggtctgcccatgtgtaggcgtcagcagtctgggaagggcaagagggtgtcagaggaagccccgacatatc

SEQ ID NO: 434826 - DNA, 2182 bp, Homo sapiens
gatgtgtatatttatgtatttaaggagaggcaagacaaagagaagtgaccttttttttttcccactccaagttttcattatttgtcgagctattcccaatgtccctctctggtgactctccactgaagatagttttcaactttttctttacatataattgaaaaagtgattataggtttagactaagccatgggcccctcagtccccctgaactcctgtgtttatgtagtaatccccctctctcgtgtgtgtgtgtatatgtgtgtgtcttttcttctaggaaagtcaatactcccagttatttacctatgagcaattctaagaattctgattcctctctaggttgagtaacacagactgcatcttgtgggctgacataacgcacatatgtgctttgacttctcttgtaaccaagagctgttcaacactgacaggcggcactgtaacccaaagagtactttactggtagatttcctagtttttccatgaccctggctgagcaaatgttctttagatttgacctagaaaacccttcttgtgtgttttgtaacctcacaagccactgctaatgtaccttcttcacttgggccacccaccgtgatttctgtcctggattccctgagccaaatacccatgatgggatggttcagtgatgtggatggatggctatttgtgtaagggccgaaaactagttttctaagatgggagagctgggcagttacttatactctgaagcccttctctttctctgctggggctttcccagcagttcctaatagttccttgtatttcagataagtcatcatgattgttaggaaaaaaagaaaagaaaaagttagtttttagcctcctgacttcttaagtcaagtgagacttctaaaatttagtaaataatagctcattatttttatggtagctatttgattattttaattctttagcagcactgaagaaattcagagaagttcaatagagagtaatagctataaagggaagaagggtgatttgtcaaacttcagaatcaactttaaatgtaaaaacaaaaagatcattccaccaactcaggccaccttgttgagtgaagagagaaaacatttacagaacacctggaaagaccttcgggcctggagctgagaaatacgtggaagcctcactagaatgagttctttattggttcggtggacagccaggttactaaggagcactttttgttaaataagtgaccaaaatccccttgggccatctcctaaaatgatctttatcataatagctacagtaaaaagaaagaaggagaggtattaatgtgggtggaaatcaggacagtttcctaatgccgtggcttacaattctgagatttctccaggcatcaggacatgtgcgcgcacaggacttggctctcttaggagatacttcagtttgtatcagatgtggctgtggagggtgctctttaagcattgctaactatgagtgggtccctctcagaaggaaggactgtaagaggtatgaaacttctgagaaaacgagctgtcttctcttaccaagcgcctgcagccgtcaaaatgctgtaggctttagtcgtctgccagttcccaagctgagctgtctccttcatggataggatttgtttgtttagaaacaacaacaaagttcattctgtttataactcagagcatttgttttttctgctgaggctaaaatacttgtttattctttcctagaggagaaaagaaaaagagaacaattaaaaacaagaaaaacaaaactagatattctaaatttcacaagcgtttttcaaaaagagacgaggccatatttttccttaaagaaaattacttttttttttgagagaacaggatctcactctgtcaccctggctggaatgcagtgacatgatcacagctcactgcagcctcaccctaccatgctcaagtgatcctcctgcttcagcccacccaaagagttgggattacaggcatgagacaccatgcttggccgaaaatcattattaattaaaaatgtcagagcaaccttttatctagacgttgatcttatctacgctacaactgtcatcttgtgagggacatgggaaatgggaaaagggagaggggaggacctttgttagtgtctctctggtgatataatggggaaactaaggctaggcatggtaaagatcctgtcttta

SEQ ID NO: 434827 - DNA, 438 bp, Homo sapiens
cccactccaagttttcattatttgtcgagctattcccaatgtccctctctggtgactctccactgaagatagttttcaactttttctttacatataattgaaaaaaaaaaaaagaaacttagtagtcattgctttgaccttcaacactggttgtcaggttacagtgattataggtttagactaagccatgggcccctcagtccccctgaactcctgtgtttatgtagtaatccccctctctcgtgtgtgtgtgtatatgtgtgtgtcttttcttctaggaaagtcaatactcccagttatttacctatgagcaattctaagaattctgattcctctctaggttgagtaacacagactgcatcttgtgggctgacataacgcacatatgtgctttgacttctcttgtaaccaagagctgttcaacactgacaggcggca

SEQ ID NO: 434828 - DNA, 381 bp, Homo sapiens
ctttttgttaaataagtgaccaaaatccccttgggccatctcctaaaatgatctttatcataatagctacagtaaaaagaaagaaggagaggtattaatgtgggtggaaatcaggacagtttcctaatgccgtggcttacaattctgagatttctccaggcatcaggacatgtgcgcgcacaggacttggctctcttaggagatacttcagtttgtatcagatgtggctgtggagggtgctctttaagcattgctaactatgagtgggtccctctcagaaggaaggactgtaagaggtatgaaacttctgagaaaacgagctgtcttctcttaccaagcgcctgcagccgtcaaaatgctgtaggctttagtcgtctgcca

SEQ ID NO: 434829 - DNA, 702 bp, Homo sapiens
ctcccatgcaaacagacagtgagtggaggacaccagcaaagtaataaggaatgtttcaaaaggatatgatgaactgaggcttatcgagtcagggagcagaaagctgaaataagaccgctaagctctaaacaaatccgttaaagcttcacagggcagagccagaacaaaaatagtatactcaatgtatagtcggaaagcagccgaagaagtgaagcgagaactgataaagttaaaagtgaactattacattctagaagagtcatggtgtgtaagaagatccaagcctggttgcagtatgcctgaaatttgggatgtagaagatcctgccaatgctgggaaaactcccttatgtaacctcttggtgaaggattccaaacctcacttcaccactgtattccagaacagtgtttacaaagtcctagaagttgtaaaagaatgactgctacatgacctgctgcctacggagaactacatctatgactagacattcactttgcaaataattgttgtgactctatgtttgctccagacacagagcttttattgtcacccaaagatgcctatgggaaccaaaagaatcaagctgaaccaagatttctgccagaatcaatttcctcaagccagaaggctttatcattcagtctgtgcaacggatttttttttaaataaaaacagacttctttgttgatttctccctttacc

SEQ ID NO: 434830 - DNA, 4447 bp, Homo sapiens
cccccttgtcattaatacattaaaaagattcaatctttaccctgaggtaattttggccagttggtaccggatttataccaaaataatggacttgattggtattcaaaccaagatatgttggacggttaccagaggagaaggactcagtcctattgaaagctgtgaaggattgggagatcctgcttgcttttatgttgctgtaatttttattttaaatggactaatgatggcattattcttcatatatggcacatatttaagtggcagccgattaggaggcctggttacagtgttgtgcttctttttcaatcatggagagtgtacccgtgtaatgtggacaccacctctccgtgaaagcttctcatatccatttcttgttcttcagatgttgctagtgactcatattctcagggctacaaaactttatagaggaagcttgattgcactctgcatttccaatgtatttttcatgcttccttggcagtttgctcagtttgtacttcttactcagattgcatcattatttgcagtatatgttgtcgggtacattgatatatgtaaattacggaagatcatttatatacacatgatttctcttgcactttgttttgttttgatgtttgggaactcaatgttattaacttcttattatgcttcttctttggtaattatttggggtattctggcaatgaaaccacatttcctgaaaataaatgtatctgaacttagtttatgggttattcaaggatgtttttggttatttggaactgtcatacttaaatacttgacatctaaaatttttggtattgcagatgacgctcatattggcaacttactaacatcaaaattctttagttataaggattttgatactttattgtatacctgtgcagcggagtttgactttatggaaaaagagactccactgagatacacaaagacattattgcttccagttgttcttgtagtgtttgttgctattgttagaaagtattattagtgatatgtggggtgtcttagctaaacaacagacacatgtaagaaaacaccagtttgatcatggagagctggtttaccatgcattgcaattgttagcatatacagcccttggtattttaattatgagactaaaactcttcttgacaccacacatgtgtgttatggcatcactgatctgctcaagacagctatttggatggctcttttgcaaagtacatcctgttgctattgtgtttgctatattagcagcaatgtcaatacaaggttcagcaaatctgcaaacccagtggaatattgtaggggagttcagcaatttgccccaagaagaacttatagaatggatcaaatatagtactaaaccagatgcagtgtttgcgggtgccatgcccacgatggcaagtgttaagctctctgcacttcggcccattgtgaatcatccacattatgaagacgcaggcttgagagccagaacaaaaatagtatactcaatgtatagtcggaaagcagccgaagaagtgaagcgagaactgataaagttaaaagtgaactattacattctagaagagtcatggtgtgtaagaagatccaagcctggttgcagtatgcctgaaatttgggatgtagaagatcctgccaatgctgggaaaactcccttatgtaacctcttggtgaaggattccaaacctcacttcaccactgtattccagaacagtgtttacaaagtcctagaagttgtaaaagaatgactgctacatgacctgctgcctacggagaactacatctgtaatggttttaatgttttgctaagtcatgtgttgttcatatcccaaaaacttttataggtaactgttttcaaatagaaaacgttttatttggtcaatttgaatgtcattctaattataaaaatgacttacacctttatcaattggttactatttcaatgcaccctttaaaatttgctatgcaaatgagtatatgcttgtacttgactttaatatttgtgctaaagtgagcaaagctacctgtataaagaaaacacagtgggttgtgacaaggatgacatgaaaatacaggacaattctgacaatgtaggggctgattttatagtgtaagaactattaatgccccttgcttcttttttctgcctcttgctcttgtcttttggacatttcagtgattgtaagttcttcggtcatgtcagcccctgtcatcaacttgagttacagtagatggggcagacatggagtgtttgctatatagaactatctgtttgttttacttccttgtgcgctttttgttctctgttctcttgttaatgaagcttttcctgcccattattaatccaaactcttggaccttgtggttaggaaattcccttaacttccagccatatggcattatcgtgtctctttctctctctctcttgctctctctcttctcctcttccccatattttctgtcaaataagtactgtttactcatttagttgcttatcaagtacttattcttggttttaaaaaaaattaatggtaactgtatttttctcatttttagcattattcaaatgtttatattttaatacctttaaaccactttaaagttttttcatgtttaattatagttttaagaaaaactattttgaacaaccccaaatatagtgcatctagaaactaatgtatatttgattagacatcatttatagtggaacagtagactgtagtacatggtaatttttcttttactattaagatacaataaaacatgactaattttgctgtcaaaaatgtaaagaataatgataaatggagtttttatattttacttttaagattgcctgtctttaataagacaaagccttaagccttatgttataattttggttctaaaaaccatcatttcagtataaggaataagtatatttcgtcctcctctttagtttttttcttcctatttatttttattttgaaaaatttctacaccttctttgaattccttgtatgaatttttgtttcttagaagttaatttgtgtgaaatgagattcttcaaaacgatgaaacctcatagctctgagaaaaggttttagggttttaaattctaagcaaagcgtgactatggctgacagactacacatttaattatacagcttctctttcttaaccacaggcagattaacctcattgtggattgtccttcagaccttagtcctcaggcatggtttctggtgcccactcctggaagccgctgttccctttctaccttcttaccagagcccaagggcaggcctggtcccggggaagcagcagcttgctgacataagtcagctgcaaaggctgaggagtgtgccctcagagaagcaccgccccccagtcttgtgccagcgcctagagccgcagctcccagggatgctccttccctggaggcagcccaggagagggactctggcagcgttcttcagatttgtggccactgtttctcatttgctggttgactgtttttatttcttaggcttttgctagttttagaaaatagggaagcagcccttgatttgtggattaaaagcaacatttgagcgatgatgcacaacagtccaggaaaatgggcggtggacacttgaggctgaggatgggagttgacatgagcagggagagggaggtgcgcgctgcttatctgtgattgttgctcacctgagtgtggctgattgtgtacatccagcagttacaatttttaaaaattatacttttacatttattttatatttttctcacccccagtaatttccttccaaagaagttcacatgtaataagtagaaattctgtataggaaaaaagcattaaaaatactattataactgcttcatttgctgggaaccattaaaagtaatataaattagctttttccagaaggatccttttgtagcagtgtttatgaatgtaacccccagcaaaatatggctatatattaggggagccagtttggagcagaggcctgaaggtccctgctatgcagccgtggccacagctcgcagcccaagcactgtggagcatccacacctttgatggcaatgcagattggtagcaggttccataggcgtacaaaacagtattaaagctcagtgttttgcatattgttagcatttacaaatatttttgctttagtatgaggaaagtaaggatgggcaaagaagcgatcaaaatagctattgctacaacattttcgaaaacaaagttggggctgtatttctttaaaaagataagcctctaaaaatgcttggcaaaaaaaatatagtgttaaaataggccagtgatattaatgagaaaatgaaagtatgtatcaggaataaagtgatattgcataggagtattgtatttttatgaattttatgccagttgtttacatgtactatatatgttaaattaaaaaaaatcatgagtaataaaaaaagtgtt

SEQ ID NO: 434831 - DNA, 4550 bp, Homo sapiens
  misc_feature (670)..(670): n is a, c, g, or t
aaataatgaattacaaagtcttttaagtgattatagttaaagctcttcatggttttgtacttatctttcttaaagggtaagggccaaagctgatcattttctatctttctaaagatttaaaatagttgttggtgtacaactaataccgatttagtacagactgagttcatgagtgattactgcaggtgctgatagaaagcagagcttaattgtacaaataataactttttttgttttgacattcatatcacaaagaaatctaataatttcaggttataagtgcttgaaaattatatgttctttttttagtatcaaacttatttttttttcagttggtgcaatttgtgtgcacattcttgacttgtgctttttaaaatttagtttaagccttccttggtggtttgctgcttatttttcctggatagctgcctccttgttctgtattcacagatttatgcttctccatagtgtcacctttccatcagtcaaccagcctaggtacaacagcagcacctcccttagacgtagcagatagtcactaagcacctacactgcgcactctagggatggaggagagagtagtagacagaaaagtcaaaagccagtgtttataagccctcaagaaacttgaaatctagctctgtagacatgtggagaaagatcaagagancaaagtgttgttatggagtgtggactatttggatgtggaaaaaattagccagccttgaggttcccaatcagtatgttgtattatgttagaaaggcactactttctacctttctgaccccttcaggctggcacaggaaaggaggctggttggaagcctttaatcttgagtcttatcccacacaacctaatagaaagtgtcacccagggcaggttttccaagtgtggggttcctgctggtcacacaggacctcacattcaggaccctgaacttgattgaatgtttgctgctgctgttttgaacgtcttaattttttaacaagagaccccacatttttgttttgtactgggccttgtaaattggttgtggctttacttgaatctgggagtagtgaaagcaggttgagaaaagagcttcctacattgtgttccacttatatgaggctgatggtagaatccttttgatcccaaagattattattttggggctttttctttaggataattaatcctttatttgggactctagcagaggccttattcttctctgggaagaagttttgcataacagatgcatactacttatactaacaattaccaatgtattcttaatttggtttcagctatttggatggctcttttgcaaagtacatcctgttgctattgtgtttgctatattagcagcaatgtcaatacaaggttcagcaaatctgcaaacccagtggaatattgtaggggagttcagcaatttgccccaagaagaacttatagaatggatcaaatatagtactaaaccagatgcagtgtttgcgggtgccatgcccacgatggcaagtgttaagctctctgcacttcggcccattgtgaatcatccacattatgaagacgcaggcttgagagccagaacaaaaatagtatactcaatgtatagtcggaaagcagccgaagaagtgaagcgagaactgataaagttaaaagtgaactattacattctagaagagtcatggtgtgtaagaagatccaagcctggttgcagtatgcctgaaatttgggatgtagaagatcctgccaatgctgggaaaactcccttatgtaacctcttggtgaaggattccaaacctcacttcaccactgtattccagaacagtgtttacaaagtcctagaagttgtaaaagaatgactgctacatgacctgctgcctacggagaactacatctgtaatggttttaatgttttgctaagtcatgtgttgttcatatcccaaaaacttttataggtaactgttttcaaatagaaaacgttttatttggtcaatttgaatgtcattctaattataaaaatgacttacacctttatcaattggttactatttcaatgcaccctttaaaatttgctatgcaaatgagtatatgcttgtacttgactttaatatttgtgctaaagtgagcaaagctacctgtataaagaaaacacagtgggttgtgacaaggatgacatgaaaatacaggacaattctgacaatgtaggggctgattttatagtgtaagaactattaatgccccttgcttcttttttctgcctcttgctcttgtcttttggacatttcagtgattgtaagttcttcggtcatgtcagcccctgtcatcaacttgagttacagtagatggggcagacatggagtgtttgctatatagaactatctgtttgttttacttccttgtgcgctttttgttctctgttctcttgttaatgaagcttttcctgcccattattaatccaaactcttggaccttgtggttaggaaattcccttaacttccagccatatggcattatcgtgtctctttctctctctctcttgctctctctcttctcctcttccccatattttctgtcaaataagtactgtttactcatttagttgcttatcaagtacttattcttggttttaaaaaaaattaatggtaactgtatttttctcatttttagcattattcaaatgtttatattttaatacctttaaaccactttaaagttttttcatgtttaattatagttttaagaaaaactattttgaacaaccccaaatatagtgcatctagaaactaatgtatatttgattagacatcatttatagtggaacagtagactgtagtacatggtaatttttcttttactattaagatacaataaaacatgactaattttgctgtcaaaaatgtaaagaataatgataaatggagtttttatattttacttttaagattgcctgtctttaataagacaaagccttaagccttatgttataattttggttctaaaaaccatcatttcagtataaggaataagtatatttcgtcctcctctttagtttttttcttcctatttatttttattttgaaaaatttctacaccttctttgaattccttgtatgaatttttgtttcttagaagttaatttgtgtgaaatgagattcttcaaaacgatgaaacctcatagctctgagaaaaggttttagggttttaaattctaagcaaagcgtgactatggctgacagactacacatttaattatacagcttctctttcttaaccacaggcagattaacctcattgtggattgtccttcagaccttagtcctcaggcatggtttctggtgcccactcctggaagccgctgttccctttctaccttcttaccagagcccaagggcaggcctggtcccggggaagcagcagcttgctgacataagtcagctgcaaaggctgaggagtgtgccctcagagaagcaccgccccccagtcttgtgccagcgcctagagccgcagctcccagggatgctccttccctggaggcagcccaggagagggactctggcagcgttcttcagatttgtggccactgtttctcatttgctggttgactgtttttatttcttaggcttttgctagttttagaaaatagggaagcagcccttgatttgtggattaaaagcaacatttgagcgatgatgcacaacagtccaggaaaatgggcggtggacacttgaggctgaggatgggagttgacatgagcagggagagggaggtgcgcgctgcttatctgtgattgttgctcacctgagtgtggctgattgtgtacatccagcagttacaatttttaaaaattatacttttacatttattttatatttttctcacccccagtaatttccttccaaagaagttcacatgtaataagtagaaattctgtataggaaaaaagcattaaaaatactattataactgcttcatttgctgggaaccattaaaagtaatataaattagctttttccagaaggatccttttgtagcagtgtttatgaatgtaacccccagcaaaatatggctatatattaggggagccagtttggagcagaggcctgaaggtccctgctatgcagccgtggccacagctcgcagcccaagcactgtggagcatccacacctttgatggcaatgcagattggtagcaggttccataggcgtacaaaacagtattaaagctcagtgttttgcatattgttagcatttacaaatatttttgctttagtatgaggaaagtaaggatgggcaaagaagcgatcaaaatagctattgctacaacattttcgaaaacaaagttggggctgtatttctttaaaaagataagcctctaaaaatgcttggcaaaaaaaatatagtgttaaaataggccagtgatattaatgagaaaatgaaagtatgtatcaggaataaagtgatattgcataggagtattgtatttttatgaattttatgccagttgtttacatgtactatatatgttaaattaaaaaaaatcatgagtaataaaaaaagtgtt

SEQ ID NO: 434832 - DNA, 4348 bp, Homo sapiens
  misc_feature (915)..(915): n is a, c, g, or t
  misc_feature (926)..(926): n is a, c, g, or t
  misc_feature (933)..(933): n is a, c, g, or t
  misc_feature (946)..(946): n is a, c, g, or t
  misc_feature (949)..(949): n is a, c, g, or t
  misc_feature (951)..(951): n is a, c, g, or t
  misc_feature (960)..(960): n is a, c, g, or t
  misc_feature (962)..(962): n is a, c, g, or t
cccccttgtcattaatacattaaaaagattcaatctttaccctgaggtaattttggccagttggtaccggatttataccaaaataatggacttgattggtattcaaaccaagatatgttggacggttaccagaggagaaggactcagtcctattgaaagctgtgaaggattgggagatcctgcttgcttttatgttgctgtaatttttattttaaatggactaatgatggcattattcttcatatatggcacatatttaagtggcagccgattaggaggcctggttacagtgttgtgcttctttttcaatcatggagagtgtacccgtgtaatgtggacaccacctctccgtgaaagcttctcatatccatttcttgttcttcagatgttgctagtgactcatattctcagggctacaaaactttatagaggaagcttgattgcactctgcatttccaatgtatttttcatgcttccttggcagtttgctcagtttgtacttcttactcagattgcatcattatttgcagtatatgttgtcgggtacattgatatatgtaaattacggaagatcatttatatacacatgggtattctggcaatgaaaccacatttcctgaaaataaatgtatctgaacttagtttatgggttattcaaggatgtttttggttatttggaactgtcatacttaaatacttgacatctaaaatttttggtattgcagatgacgctcatattggcaacttactaacatcaaaattctttagttataaggattttgatactttattgtatacctgtgcagcggagtttgactttatggaaaaagagactccactgagatacacaaagacattattgcttccagttgttcttgtagtgtttgttgctattgttagaaagttagtgaatgnggggggtctanctaaacncagacacattaanaancnccatttgancntggaagctggtttaccatgcattgcaattgttagcatatacagcccttggtattttaattatgagactaaaactcttcttgacaccacacatgtgtgttatggcatcactgatctgctcaagacagctatttggatggctcttttgcaaagtacatcctgttgctattgtgtttgctatattagcagcaatgtcaatacaaggttcagcaaatctgcaaacccagtggaatattgtaggggagttcagcaatttgccccaagaagaacttatagaatggatcaaatatagtactaaaccagatgcagtgtttgcgggtgccatgcccacgatggcaagtgttaagctctctgcacttcggcccattgtgaatcatccacattatgaagacgcaggcttgagagccagaacaaaaatagtatactcaatgtatagtcggaaagcagccgaagaagtgaagcgagaactgataaagttaaaagtgaactattacattctagaagagtcatggtgtgtaagaagatccaagcctggttgcagtatgcctgaaatttgggatgtagaagatcctgccaatgctgggaaaactcccttatgtaacctcttggtgaaggattccaaacctcacttcaccactgtattccagaacagtgtttacaaagtcctagaagttgtaaaagaatgactgctacatgacctgctgcctacggagaactacatctgtaatggttttaatgttttgctaagtcatgtgttgttcatatcccaaaaacttttataggtaactgttttcaaatagaaaacgttttatttggtcaatttgaatgtcattctaattataaaaatgacttacacctttatcaattggttactatttcaatgcaccctttaaaatttgctatgcaaatgagtatatgcttgtacttgactttaatatttgtgctaaagtgagcaaagctacctgtataaagaaaacacagtgggttgtgacaaggatgacatgaaaatacaggacaattctgacaatgtaggggctgattttatagtgtaagaactattaatgccccttgcttcttttttctgcctcttgctcttgtcttttggacatttcagtgattgtaagttcttcggtcatgtcagcccctgtcatcaacttgagttacagtagatggggcagacatggagtgtttgctatatagaactatctgtttgttttacttccttgtgcgctttttgttctctgttctcttgttaatgaagcttttcctgcccattattaatccaaactcttggaccttgtggttaggaaattcccttaacttccagccatatggcattatcgtgtctctttctctctctctcttgctctctctcttctcctcttccccatattttctgtcaaataagtactgtttactcatttagttgcttatcaagtacttattcttggttttaaaaaaaattaatggtaactgtatttttctcatttttagcattattcaaatgtttatattttaatacctttaaaccactttaaagttttttcatgtttaattatagttttaagaaaaactattttgaacaaccccaaatatagtgcatctagaaactaatgtatatttgattagacatcatttatagtggaacagtagactgtagtacatggtaatttttcttttactattaagatacaataaaacatgactaattttgctgtcaaaaatgtaaagaataatgataaatggagtttttatattttacttttaagattgcctgtctttaataagacaaagccttaagccttatgttataattttggttctaaaaaccatcatttcagtataaggaataagtatatttcgtcctcctctttagtttttttcttcctatttatttttattttgaaaaatttctacaccttctttgaattccttgtatgaatttttgtttcttagaagttaatttgtgtgaaatgagattcttcaaaacgatgaaacctcatagctctgagaaaaggttttagggttttaaattctaagcaaagcgtgactatggctgacagactacacatttaattatacagcttctctttcttaaccacaggcagattaacctcattgtggattgtccttcagaccttagtcctcaggcatggtttctggtgcccactcctggaagccgctgttccctttctaccttcttaccagagcccaagggcaggcctggtcccggggaagcagcagcttgctgacataagtcagctgcaaaggctgaggagtgtgccctcagagaagcaccgccccccagtcttgtgccagcgcctagagccgcagctcccagggatgctccttccctggaggcagcccaggagagggactctggcagcgttcttcagatttgtggccactgtttctcatttgctggttgactgtttttatttcttaggcttttgctagttttagaaaatagggaagcagcccttgatttgtggattaaaagcaacatttgagcgatgatgcacaacagtccaggaaaatgggcggtggacacttgaggctgaggatgggagttgacatgagcagggagagggaggtgcgcgctgcttatctgtgattgttgctcacctgagtgtggctgattgtgtacatccagcagttacaatttttaaaaattatacttttacatttattttatatttttctcacccccagtaatttccttccaaagaagttcacatgtaataagtagaaattctgtataggaaaaaagcattaaaaatactattataactgcttcatttgctgggaaccattaaaagtaatataaattagctttttccagaaggatccttttgtagcagtgtttatgaatgtaacccccagcaaaatatggctatatattaggggagccagtttggagcagaggcctgaaggtccctgctatgcagccgtggccacagctcgcagcccaagcactgtggagcatccacacctttgatggcaatgcagattggtagcaggttccataggcgtacaaaacagtattaaagctcagtgttttgcatattgttagcatttacaaatatttttgctttagtatgaggaaagtaaggatgggcaaagaagcgatcaaaatagctattgctacaacattttcgaaaacaaagttggggctgtatttctttaaaaagataagcctctaaaaatgcttggcaaaaaaaatatagtgttaaaataggccagtgatattaatgagaaaatgaaagtatgtatcaggaataaagtgatattgcataggagtattgtatttttatgaattttatgccagttgtttacatgtactatatatgttaaattaaaaaaaatcatgagtaataaaaaaagtgtt

SEQ ID NO: 434833 - DNA, 4496 bp, Homo sapiens
  misc_feature (670)..(670): n is a, c, g, or t
aaataatgaattacaaagtcttttaagtgattatagttaaagctcttcatggttttgtacttatctttcttaaagggtaagggccaaagctgatcattttctatctttctaaagatttaaaatagttgttggtgtacaactaataccgatttagtacagactgagttcatgagtgattactgcaggtgctgatagaaagcagagcttaattgtacaaataataactttttttgttttgacattcatatcacaaagaaatctaataatttcaggttataagtgcttgaaaattatatgttctttttttagtatcaaacttatttttttttcagttggtgcaatttgtgtgcacattcttgacttgtgctttttaaaatttagtttaagccttccttggtggtttgctgcttatttttcctggatagctgcctccttgttctgtattcacagatttatgcttctccatagtgtcacctttccatcagtcaaccagcctaggtacaacagcagcacctcccttagacgtagcagatagtcactaagcacctacactgcgcactctagggatggaggagagagtagtagacagaaaagtcaaaagccagtgtttataagccctcaagaaacttgaaatctagctctgtagacatgtggagaaagatcaagagancaaagtgttgttatggagtgtggactatttggatgtggaaaaaattagccagccttgaggttcccaatcagtatgttgtattatgttagaaaggcactactttctacctttctgaccccttcaggctggcacaggaaaggaggctggttggaagcctttaatcttgagtcttatcccacacaacctaatagaaagtgtcacccagggcaggttttccaagtgtggggttcctgctggtcacacaggacctcacattcaggaccctgaacttgattgaatgtttgctgctgctgttttgaacgtcttaattttttaacaagagaccccacatttttgttttgtactgggccttgtaaattggttgtggctttacttgaatctgggagtagtgaaagcaggttgagttgatcccaaagattattattttggggctttttctttaggataattaatcctttatttgggactctagcagaggccttattcttctctgggaagaagttttgcataacagatgcatactacttatactaacaattaccaatgtattcttaatttggtttcagctatttggatggctcttttgcaaagtacatcctgttgctattgtgtttgctatattagcagcaatgtcaatacaaggttcagcaaatctgcaaacccagtggaatattgtaggggagttcagcaatttgccccaagaagaacttatagaatggatcaaatatagtactaaaccagatgcagtgtttgcgggtgccatgcccacgatggcaagtgttaagctctctgcacttcggcccattgtgaatcatccacattatgaagacgcaggcttgagagccagaacaaaaatagtatactcaatgtatagtcggaaagcagccgaagaagtgaagcgagaactgataaagttaaaagtgaactattacattctagaagagtcatggtgtgtaagaagatccaagcctggttgcagtatgcctgaaatttgggatgtagaagatcctgccaatgctgggaaaactcccttatgtaacctcttggtgaaggattccaaacctcacttcaccactgtattccagaacagtgtttacaaagtcctagaagttgtaaaagaatgactgctacatgacctgctgcctacggagaactacatctgtaatggttttaatgttttgctaagtcatgtgttgttcatatcccaaaaacttttataggtaactgttttcaaatagaaaacgttttatttggtcaatttgaatgtcattctaattataaaaatgacttacacctttatcaattggttactatttcaatgcaccctttaaaatttgctatgcaaatgagtatatgcttgtacttgactttaatatttgtgctaaagtgagcaaagctacctgtataaagaaaacacagtgggttgtgacaaggatgacatgaaaatacaggacaattctgacaatgtaggggctgattttatagtgtaagaactattaatgccccttgcttcttttttctgcctcttgctcttgtcttttggacatttcagtgattgtaagttcttcggtcatgtcagcccctgtcatcaacttgagttacagtagatggggcagacatggagtgtttgctatatagaactatctgtttgttttacttccttgtgcgctttttgttctctgttctcttgttaatgaagcttttcctgcccattattaatccaaactcttggaccttgtggttaggaaattcccttaacttccagccatatggcattatcgtgtctctttctctctctctcttgctctctctcttctcctcttccccatattttctgtcaaataagtactgtttactcatttagttgcttatcaagtacttattcttggttttaaaaaaaattaatggtaactgtatttttctcatttttagcattattcaaatgtttatattttaatacctttaaaccactttaaagttttttcatgtttaattatagttttaagaaaaactattttgaacaaccccaaatatagtgcatctagaaactaatgtatatttgattagacatcatttatagtggaacagtagactgtagtacatggtaatttttcttttactattaagatacaataaaacatgactaattttgctgtcaaaaatgtaaagaataatgataaatggagtttttatattttacttttaagattgcctgtctttaataagacaaagccttaagccttatgttataattttggttctaaaaaccatcatttcagtataaggaataagtatatttcgtcctcctctttagtttttttcttcctatttatttttattttgaaaaatttctacaccttctttgaattccttgtatgaatttttgtttcttagaagttaatttgtgtgaaatgagattcttcaaaacgatgaaacctcatagctctgagaaaaggttttagggttttaaattctaagcaaagcgtgactatggctgacagactacacatttaattatacagcttctctttcttaaccacaggcagattaacctcattgtggattgtccttcagaccttagtcctcaggcatggtttctggtgcccactcctggaagccgctgttccctttctaccttcttaccagagcccaagggcaggcctggtcccggggaagcagcagcttgctgacataagtcagctgcaaaggctgaggagtgtgccctcagagaagcaccgccccccagtcttgtgccagcgcctagagccgcagctcccagggatgctccttccctggaggcagcccaggagagggactctggcagcgttcttcagatttgtggccactgtttctcatttgctggttgactgtttttatttcttaggcttttgctagttttagaaaatagggaagcagcccttgatttgtggattaaaagcaacatttgagcgatgatgcacaacagtccaggaaaatgggcggtggacacttgaggctgaggatgggagttgacatgagcagggagagggaggtgcgcgctgcttatctgtgattgttgctcacctgagtgtggctgattgtgtacatccagcagttacaatttttaaaaattatacttttacatttattttatatttttctcacccccagtaatttccttccaaagaagttcacatgtaataagtagaaattctgtataggaaaaaagcattaaaaatactattataactgcttcatttgctgggaaccattaaaagtaatataaattagctttttccagaaggatccttttgtagcagtgtttatgaatgtaacccccagcaaaatatggctatatattaggggagccagtttggagcagaggcctgaaggtccctgctatgcagccgtggccacagctcgcagcccaagcactgtggagcatccacacctttgatggcaatgcagattggtagcaggttccataggcgtacaaaacagtattaaagctcagtgttttgcatattgttagcatttacaaatatttttgctttagtatgaggaaagtaaggatgggcaaagaagcgatcaaaatagctattgctacaacattttcgaaaacaaagttggggctgtatttctttaaaaagataagcctctaaaaatgcttggcaaaaaaaatatagtgttaaaataggccagtgatattaatgagaaaatgaaagtatgtatcaggaataaagtgatattgcataggagtattgtatttttatgaattttatgccagttgtttacatgtactatatatgttaaattaaaaaaaatcatgagtaataaaaaaagtgtt

SEQ ID NO: 434834 - DNA, 4177 bp, Homo sapiens
tagttgatccattaacatttcatttgctgtttaccctaagagtcagtaatttttagctaaaggaaaatcttatgcctgtatgactactgtccaaaattctgaaaatgttatatacctcatggctcagagataaatcagatatgtcaaatcagtcatagacatttacatatggtgattcctttttcaactttaaaaagtcacgcattcacctaattgactttggataatagggctataccttgaagtcactgactctagaaatgagcatgtggatggtatgtggaaagtcaaccatgtgctaaattttagatacttgagaatcttattatttagaagaattttttggtacttgaatttatgtctataagtattaactgtgtatactatgttatttttctctactcagggtattctggcaatgaaaccacatttcctgaaaataaatgtatctgaacttagtttatgggttattcaaggatgtttttggttatttggaactgtcatacttaaatacttgacatctaaaatttttggtattgcagatgacgctcatattggcaacttactaacatcaaaattctttagttataaggattttgatactttattgtatacctgtgcagcggagtttgactttatggaaaaagagactccactgagatacacaaagacattattgcttccagttgttcttgtagtgtttgttgctattgttagaaagtattattagtgatatgtggggtgtcttagctaaacaacagacacatgtaagaaaacaccagtttgatcatggagagctggtttaccatgcattgcaattgttagcatatacagcccttggtattttaattatgagactaaaactcttcttgacaccacacatgtgtgttatggcatcactgatctgctcaagacagctatttggatggctcttttgcaaagtacatcctgttgctattgtgtttgctatattagcagcaatgtcaatacaaggttcagcaaatctgcaaacccagtggaatattgtaggggagttcagcaatttgccccaagaagaacttatagaatggatcaaatatagtactaaaccagatgcagtgtttgcgggtgccatgcccacgatggcaagtgttaagctctctgcacttcggcccattgtgaatcatccacattatgaagacgcaggcttgagagccagaacaaaaatagtatactcaatgtatagtcggaaagcagccgaagaagtgaagcgagaactgataaagttaaaagtgaactattacattctagaagagtcatggtgtgtaagaagatccaagcctggttgcagtatgcctgaaatttgggatgtagaagatcctgccaatgctgggaaaactcccttatgtaacctcttggtgaaggattccaaacctcacttcaccactgtattccagaacagtgtttacaaagtcctagaagttgtaaaagaatgactgctacatgacctgctgcctacggagaactacatctgtaatggttttaatgttttgctaagtcatgtgttgttcatatcccaaaaacttttataggtaactgttttcaaatagaaaacgttttatttggtcaatttgaatgtcattctaattataaaaatgacttacacctttatcaattggttactatttcaatgcaccctttaaaatttgctatgcaaatgagtatatgcttgtacttgactttaatatttgtgctaaagtgagcaaagctacctgtataaagaaaacacagtgggttgtgacaaggatgacatgaaaatacaggacaattctgacaatgtaggggctgattttatagtgtaagaactattaatgccccttgcttcttttttctgcctcttgctcttgtcttttggacatttcagtgattgtaagttcttcggtcatgtcagcccctgtcatcaacttgagttacagtagatggggcagacatggagtgtttgctatatagaactatctgtttgttttacttccttgtgcgctttttgttctctgttctcttgttaatgaagcttttcctgcccattattaatccaaactcttggaccttgtggttaggaaattcccttaacttccagccatatggcattatcgtgtctctttctctctctctcttgctctctctcttctcctcttccccatattttctgtcaaataagtactgtttactcatttagttgcttatcaagtacttattcttggttttaaaaaaaattaatggtaactgtatttttctcatttttagcattattcaaatgtttatattttaatacctttaaaccactttaaagttttttcatgtttaattatagttttaagaaaaactattttgaacaaccccaaatatagtgcatctagaaactaatgtatatttgattagacatcatttatagtggaacagtagactgtagtacatggtaatttttcttttactattaagatacaataaaacatgactaattttgctgtcaaaaatgtaaagaataatgataaatggagtttttatattttacttttaagattgcctgtctttaataagacaaagccttaagccttatgttataattttggttctaaaaaccatcatttcagtataaggaataagtatatttcgtcctcctctttagtttttttcttcctatttatttttattttgaaaaatttctacaccttctttgaattccttgtatgaatttttgtttcttagaagttaatttgtgtgaaatgagattcttcaaaacgatgaaacctcatagctctgagaaaaggttttagggttttaaattctaagcaaagcgtgactatggctgacagactacacatttaattatacagcttctctttcttaaccacaggcagattaacctcattgtggattgtccttcagaccttagtcctcaggcatggtttctggtgcccactcctggaagccgctgttccctttctaccttcttaccagagcccaagggcaggcctggtcccggggaagcagcagcttgctgacataagtcagctgcaaaggctgaggagtgtgccctcagagaagcaccgccccccagtcttgtgccagcgcctagagccgcagctcccagggatgctccttccctggaggcagcccaggagagggactctggcagcgttcttcagatttgtggccactgtttctcatttgctggttgactgtttttatttcttaggcttttgctagttttagaaaatagggaagcagcccttgatttgtggattaaaagcaacatttgagcgatgatgcacaacagtccaggaaaatgggcggtggacacttgaggctgaggatgggagttgacatgagcagggagagggaggtgcgcgctgcttatctgtgattgttgctcacctgagtgtggctgattgtgtacatccagcagttacaatttttaaaaattatacttttacatttattttatatttttctcacccccagtaatttccttccaaagaagttcacatgtaataagtagaaattctgtataggaaaaaagcattaaaaatactattataactgcttcatttgctgggaaccattaaaagtaatataaattagctttttccagaaggatccttttgtagcagtgtttatgaatgtaacccccagcaaaatatggctatatattaggggagccagtttggagcagaggcctgaaggtccctgctatgcagccgtggccacagctcgcagcccaagcactgtggagcatccacacctttgatggcaatgcagattggtagcaggttccataggcgtacaaaacagtattaaagctcagtgttttgcatattgttagcatttacaaatatttttgctttagtatgaggaaagtaaggatgggcaaagaagcgatcaaaatagctattgctacaacattttcgaaaacaaagttggggctgtatttctttaaaaagataagcctctaaaaatgcttggcaaaaaaaatatagtgttaaaataggccagtgatattaatgagaaaatgaaagtatgtatcaggaataaagtgatattgcataggagtattgtatttttatgaattttatgccagttgtttacatgtactatatatgttaaattaaaaaaaatcatgagtaataaaaaaagtgtt

SEQ ID NO: 434835 - DNA, 3141 bp, Homo sapiens
ctcccatgcaaacagacagtgagtggaggacaccagcaaagtaataaggaatgtttcaaaaggatatgatgaactgaggcttatcgagtcagggagcagaaagctgaaataagaccgctaagctctaaacaaatccgttaaagcttcacagggcagagccagaacaaaaatagtatactcaatgtatagtcggaaagcagccgaagaagtgaagcgagaactgataaagttaaaagtgaactattacattctagaagagtcatggtgtgtaagaagatccaagcctggttgcagtatgcctgaaatttgggatgtagaagatcctgccaatgctgggaaaactcccttatgtaacctcttggtgaaggattccaaacctcacttcaccactgtattccagaacagtgtttacaaagtcctagaagttgtaaaagaatgactgctacatgacctgctgcctacggagaactacatctgtaatggttttaatgttttgctaagtcatgtgttgttcatatcccaaaaacttttataggtaactgttttcaaatagaaaacgttttatttggtcaatttgaatgtcattctaattataaaaatgacttacacctttatcaattggttactatttcaatgcaccctttaaaatttgctatgcaaatgagtatatgcttgtacttgactttaatatttgtgctaaagtgagcaaagctacctgtataaagaaaacacagtgggttgtgacaaggatgacatgaaaatacaggacaattctgacaatgtaggggctgattttatagtgtaagaactattaatgccccttgcttcttttttctgcctcttgctcttgtcttttggacatttcagtgattgtaagttcttcggtcatgtcagcccctgtcatcaacttgagttacagtagatggggcagacatggagtgtttgctatatagaactatctgtttgttttacttccttgtgcgctttttgttctctgttctcttgttaatgaagcttttcctgcccattattaatccaaactcttggaccttgtggttaggaaattcccttaacttccagccatatggcattatcgtgtctctttctctctctctcttgctctctctcttctcctcttccccatattttctgtcaaataagtactgtttactcatttagttgcttatcaagtacttattcttggttttaaaaaaaattaatggtaactgtatttttctcatttttagcattattcaaatgtttatattttaatacctttaaaccactttaaagttttttcatgtttaattatagttttaagaaaaactattttgaacaaccccaaatatagtgcatctagaaactaatgtatatttgattagacatcatttatagtggaacagtagactgtagtacatggtaatttttcttttactattaagatacaataaaacatgactaattttgctgtcaaaaatgtaaagaataatgataaatggagtttttatattttacttttaagattgcctgtctttaataagacaaagccttaagccttatgttataattttggttctaaaaaccatcatttcagtataaggaataagtatatttcgtcctcctctttagtttttttcttcctatttatttttattttgaaaaatttctacaccttctttgaattccttgtatgaatttttgtttcttagaagttaatttgtgtgaaatgagattcttcaaaacgatgaaacctcatagctctgagaaaaggttttagggttttaaattctaagcaaagcgtgactatggctgacagactacacatttaattatacagcttctctttcttaaccacaggcagattaacctcattgtggattgtccttcagaccttagtcctcaggcatggtttctggtgcccactcctggaagccgctgttccctttctaccttcttaccagagcccaagggcaggcctggtcccggggaagcagcagcttgctgacataagtcagctgcaaaggctgaggagtgtgccctcagagaagcaccgccccccagtcttgtgccagcgcctagagccgcagctcccagggatgctccttccctggaggcagcccaggagagggactctggcagcgttcttcagatttgtggccactgtttctcatttgctggttgactgtttttatttcttaggcttttgctagttttagaaaatagggaagcagcccttgatttgtggattaaaagcaacatttgagcgatgatgcacaacagtccaggaaaatgggcggtggacacttgaggctgaggatgggagttgacatgagcagggagagggaggtgcgcgctgcttatctgtgattgttgctcacctgagtgtggctgattgtgtacatccagcagttacaatttttaaaaattatacttttacatttattttatatttttctcacccccagtaatttccttccaaagaagttcacatgtaataagtagaaattctgtataggaaaaaagcattaaaaatactattataactgcttcatttgctgggaaccattaaaagtaatataaattagctttttccagaaggatccttttgtagcagtgtttatgaatgtaacccccagcaaaatatggctatatattaggggagccagtttggagcagaggcctgaaggtccctgctatgcagccgtggccacagctcgcagcccaagcactgtggagcatccacacctttgatggcaatgcagattggtagcaggttccataggcgtacaaaacagtattaaagctcagtgttttgcatattgttagcatttacaaatatttttgctttagtatgaggaaagtaaggatgggcaaagaagcgatcaaaatagctattgctacaacattttcgaaaacaaagttggggctgtatttctttaaaaagataagcctctaaaaatgcttggcaaaaaaaatatagtgttaaaataggccagtgatattaatgagaaaatgaaagtatgtatcaggaataaagtgatattgcataggagtattgtatttttatgaattttatgccagttgtttacatgtactatatatgttaaattaaaaaaaatcatgagtaataaaaaaagtgtt

SEQ ID NO: 434836 - DNA, 4470 bp, Homo sapiens
  misc_feature (670)..(670): n is a, c, g, or t
aaataatgaattacaaagtcttttaagtgattatagttaaagctcttcatggttttgtacttatctttcttaaagggtaagggccaaagctgatcattttctatctttctaaagatttaaaatagttgttggtgtacaactaataccgatttagtacagactgagttcatgagtgattactgcaggtgctgatagaaagcagagcttaattgtacaaataataactttttttgttttgacattcatatcacaaagaaatctaataatttcaggttataagtgcttgaaaattatatgttctttttttagtatcaaacttatttttttttcagttggtgcaatttgtgtgcacattcttgacttgtgctttttaaaatttagtttaagccttccttggtggtttgctgcttatttttcctggatagctgcctccttgttctgtattcacagatttatgcttctccatagtgtcacctttccatcagtcaaccagcctaggtacaacagcagcacctcccttagacgtagcagatagtcactaagcacctacactgcgcactctagggatggaggagagagtagtagacagaaaagtcaaaagccagtgtttataagccctcaagaaacttgaaatctagctctgtagacatgtggagaaagatcaagagancaaagtgttgttatggagtgtggactatttggatgtggaaaaaattagccagccttgaggttcccaatcagtatgttgtattatgttagaaaggcactactttctacctttctgaccccttcaggctggcacaggaaaggaggctggttggaagcctttaatcttgagtcttatcccacacaacctaatagaaagtgtcacccagggcaggttttccaagtgtggggttcctgctggtcacacaggacctcacattcaggaccctgaacttgattgaatgtttgctgctgctgttttgaacgtcttaattttttaacaagagaccccacatttttgttttgtactgggccttgtaaattggttgtggctttacttgaatctgggagtagtgaaagcaggttgagaaaagagcttcctacattgtgttccacttatatgaggctgatggtagaatccttttgatcccaaagattattattttggggctttttctttaggataattaatcctttatttgggactctagcagaggccttattcttctctgggaagaagttttgcataacagatgcatactacttatactaacaattaccaatgtattcttaatttggtttcagctatttggatggctcttttgcaaagtacatcctgttgctattgtgtttgctatattagcagcaatgtcaatacaaggttcagcaaatctgcaaacccagtggaatattgtaggggagttcagcaatttgccccaagaagaacttatagaatggatcaaatatagtactaaaccagatgcagtgtttgcgggtgccatgcccacgatggcaagtgttaagctctctgcacttcggcccattgtgaatcatccacattatgaagacgcaggcttgagagccagaacaaaaatagtatactcaatgtatagtcggaaagcagccgaagaagtgaagcgagaactgataaagttaaaagtgaactattacattctagaagagtcatggtgtgtaagaagatccaagcctggttgcagtatgcctgaaatttgggatgtagaagatcctgccaatgctgggaaaactcccttatgtaacctcttggtgaaggattccaaacctcacttcaccactgtattccagaacagtgtttacaaagtcctagaagttgtaaaagaatgactgctacatgacctgctgcctacggagaactacatctgtaatggttttaatgttttgctaagtcatgtgttgttcatatcccaaaaacttttataggtaactgttttcaaatagaaaacgttttatttggtcaatttgaatgtcattctaattataaaaatgacttacacctttatcaattggttactatttcaatgcaccctttaaaatttgctatgcaaatgagtatatgcttgtacttgactttaatatttgtgctaaagtgagcaaagctacctgtataaagaaaacacagtgggttgtgacaaggatgacatgaaaatacaggacaattctgacaatgtaggggctgattttatagtgtaagaactattaatgccccttgcttcttttttctgcctcttgctcttgtcttttggacatttcagtgattgtaagttcttcggtcatgtcagcccctgtcatcaacttgagttacagtagatggggcagacatggagtgtttgctatatagaactatctgtttgttttacttccttgtgcgctttttgttctctgttctcttgttaatgaagcttttcctgcccattattaatccaaactcttggaccttgtggttaggaaattcccttaacttccagccatatggcattatcgtgtctctttctctctctctcttgctctctctcttctcctcttccccatattttctgtcaaataagtactgtttactcatttagttgcttatcaagtacttattcttggttttaaaaaaaattaatggtaactgtatttttctcatttttagcattattcaaatgtttatattttaatacctttaaaccactttaaagttttttcatgtttaattatagttttaagaaaaactattttgaacaaccccaaatatagtgcatctagaaactaatgtatatttgattagacatcatttatagtggaacagtagactgtagtacatggtaatttttcttttactattaagatacaataaaacatgactaattttgctgtcaaaaatgtaaagaataatgataaatggagtttttatattttacttttaagattgcctgtctttaataagacaaagccttaagccttatgttataattttggttctaaaaaccatcatttcagtataaggaataagtatatttcgtcctcctctttagtttttttcttcctatttatttttattttgaaaaatttctacaccttctttgaattccttgtatgaatttttgtttcttagaagttaatttgtgtgaaatgagattcttcaaaacgatgaaacctcatagctctgagaaaaggttttagggttttaaattctaagcaaagcgtgactatggctgacagactacacatttaattatacagcttctctttcttaaccacaggcagattaacctcattgtggattgtccttcagaccttagtcctcaggcatggtttctggtgcccactcctggaagccgctgttccctttctaccttcttaccagagcccaagggcaggcctggtcccggggaagcagcagcttgctgacataagtcagctgcaaaggctgaggagtgtgccctcagagaagcaccgccccccagtcttgtgccagcgcctagagccgcagctcccagggatgctccttccctggaggcagcccaggagagggactctggcagcgttcttcagatttgtggccactgtttctcatttgctggttgactgtttttatttcttaggcttttgctagttttagaaaatagggaagcagcccttgatttgtggattaaaagcaacatttgagcgatgatgcacaacagtccaggaaaatgggcggtggacacttgaggctgaggatgggagttgacatgagcagggagagggaggtgcgcgctgcttatctgtgattgttgctcacctgagtgtggctgattgtgtacatccagcagttacaatttttaaaaattatacttttacatttattttatatttttctcacccccagtaatttccttccaaagaagttcacatgtaataagtagaaattctgtataggaaaaaagcattaaaaatactattataaatgtaacccccagcaaaatatggctatatattaggggagccagtttggagcagaggcctgaaggtccctgctatgcagccgtggccacagctcgcagcccaagcactgtggagcatccacacctttgatggcaatgcagattggtagcaggttccataggcgtacaaaacagtattaaagctcagtgttttgcatattgttagcatttacaaatatttttgctttagtatgaggaaagtaaggatgggcaaagaagcgatcaaaatagctattgctacaacattttcgaaaacaaagttggggctgtatttctttaaaaagataagcctctaaaaatgcttggcaaaaaaaatatagtgttaaaataggccagtgatattaatgagaaaatgaaagtatgtatcaggaataaagtgatattgcataggagtattgtatttttatgaattttatgccagttgtttacatgtactatatatgttaaattaaaaaaaatcatgagtaataaaaaaagtgtt

SEQ ID NO: 434837 - DNA, 2111 bp, Homo sapiens
  misc_feature (670)..(670): n is a, c, g, or t
aaataatgaattacaaagtcttttaagtgattatagttaaagctcttcatggttttgtacttatctttcttaaagggtaagggccaaagctgatcattttctatctttctaaagatttaaaatagttgttggtgtacaactaataccgatttagtacagactgagttcatgagtgattactgcaggtgctgatagaaagcagagcttaattgtacaaataataactttttttgttttgacattcatatcacaaagaaatctaataatttcaggttataagtgcttgaaaattatatgttctttttttagtatcaaacttatttttttttcagttggtgcaatttgtgtgcacattcttgacttgtgctttttaaaatttagtttaagccttccttggtggtttgctgcttatttttcctggatagctgcctccttgttctgtattcacagatttatgcttctccatagtgtcacctttccatcagtcaaccagcctaggtacaacagcagcacctcccttagacgtagcagatagtcactaagcacctacactgcgcactctagggatggaggagagagtagtagacagaaaagtcaaaagccagtgtttataagccctcaagaaacttgaaatctagctctgtagacatgtggagaaagatcaagagancaaagtgttgttatggagtgtggactatttggatgtggaaaaaattagccagccttgaggttcccaatcagtatgttgtattatgttagaaaggcactactttctacctttctgaccccttcaggctggcacaggaaaggaggctggttggaagcctttaatcttgagtcttatcccacacaacctaatagaaagtgtcacccagggcaggttttccaagtgtggggttcctgctggtcacacaggacctcacattcaggaccctgaacttgattgaatgtttgctgctgctgttttgaacgtcttaattttttaacaagagaccccacatttttgttttgtactgggccttgtaaattggttgtggctttacttgaatctgggagtagtgaaagcaggttgagaaaagagcttcctacattgtgttccacttatatgaggctgatggtagaatccttttgatcccaaagattattattttggggctttttctttaggataattaatcctttatttgggactctagcagaggccttattcttctctgggaagaagttttgcataacagatgcatactacttatactaacaattaccaatgtattcttaatttggtttcagctatttggatggctcttttgcaaagtacatcctgttgctattgtgtttgctatattagcagcaatgtcaatacaaggttcagcaaatctgcaaacccagtggaatattgtaggggagttcagcaatttgccccaagaagaacttatagaatggatcaaatatagtactaaaccagatgcagtgtttgcgggtgccatgcccacgatggcaagtgttaagctctctgcacttcggcccattgtgaatcatccacattatgaagacgcaggcttgagagccagaacaaaaatagtatactcaatgtatagtcggaaagcagccgaagaagtgaagcgagaactgataaagttaaaagtgaactattacattctagaagagtcatggtgtgtaagaagatccaagcctggttgcagtatgcctgaaatttgggatgtagaagatcctgccaatgctgggaaaactcccttatgtaacctcttggtgaaggattccaaacctcacttcaccactgtattccagaacagtgtttacaaagtcctagaagttgtaaaagaatgactgctacatgacctgctgcctacggagaactacatctatgactagacattcactttgcaaataattgttgtgactctatgtttgctccagacacagagcttttattgtcacccaaagatgcctatgggaaccaaaagaatcaagctgaaccaagatttctgccagaatcaatttcctcaagccagaaggctttatcattcagtctgtgcaacggatttttttttaaataaaaacagacttctttgttgatttctccctttacc

SEQ ID NO: 434838 - DNA, 2170 bp, Homo sapiens
  misc_feature (670)..(670): n is a, c, g, or t
aaataatgaattacaaagtcttttaagtgattatagttaaagctcttcatggttttgtacttatctttcttaaagggtaagggccaaagctgatcattttctatctttctaaagatttaaaatagttgttggtgtacaactaataccgatttagtacagactgagttcatgagtgattactgcaggtgctgatagaaagcagagcttaattgtacaaataataactttttttgttttgacattcatatcacaaagaaatctaataatttcaggttataagtgcttgaaaattatatgttctttttttagtatcaaacttatttttttttcagttggtgcaatttgtgtgcacattcttgacttgtgctttttaaaatttagtttaagccttccttggtggtttgctgcttatttttcctggatagctgcctccttgttctgtattcacagatttatgcttctccatagtgtcacctttccatcagtcaaccagcctaggtacaacagcagcacctcccttagacgtagcagatagtcactaagcacctacactgcgcactctagggatggaggagagagtagtagacagaaaagtcaaaagccagtgtttataagccctcaagaaacttgaaatctagctctgtagacatgtggagaaagatcaagagancaaagtgttgttatggagtgtggactatttggatgtggaaaaaattagccagccttgaggttcccaatcagtatgttgtattatgttagaaaggcactactttctacctttctgaccccttcaggctggcacaggaaaggaggctggttggaagcctttaatcttgagtcttatcccacacaacctaatagaaagtgtcacccagggcaggttttccaagtgtggggttcctgctggtcacacaggacctcacattcaggaccctgaacttgattgaatgtttgctgctgctgttttgaacgtcttaattttttaacaagagaccccacatttttgttttgtactgggccttgtaaattggttgtggctttacttgaatctgggagtagtgaaagcaggttgagaaaagagcttcctacattgtgttccacttatatgaggctgatggtagaatccttttgatcccaaagattattattttggggctttttctttaggataattaatcctttatttgggactctagcagaggccttattcttctctgggaagaagttttgcataacagatgcatactacttatactaacaattaccaatgtattcttaatttggtttcagctatttggatggctcttttgcaaagtacatcctgttgctattgtgtttgctatattagcagcaatgtcaatacaaggttcagcaaatctgcaaacccagtggaatattgtaggggagttcagcaatttgccccaagaagaacttatagaatggatcaaatatagtactaaaccagatgcagtgtttgcgggtgccatgcccacgatggcaagtgttaagctctctgcacttcggcccattgtgaatcatccacattatgaagacgcaggcttgagagccagaacaaaaatagtatactcaatgtatagtcggaaagcagccgaagaagtgaagcgagaactgataaagttaaaagtgaactattacattctagaagagtcatggtgtgtaagaagatccaagcctggttgcagtatgcctgaaatttgggatgtagaagatcctgccaatgctgggaaaactcccttatgtaacctcttggtgaaggattccaaacctcacttcaccactgtattccagaacagtgtttacaaagtcctagaagttgtaaaagaatgactgctacatgacctgctgcctacggagaactacatctgtaatggttttaatgttttgctaagtcatgtgttgttcatatcccaaaaacttttatagatgactagacattcactttgcaaataattgttgtgactctatgtttgctccagacacagagcttttattgtcacccaaagatgcctatgggaaccaaaagaatcaagctgaaccaagatttctgccagaatcaatttcctcaagccagaaggctttatcattcagtctgtgcaacggatttttttttaaataaaaacagacttctttgttgatttctccctttacc

SEQ ID NO: 434839 - DNA, 391 bp, Homo sapiens
tttacatgatcttaagccacatgtgtctctgtcagtaatatttgtcacatgctagttttgctgtttatggaataaagtccagtagtttgttttacaacacaccgtttaaattatttgttaaaaataattttatttataaatagcaatttttacttggaatgtcttagtaaatttagcaagtatactatactacaaattttttttttcagtgtacccgtgtaatgtggacaccacctctccgtgaaagcttctcatatccatttcttgttcttcagatgttgctagtgactcatattctcaggtaactttgacttaaccttatttctttttgcattaaataattttaactaaaatttcttaagcttccataataaagtgaacataataaaat

SEQ ID NO: 434840 - DNA, 473 bp, Homo sapiens
agtgtgagatggagaatgggctgttttatagtcccttttcaacagtttgaattttgtttattatgggcatgtgcagttttcacaataaaaaacaaaggttttttgttttatgtgcattacttatatttttttcttggatttttccagatttctcttgcactttgttttgttttgatgtttgggaactcaatgttattaacttcttattatgcttcttctttggtaattatttgggtaagtattccttaacacttatatggctgtttttgaaactaatggtttaacaattttttcttcactggcttaggattcatcagggttttctgtaggaaccatcttaagtgtcttactgaatattctagatgtatggtgttcaagtactcaattctaaaacagggaaaaaaaaaacaaggaaaaattagtatcatttcagaaaagtttctatgctttcttctcccttcctcctttgcatt

SEQ ID NO: 434841 - DNA, 2432 bp, Homo sapiens
acgcacgccttgccccgccccttccggaggctcgccgtacgcatgcgccctccgtcccgcgctttgttgcgaaagcgagggggcgaggtgctgcggtgctagagcgcggcgcgaccggacgctgcgggcggggaagaggatggagactgtggcgtccgctgcaacggttggggctgcgcgtgagaaggtggcggtgtaggcacctgcgctcggggaaggctggcggcggcggccgagccatggcgggagacccccttctctgggctccctgaagtctcggggagccgtgacccatgggatcgttgagcagccgggtgctgcgccagccaagaccagcccttgcccagcaggcgcagggtgccagggcggggggctcggcccggaggccggacactggagacgatgcggcgggccacggattctgttactgtgcgggcagccacaagcgcaagcggagcagcgggtccttctgctactgtcaccctgactcggagacggacgaggatgaggaggagggggacgagcagcagcggctcctcaacacccctcgaaggaaaaaattaaagagtacatctaaatatatttatcaaacattatttttgaatggtgaaaacagtgacattaagatttgtgctctaggagaagaatggagcttacacaaaatatatttatgtcaatctggctacttttctagtatgttcagtggttcttggaaagaatccagcatgaatattattgaactggagattcctgaccagaacattgatgtagaagcactgcaggttgcatttggttcactgtatcgagatgatgtcttgataaagcccagtcgagttgttgccattttggcagcagcttgtttgctgcagttggacggtttaatacagcagtgtggtgagacaatgaaggaaacagttaatgtgaaaactgtatgtggctattacacatcagcagggacctatggattagattctgtaaagaaaaagtgccttgaatggcttctaaacaatttgatgactcaccagaatgttgaactttttaaagaactcagtataaatgtcatgaaacagctcattggttcatctaacttatttgtgatgcaagtggagatggatatatacactgctctaaaaaagtggatgttccttcaacttgtgccttcttggaatggatctttaaaacagcttttgacagaaacagatgtctggttttctaaacagaggaaagattttgaaggtatggcctttcttgaaactgaacaaggaaaaccatttgtgtcagtattcagacatttaaggttacaatatattatcagtgatctggcttctgcaagaattattgaacaagatgctgtagtaccttcagaatggctctcttctgtgtataaacagcagtggtttgctatgctgcgggcagaacaggacagtgaggtggggcctcaagaaatcaataaagaagaactagagggaaacagcatgaggtgtggtagaaagcttgccaaagatggtgaatactgctggcgttggacaggttttaacttcggcttcgacctacttgtaacttacaccaatcgatacatcattttcaaacgcaatacactgaatcagccatgtagcggatctgtcagtttacagcctcgaaggagcatagcatttagattacgtttggcttcttttgatagtagtggaaaactaatatgtagtagaacaactggctatcaaatacttacacttgaaaaggatcaggaacaagtggtgatgaacttggacagcaggcttctgatcttccctttatatatctgctgtaacttcttgtatatatcaccagaaaaaaagaattgaaaataatcgtcacccagaaaatccagaaaactgaagatttcatcagttggaaacagtagcactttgaaaactttttaggccagctttaatttaatggccctactgatattcacatcgaaggtgactaacaatgacaaaggccttatgaactgtacagacaatacagaagattattcttatcctcattgcatttctatgcatatgcgtaagaacattttaaagccaagaaaatatctgtcaaaccatttctgttagaacgatgtcaattcatgcttttaatttagcatcaatagaaaattgctgtaggtaaatctcacatttatctgcaacaaaatatagatttaatttttagcttaaactttgtttctaccttatgttagtggacctcagttatccatctgtaaatttctttttatttggctaaaataatctaaaagaataatttggttggccaattagaaatgcctttttcagttggtgtattgaaagctttcctttaacattttcacctgctcattgtgattcctccttttagtctaatatctttccaggtcatacttgtttttaatcattaaatattttcttcctggt

SEQ ID NO: 434842 - DNA, 439 bp, Homo sapiens
attgggcacgagggggcttttgcaagaattattgaacaagatgctgtagtctcagagaggggaaaaaattaatggctctcttctgtgtataaacagcagtggtttgctatgctgcgggcagaacaggacagtgaggtggggcctcaagaaatcaataaagaagaactagagggaaacagcatgaggtgtggtagaaagcttgccaaagatggtgaatactgctggcgttggacaggttttaacttcggcttcgacctacttgtaacttacaccaatcgatacatcattttcaaacgcaatacactgaatcagccatgtagcggatctgtcagtttacagcctcgaaggagcatagcatttaggtaggatgagatttccccaccccactcctcctcactccagagaaaatataagaaataaaaccttgataatttacacc

SEQ ID NO: 434843 - DNA, 4241 bp, Homo sapiens
acgcacgccttgccccgccccttccggaggctcgccgtacgcatgcgccctccgtcccgcgctttgttgcgaaagcgagggggcgaggtgctgcggtgctagagcgcggcgcgaccggacgctgcgggcggggaagaggatggagactgtggcgtccgctgcaacggttggggctgcgcgtgagaaggtggcggtgtaggcacctgcgctcggggaaggctggcggcggcggccgagccatggcgggagacccccttctctgggctccctgaagtctcggggagccgtgacccatgggatcgttgagcagccgggtgctgcgccagccaagaccagcccttgcccagcaggcgcagggtgccagggcggggggctcggcccggaggccggacactggagacgatgcggcgggccacggattctgttactgtgcgggcagccacaagcgcaagcggagcagcgggtccttctgctactgtcaccctgactcggagacggacgaggatgaggaggagggggacgagcagcagcggctcctcaacacccctcgaaggaaaaaattaaagagtacatctaaatatatttatcaaacattatttttgaatggtgaaaacagtgacattaagatttgtgctctaggagaagaatggagcttacacaaaatatatttatgtcaatctggctacttttctagtatgttcagtggttcttggaaagaatccagcatgaatattattgaactggagattcctgaccagaacattgatgtagaagcactgcaggttgcatttggttcactgtatcgagatgatgtcttgataaagcccagtcgagttgttgccattttggcagcagcttgtttgctgcagttggacggtttaatacagcagtgtggtgagacaatgaaggaaacagttaatgtgaaaactgtatgtggctattacacatcagcagggacctatggattagattctgtaaagaaaaagtgccttgaatggcttctaaacaatttgatgactcaccagaatgttgaactttttaaagaactcagtataaatgtcatgaaacagctcattggttcatctaacttatttgtgatgcaagtggagatggatatatacactgctctaaaaaagtggatgttccttcaacttgtgccttcttggaatggatctttaaaacagcttttgacagaaacagatgtctggttttctaaacagaggaaagattttgaaggtatggcctttcttgaaactgaacaaggaaaaccatttgtgtcagtattcagacatttaaggttacaatatattatcagtgatctggcttctgcaagaattattgaacaagatgctgtagtaccttcagaatggctctcttctgtgtataaacagcagtggtttgctatgctgcgggcagaacaggacagtgaggtggggcctcaagaaatcaataaagaagaactagagggaaacagcatgaggtgtggtagaaagcttgccaaagatggtgaatactgctggcgttggacaggttttaacttcggcttcgacctacttgtaacttacaccaatcgatacatcattttcaaacgcaatacactgaatcagccatgtagcggatctgtcagtttacagcctcgaaggagcatagcatttagattacgtttggcttcttttgatagtagtggaaaactaatatgtagtagaacaactggctatcaaatacttacacttgaaaaggatcaggaacaagtggtgatgaacttggacagcaggcttctgatcttccctttatatatctgctgtaacttcttgtatatatcaccagaaaaaaagaattgaaaataatcgtcacccagaaaatccagaaaactgaagatttcatcagttggaaacagtagcactttgaaaactttttaggccagctttaatttaatggccctactgatattcacatcgaaggtgactaacaatgacaaaggccttatgaactgtacagacaatacagaagattattcttatcctcattgcatttctatgcatatgcgtaagaacattttaaagccaagaaaatatctgtcaaaccatttctgttagaacgatgtcaattcatgcttttaatttagcatcaatagaaaattgctgtaggtaaatctcacatttatctgcaacaaaatatagatttaatttttagcttaaactttgtttctaccttatgttagtggacctcagttatccatctgtaaatttctttttatttggctaaaataatctaaaagaataatttggttggccaattagaaatgcctttttcagttggtgtattgaaagctttcctttaacattttcacctgctcattgtgattcctccttttagtctaatatctttccaggtcatacttgtttttaatcattaaatattttcttcctggttttggagactaagctgataaactttttttaaaacttaagcattgtcattgctattttttttaatttgactttcctaggagtttaagaacagtgaaagttagctttgcaccttcaaatgatcttgaatgagggaaaaatcagtttgattccaaggatatttcttgccttacatggtcttttctttgacagtctgtacacctttattattaggttttgaattatttatgtaccagatattatagttttaaacattttaatattctctgatctttagaattatttatgttcaaattttagttgggaactttgtttcctacttaagctcaggactttttaccctctgaattgagtgcctttgagtgacacatgctaatagaaatttcatagtaaatgtaaataaggtcagaggatgtaatatggagcctgatgatgaagcattaatgtaaaaatggaacttatttttgtcaaaaatgagatgtacacttgtcatgatttatgtatgttgaccttttgtgtttattactgttttgaaaatagccatgttcattttctttccagttagagtaagtacttctgtggttaatgtatatttttattatggtttttaaaatgggaatcatttttatgtatctgtgcaaataataaatgcccatttggaaaaagagtaagctcttacataaaatggaccaaaaaatcccccttaattgaaaccaaaattttttctttctagttaggtttttttcccaactccttttaacttttggaatttattaataatttttttcttttttaatgatatgcccataggttcataaattgcttttgttcttttaaaattcatccatttggtttaacttaaaggaaccttttaaatgcctcacccttgaccctcagagctggaatttaaatgtttctaatacagtgatttggctgttatcaagaggttacatttcagctgggtgtcagccaggtgtggtggctcacacttgtaagcccagcactttgggaggccgaggcaggcagatcatctgaggtcaggagtttaagatcagccatgaccaacatggtgaaaccccatctctattaaatacacaaaataaaaattagccaggcatggtggcacacgcctgtcatctcagctactcaggaggctgaggcaggagaatcacttgaacccaggaggcagaggttgcagtgagtggagattgcgccattgcactccaacctaggcgacagagtgagactccgtctcaaaaaaaaaaaaaaaaaaaagaggctactgtacttatttttatatttgactacattaggtctttttcacgggaagctgttgttttctttccgtctcattactgtataagagtttccttaccctttatgtattgaaaaatatataaattccaaacttaaattatttggataattaagtttttgcagatcttggaagtaaagataatgttttgatcatattaatgaataaagttaactgtttcatttcacttacataagttaactggccaaattggatttatatgtggtttcatccattggttctgtcctggccaagttgcttatgtcatccatagacaggataattctttcttcaatcacaagtaggttaatgttcttatttgagaagttgataattgtcaggtagtaattcacactggtagtaaagatgtgcttttgttttcttaccaaatatttttatgtgtttccagagttcttttcaatagaaatattttcaataaagtgttaatagtgtaagataaagtattgtataaaccatggtttgtgaaagctttgtgt

SEQ ID NO: 434844 - DNA, 4581 bp, Homo sapiens
acgcacgccttgccccgccccttccggaggctcgccgtacgcatgcgccctccgtcccgcgctttgttgcgaaagcgagggggcgaggtgctgcggtgctagagcgcggcgcgaccggacgctgcgggcggggaagaggatggagactgtggcgtccgctgcaacggttggggctgcgcgtgagaaggtggcggtgtaggcacctgcgctcggggaaggctggcggcggcggccgagccatggcgggagacccccttctctgggctccctgaagtctcggggagccgtgacccatgggatcgttgagcagccgggtgctgcgccagccaagaccagcccttgcccagcaggcgcagggtgccagggcggggggctcggcccggaggccggacactggagacgatgcggcgggccacggattctgttactgtgcgggcagccacaagcgcaagcggagcagcgggtccttctgctactgtcaccctgactcggagacggacgaggatgaggaggagggggacgagcagcagcggctcctcaacacccctcgaaggaaaaaattaaagagtacatctaaatatatttatcaaacattatttttgaatggtgaaaacagtgacattaagatttgtgctctaggagaagaatggagcttacacaaaatatatttatgtcaatctggctacttttctagtatgttcagtggttcttggaaagaatccagcatgaatattattgaactggagattcctgaccagaacattgatgtagaagcactgcaggttgcatttggttcactgtatcgagatgatgtcttgataaagcccagtcgagttgttgccattttggcagcagcttgtttgctgcagttggacggtttaatacagcagtgtggtgagacaatgaaggaaacagttaatgtgaaaactgtatgtggctattacacatcagcagggacctatggattagattctgtaaagaaaaagtgccttgaatggcttctaaacaatttgatgactcaccagaatgttgaactttttaaagaactcagtataaatgtcatgaaacagctcattggttcatctaacttatttgtgatgcaagtggagatggatatatacactgctctaaaaaagtggatgttccttcaacttgtgccttcttggaatggatctttaaaacagcttttgacagaaacagatgtctggttttctaaacagaggaaagattttgaaggtatggcctttcttgaaactgaacaaggaaaaccatttgtgtcagtattcagacatttaaggttacaatatattatcagtgatctggcttctgcaagaattattgaacaagatgctgtagtaccttcagaatggctctcttctgtgtataaacagcagtggtttgctatgctgcgggcagaacaggacagtgaggtggggcctcaagaaatcaataaagaagaactagagggaaacagcatgaggtgtggtagaaagcttgccaaagatggtgaatactgctggcgttggacaggttttaacttcggcttcgacctacttgtaacttacaccaatcgatacatcattttcaaacgcaatacactgaatcagccatgtagcggatctgtcagtttacagcctcgaaggagcatagcatttagattacgtttggcttcttttgatagtagtggaaaactaatatgtagtagaacaactggctatcaaatacttacacttgaaaaggatcaggaacaagtggtgatgaacttggacagcaggcttctgatcttccctttatatatctgctgtaacttcttgtatatatcaccagaaaaaaagaattgaaaataatcgtcacccagaaaatccagaaaactgaagatttcatcagttggaaacagtagcactttgaaaactttttaggccagctttaatttaatggccctactgatattcacatcgaaggtgactaacaatgacaaaggccttatgaactgtacagacaatacagaagattattcttatcctcattgcatttctatgcatatgcgtaagaacattttaaagccaagaaaatatctgtcaaaccatttctgttagaacgatgtcaattcatgcttttaatttagcatcaatagaaaattgctgtaggtaaatctcacatttatctgcaacaaaatatagatttaatttttagcttaaactttgtttctaccttatgttagtggacctcagttatccatctgtaaatttctttttatttggctaaaataatctaaaagaataatttggttggccaattagaaatgcctttttcagttggtgtattgaaagctttcctttaacattttcacctgctcattgtgattcctccttttagtctaatatctttccaggtcatacttgtttttaatcattaaatattttcttcctggttttggagactaagctgataaactttttttaaaacttaagcattgtcattgctattttttttaatttgactttcctaggagtttaagaacagtgaaagttagctttgcaccttcaaatgatcttgaatgagggaaaaatcagtttgattccaaggatatttcttgccttacatggtcttttctttgacagtctgtacacctttattattaggttttgaattatttatgtaccagatattatagttttaaacattttaatattctctgatctttagaattatttatgttcaaattttagttgggaactttgtttcctacttaagctcaggactttttaccctctgaattgagtgcctttgagtgacacatgctaatagaaatttcatagtaaatgtaaataaggtcagaggatgtaatatggagcctgatgatgaagcattaatgtaaaaatggaacttatttttgtcaaaaatgagatgtacacttgtcatgatttatgtatgttgaccttttgtgtttattactgttttgaaaatagccatgttcattttctttccagttagagtaagtacttctgtggttaatgtatatttttattatggtttttaaaatgggaatcatttttatgtatctgtgcaaataataaatgcccatttggaaaaagagtaagctcttacataaaatggaccaaaaaatcccccttaattgaaaccaaaattttttctttctagttaggtttttttcccaactccttttaacttttggaatttattaataatttttttcttttttaatgatatgcccataggttcataaattgcttttgttcttttaaaattcatccatttggtttaacttaaaggaaccttttaaatgcctcacccttgaccctcagagctggaatttaaatgtttctaatacagtgatttggctgttatcaagaggttacatttcagctgggtgtcagccaggtgtggtggctcacacttgtaagcccagcactttgggaggccgaggcaggcagatcatctgaggtcaggagtttaagatcagccatgaccaacatggtgaaaccccatctctattaaatacacaaaataaaaattagccaggcatggtggcacacgcctgtcatctcagctactcaggaggctgaggcaggagaatcacttgaacccaggaggcagaggttgcagtgagtggagattgcgccattgcactccaacctaggcgacagagtgagactccgtctcaaaaaaaaaaaaaaaaaaaagaggctactgtacttatttttatatttgactacattaggtctttttcacgggaagctgttgttttctttccgtctcattactgtataagagtttccttaccctttatgtattgaaaaatatataaattccaaacttaaattatttggataattaagtttttgcagatcttggaagtaaagataatgttttgatcatattaatgaataaagttaactgtttcatttcacttacataagttaactggccaaattggatttatatgtggtttcatccattggttctgtcctggccaagttgcttatgtcatccatagacaggataattctttcttcaatcacaagtaggttaatgttcttatttgagaagttgataattgtcaggtagtaattcacactggtagtaaagatgtgcttttgttttcttaccaaatatttttatgtgtttccagagttcttttcaatagaaatattttcaataaagtgttaatagtgtaagataaaaaaaaaaaaaaaaaaaaaaaaaaaaaatgttgggggggctgggccgaggaaaggtttttaaaaacccacttgcgtgtgtggcgggggggggcccaaggttggtgtacgtgggcgacacttgcggtacataacggtggtccccaaagaggagaacctccgggcgcatggcacatcatcggtgcgcgtgtgggttctccccccatataaaaaaaagcgccgggcggggaaacaccgagacgttgtccttggacgcaaatctcacaggatggaggggtcagagggggcctatcagcggggagttccttatccaacagggggaggtcaaagggggaggggcagaaaattaaaatagcccgggacaagggggggggagcgg

SEQ ID NO: 434845 - DNA, 4219 bp, Homo sapiens
acgcacgccttgccccgccccttccggaggctcgccgtacgcatgcgccctccgtcccgcgctttgttgcgaaagcgagggggcgaggtgctgcggtgctagagcgcggcgcgaccggacgctgcgggcggggaagaggatggagactgtggcgtccgctgcaacggttggggctgcgcgtgagaaggtggcggtgtaggcacctgcgctcggggaaggctggcggcggcggccgagccatggcgggagacccccttctctgggctccctgaagtctcggggagccgtgacccatgggatcgttgagcagccgggtgctgcgccagccaagaccagcccttgcccagcaggcgcagggtgccagggcggggggctcggcccggaggccggacactggagacgatgcggcgggccacggattctgttactgtgcgggcagccacaagcgcaagcggagcagcgggtccttctgctactgtcaccctgactcggagacggacgaggatgaggaggagggggacgagcagcagcggctcctcaacacccctcgaaggaaaaaattaaagagtacatctaaatatatttatcaaacattatttttgaatggtgaaaacagtgacattaagatttgtgctctaggagaagaatggagcttacacaaaatatatttatgtcaatctggctacttttctagtatgttcagtggttcttggaaagaatccagcatgaatattattgaactggagattcctgaccagaacattgatgtagaagcactgcaggttgcatttggttcactgtatcgagatgatgtcttgataaagcccagtcgagttgttgccattttggcagcagcttgtttgctgcagttggacggtttaatacagcagtgtggtgagacaatgaaggaaacagttaatgtgaaaactgtatgtggctattacacatcagcagggacctatggattagattctgtaaagaaaaagtgccttgaatggcttctaaacaatttgatgactcaccagaatgttgaactttttaaagaactcagtataaatgtcatgaaacagctcattggttcatctaacttatttgtgatgcaagtggagatggatatatacactgctctaaaaaagtggatgttccttcaacttgtgccttcttggaatggatctttaaaacagcttttgacagaaacagatgtctggttttctaaacagaggaaagattttgaaggtatggcctttcttgaaactgaacaaggaaaaccatttgtgtcagtattcagacatttaaggttacaatatattatcagtgatctggcttctgcaagaattattgaacaagatgctgtagtaccttcagaatggctctcttctgtgtataaacagcagtggtttgctatgctgcgggcagaacaggacagtgaggtggggcctcaagaaatcaataaagaagaactagagggaaacagcatgaggtgtggtagaaagcttgccaaagatggtgaatactgctggcgttggacaggttttaacttcggcttcgacctacttgtaacttacaccaatcgatacatcattttcaaacgcaatacactgaatcagccatgtagcggatctgtcagtttacagcctcgaaggagcatagcatttagattacgtttggcttcttttgatagtagtggaaaactaatatgtagtagaacaactggctatcaaatacttacacttgaaaaggatcaggaacaagtggtgatgaacttggacagcaggcttctgatcttccctttatatatctgctgtaacttcttgtatatatcaccagaaaaaaagaattgaaaataatcgtcacccagaaaatccagaaaactgaagatttcatcagttggaaacagtagcactttgaaaactttttaggccagctttaatttaatggccctactgatattcacatcgaaggtgactaacaatgacaaaggccttatgaactgtacagacaatacagaagattattcttatcctcattgcatttctatgcatatgcgtaagaacattttaaagccaagaaaatatctgtcaaaccatttctgttagaacgatgtcaattcatgcttttaatttagcatcaatagaaatttatctgcaacaaaatatagatttaatttttagcttaaactttgtttctaccttatgttagtggacctcagttatccatctgtaaatttctttttatttggctaaaataatctaaaagaataatttggttggccaattagaaatgcctttttcagttggtgtattgaaagctttcctttaacattttcacctgctcattgtgattcctccttttagtctaatatctttccaggtcatacttgtttttaatcattaaatattttcttcctggttttggagactaagctgataaactttttttaaaacttaagcattgtcattgctattttttttaatttgactttcctaggagtttaagaacagtgaaagttagctttgcaccttcaaatgatcttgaatgagggaaaaatcagtttgattccaaggatatttcttgccttacatggtcttttctttgacagtctgtacacctttattattaggttttgaattatttatgtaccagatattatagttttaaacattttaatattctctgatctttagaattatttatgttcaaattttagttgggaactttgtttcctacttaagctcaggactttttaccctctgaattgagtgcctttgagtgacacatgctaatagaaatttcatagtaaatgtaaataaggtcagaggatgtaatatggagcctgatgatgaagcattaatgtaaaaatggaacttatttttgtcaaaaatgagatgtacacttgtcatgatttatgtatgttgaccttttgtgtttattactgttttgaaaatagccatgttcattttctttccagttagagtaagtacttctgtggttaatgtatatttttattatggtttttaaaatgggaatcatttttatgtatctgtgcaaataataaatgcccatttggaaaaagagtaagctcttacataaaatggaccaaaaaatcccccttaattgaaaccaaaattttttctttctagttaggtttttttcccaactccttttaacttttggaatttattaataatttttttcttttttaatgatatgcccataggttcataaattgcttttgttcttttaaaattcatccatttggtttaacttaaaggaaccttttaaatgcctcacccttgaccctcagagctggaatttaaatgtttctaatacagtgatttggctgttatcaagaggttacatttcagctgggtgtcagccaggtgtggtggctcacacttgtaagcccagcactttgggaggccgaggcaggcagatcatctgaggtcaggagtttaagatcagccatgaccaacatggtgaaaccccatctctattaaatacacaaaataaaaattagccaggcatggtggcacacgcctgtcatctcagctactcaggaggctgaggcaggagaatcacttgaacccaggaggcagaggttgcagtgagtggagattgcgccattgcactccaacctaggcgacagagtgagactccgtctcaaaaaaaaaaaaaaaaaaaagaggctactgtacttatttttatatttgactacattaggtctttttcacgggaagctgttgttttctttccgtctcattactgtataagagtttccttaccctttatgtattgaaaaatatataaattccaaacttaaattatttggataattaagtttttgcagatcttggaagtaaagataatgttttgatcatattaatgaataaagttaactgtttcatttcacttacataagttaactggccaaattggatttatatgtggtttcatccattggttctgtcctggccaagttgcttatgtcatccatagacaggataattctttcttcaatcacaagtaggttaatgttcttatttgagaagttgataattgtcaggtagtaattcacactggtagtaaagatgtgcttttgttttcttaccaaatatttttatgtgtttccagagttcttttcaatagaaatattttcaataaagtgttaatagtgtaagataaagtattgtataaaccatggtttgtgaaagctttgtgt

SEQ ID NO: 434846 - DNA, 4362 bp, Homo sapiens
acgcacgccttgccccgccccttccggaggctcgccgtacgcatgcgccctccgtcccgcgctttgttgcgaaagcgagggggcgaggtgctgcggtgctagagcgcggcgcgaccggacgctgcgggcggggaagaggatggagactgtggcgtccgctgcaacggttggggctgcgcgtgagaaggtggcggtgtaggcacctgcgctcggggaaggctggcggcggcggccgagccatggcgggagacccccttctctgggctccctgaagtctcggggagccgtgacccatgggatcgttgagcagccgggtgctgcgccagccaagaccagcccttgcccagcaggcgcagggtgccagggcggggggctcggcccggaggccggacactggagacgatgcggcgggccacggattctgttactgtgcgggcagccacaagcgcaagcggagcagcgggtccttctgctactgtcaccctgactcggagacggacgaggatgaggaggagggggacgagcagcagcggctcctcaacacccctcgaaggaaaaaattaaagagtacatctaaatatatttatcaaacattatttttgaatggtgaaaacagtgacattaagatttgtgctctaggagaagaatggagcttacacaaaatatatttatgtcaatctggctacttttctagtatgttcagtggttcttggaaagaatccagcatgaatattattgaactggagattcctgaccagaacattgatgtagaagtgctcttgctgctcccctcattggtggtccacatggaagtacctggtgcgatacaaaggcaaagaaatactttagttaagaatatttacagcctgtaatcccagcacgttgggaggccaagcactgcaggttgcatttggttcactgtatcgagatgatgtcttgataaagcccagtcgagttgttgccattttggcagcagcttgtttgctgcagttggacggtttaatacagcagtgtggtgagacaatgaaggaaacagttaatgtgaaaactgtatgtggctattacacatcagcagggacctatggattagattctgtaaagaaaaagtgccttgaatggcttctaaacaatttgatgactcaccagaatgttgaactttttaaagaactcagtataaatgtcatgaaacagctcattggttcatctaacttatttgtgatgcaagtggagatggatatatacactgctctaaaaaagtggatgttccttcaacttgtgccttcttggaatggatctttaaaacagcttttgacagaaacagatgtctggttttctaaacagaggaaagattttgaaggtatggcctttcttgaaactgaacaaggaaaaccatttgtgtcagtattcagacatttaaggttacaatatattatcagtgatctggcttctgcaagaattattgaacaagatgctgtagtaccttcagaatggctctcttctgtgtataaacagcagtggtttgctatgctgcgggcagaacaggacagtgaggtggggcctcaagaaatcaataaagaagaactagagggaaacagcatgaggtgtggtagaaagcttgccaaagatggtgaatactgctggcgttggacaggttttaacttcggcttcgacctacttgtaacttacaccaatcgatacatcattttcaaacgcaatacactgaatcagccatgtagcggatctgtcagtttacagcctcgaaggagcatagcatttagattacgtttggcttcttttgatagtagtggaaaactaatatgtagtagaacaactggctatcaaatacttacacttgaaaaggatcaggaacaagtggtgatgaacttggacagcaggcttctgatcttccctttatatatctgctgtaacttcttgtatatatcaccagaaaaaaagaattgaaaataatcgtcacccagaaaatccagaaaactgaagatttcatcagttggaaacagtagcactttgaaaactttttaggccagctttaatttaatggccctactgatattcacatcgaaggtgactaacaatgacaaaggccttatgaactgtacagacaatacagaagattattcttatcctcattgcatttctatgcatatgcgtaagaacattttaaagccaagaaaatatctgtcaaaccatttctgttagaacgatgtcaattcatgcttttaatttagcatcaatagaaaattgctgtaggtaaatctcacatttatctgcaacaaaatatagatttaatttttagcttaaactttgtttctaccttatgttagtggacctcagttatccatctgtaaatttctttttatttggctaaaataatctaaaagaataatttggttggccaattagaaatgcctttttcagttggtgtattgaaagctttcctttaacattttcacctgctcattgtgattcctccttttagtctaatatctttccaggtcatacttgtttttaatcattaaatattttcttcctggttttggagactaagctgataaactttttttaaaacttaagcattgtcattgctattttttttaatttgactttcctaggagtttaagaacagtgaaagttagctttgcaccttcaaatgatcttgaatgagggaaaaatcagtttgattccaaggatatttcttgccttacatggtcttttctttgacagtctgtacacctttattattaggttttgaattatttatgtaccagatattatagttttaaacattttaatattctctgatctttagaattatttatgttcaaattttagttgggaactttgtttcctacttaagctcaggactttttaccctctgaattgagtgcctttgagtgacacatgctaatagaaatttcatagtaaatgtaaataaggtcagaggatgtaatatggagcctgatgatgaagcattaatgtaaaaatggaacttatttttgtcaaaaatgagatgtacacttgtcatgatttatgtatgttgaccttttgtgtttattactgttttgaaaatagccatgttcattttctttccagttagagtaagtacttctgtggttaatgtatatttttattatggtttttaaaatgggaatcatttttatgtatctgtgcaaataataaatgcccatttggaaaaagagtaagctcttacataaaatggaccaaaaaatcccccttaattgaaaccaaaattttttctttctagttaggtttttttcccaactccttttaacttttggaatttattaataatttttttcttttttaatgatatgcccataggttcataaattgcttttgttcttttaaaattcatccatttggtttaacttaaaggaaccttttaaatgcctcacccttgaccctcagagctggaatttaaatgtttctaatacagtgatttggctgttatcaagaggttacatttcagctgggtgtcagccaggtgtggtggctcacacttgtaagcccagcactttgggaggccgaggcaggcagatcatctgaggtcaggagtttaagatcagccatgaccaacatggtgaaaccccatctctattaaatacacaaaataaaaattagccaggcatggtggcacacgcctgtcatctcagctactcaggaggctgaggcaggagaatcacttgaacccaggaggcagaggttgcagtgagtggagattgcgccattgcactccaacctaggcgacagagtgagactccgtctcaaaaaaaaaaaaaaaaaaaagaggctactgtacttatttttatatttgactacattaggtctttttcacgggaagctgttgttttctttccgtctcattactgtataagagtttccttaccctttatgtattgaaaaatatataaattccaaacttaaattatttggataattaagtttttgcagatcttggaagtaaagataatgttttgatcatattaatgaataaagttaactgtttcatttcacttacataagttaactggccaaattggatttatatgtggtttcatccattggttctgtcctggccaagttgcttatgtcatccatagacaggataattctttcttcaatcacaagtaggttaatgttcttatttgagaagttgataattgtcaggtagtaattcacactggtagtaaagatgtgcttttgttttcttaccaaatatttttatgtgtttccagagttcttttcaatagaaatattttcaataaagtgttaatagtgtaagataaagtattgtataaaccatggtttgtgaaagctttgtgt

SEQ ID NO: 434847 - DNA, 3097 bp, Homo sapiens
tctagcggaccccctgatatgtctggatcattacaacagctgacgacagaaacagagtgtctggattactaaacagaggaaagattttgaaggtatggcctttcttgaaactgaacaaggaaaaccatttgtgtcagtattcagacatttaaggttacaatatattatcagtgatctggcttctgcaagaattattgaacaagatgctgtagtaccttcagaatggctctcttctgtgtataaacagcagtggtttgctatgctgcgggcagaacaggacagtgaggtggggcctcaagaaatcaataaagaagaactagagggaaacagcatgaggtgtggtagaaagcttgccaaagatggtgaatactgctggcgttggacaggttttaacttcggcttcgacctacttgtaacttacaccaatcgatacatcattttcaaacgcaatacactgaatcagccatgtagcggatctgtcagtttacagcctcgaaggagcatagcatttagattacgtttggcttcttttgatagtagtggaaaactaatatgtagtagaacaactggctatcaaatacttacacttgaaaaggatcaggaacaagtggtgatgaacttggacagcaggcttctgatcttccctttatatatctgctgtaacttcttgtatatatcaccagaaaaaaagaattgaaaataatcgtcacccagaaaatccagaaaactgaagatttcatcagttggaaacagtagcactttgaaaactttttaggccagctttaatttaatggccctactgatattcacatcgaaggtgactaacaatgacaaaggccttatgaactgtacagacaatacagaagattattcttatcctcattgcatttctatgcatatgcgtaagaacattttaaagccaagaaaatatctgtcaaaccatttctgttagaacgatgtcaattcatgcttttaatttagcatcaatagaaaattgctgtaggtaaatctcacatttatctgcaacaaaatatagatttaatttttagcttaaactttgtttctaccttatgttagtggacctcagttatccatctgtaaatttctttttatttggctaaaataatctaaaagaataatttggttggccaattagaaatgcctttttcagttggtgtattgaaagctttcctttaacattttcacctgctcattgtgattcctccttttagtctaatatctttccaggtcatacttgtttttaatcattaaatattttcttcctggttttggagactaagctgataaactttttttaaaacttaagcattgtcattgctattttttttaatttgactttcctaggagtttaagaacagtgaaagttagctttgcaccttcaaatgatcttgaatgagggaaaaatcagtttgattccaaggatatttcttgccttacatggtcttttctttgacagtctgtacacctttattattaggttttgaattatttatgtaccagatattatagttttaaacattttaatattctctgatctttagaattatttatgttcaaattttagttgggaactttgtttcctacttaagctcaggactttttaccctctgaattgagtgcctttgagtgacacatgctaatagaaatttcatagtaaatgtaaataaggtcagaggatgtaatatggagcctgatgatgaagcattaatgtaaaaatggaacttatttttgtcaaaaatgagatgtacacttgtcatgatttatgtatgttgaccttttgtgtttattactgttttgaaaatagccatgttcattttctttccagttagagtaagtacttctgtggttaatgtatatttttattatggtttttaaaatgggaatcatttttatgtatctgtgcaaataataaatgcccatttggaaaaagagtaagctcttacataaaatggaccaaaaaatcccccttaattgaaaccaaaattttttctttctagttaggtttttttcccaactccttttaacttttggaatttattaataatttttttcttttttaatgatatgcccataggttcataaattgcttttgttcttttaaaattcatccatttggtttaacttaaaggaaccttttaaatgcctcacccttgaccctcagagctggaatttaaatgtttctaatacagtgatttggctgttatcaagaggttacatttcagctgggtgtcagccaggtgtggtggctcacacttgtaagcccagcactttgggaggccgaggcaggcagatcatctgaggtcaggagtttaagatcagccatgaccaacatggtgaaaccccatctctattaaatacacaaaataaaaattagccaggcatggtggcacacgcctgtcatctcagctactcaggaggctgaggcaggagaatcacttgaacccaggaggcagaggttgcagtgagtggagattgcgccattgcactccaacctaggcgacagagtgagactccgtctcaaaaaaaaaaaaaaaaaaaagaggctactgtacttatttttatatttgactacattaggtctttttcacgggaagctgttgttttctttccgtctcattactgtataagagtttccttaccctttatgtattgaaaaatatataaattccaaacttaaattatttggataattaagtttttgcagatcttggaagtaaagataatgttttgatcatattaatgaataaagttaactgtttcatttcacttacataagttaactggccaaattggatttatatgtggtttcatccattggttctgtcctggccaagttgcttatgtcatccatagacaggataattctttcttcaatcacaagtaggttaatgttcttatttgagaagttgataattgtcaggtagtaattcacactggtagtaaagatgtgcttttgttttcttaccaaatatttttatgtgtttccagagttcttttcaatagaaatattttcaataaagtgttaatagtgtaagataaagtattgtataaaccatggtttgtgaaagctttgtgt

SEQ ID NO: 434848 - DNA, 2892 bp, Homo sapiens
gttttgggtggtaagccttaagaaaaagtcactgacaaaaagtcgaccacccatgagggaaatacttggaatgagttagagacaaaaagacattttgaattttttattttctacttgctaatatgataaactgaaataagtcttctctcttgtattttttagtactgctggcgttggacaggttttaacttcggcttcgacctacttgtaacttacaccaatcgatacatcattttcaaacgcaatacactgaatcagccatgtagcggatctgtcagtttacagcctcgaaggagcatagcatttagattacgtttggcttcttttgatagtagtggaaaactaatatgtagtagaacaactggctatcaaatacttacacttgaaaaggatcaggaacaagtggtgatgaacttggacagcaggcttctgatcttccctttatatatctgctgtaacttcttgtatatatcaccagaaaaaaagaattgaaaataatcgtcacccagaaaatccagaaaactgaagatttcatcagttggaaacagtagcactttgaaaactttttaggccagctttaatttaatggccctactgatattcacatcgaaggtgactaacaatgacaaaggccttatgaactgtacagacaatacagaagattattcttatcctcattgcatttctatgcatatgcgtaagaacattttaaagccaagaaaatatctgtcaaaccatttctgttagaacgatgtcaattcatgcttttaatttagcatcaatagaaaattgctgtaggtaaatctcacatttatctgcaacaaaatatagatttaatttttagcttaaactttgtttctaccttatgttagtggacctcagttatccatctgtaaatttctttttatttggctaaaataatctaaaagaataatttggttggccaattagaaatgcctttttcagttggtgtattgaaagctttcctttaacattttcacctgctcattgtgattcctccttttagtctaatatctttccaggtcatacttgtttttaatcattaaatattttcttcctggttttggagactaagctgataaactttttttaaaacttaagcattgtcattgctattttttttaatttgactttcctaggagtttaagaacagtgaaagttagctttgcaccttcaaatgatcttgaatgagggaaaaatcagtttgattccaaggatatttcttgccttacatggtcttttctttgacagtctgtacacctttattattaggttttgaattatttatgtaccagatattatagttttaaacattttaatattctctgatctttagaattatttatgttcaaattttagttgggaactttgtttcctacttaagctcaggactttttaccctctgaattgagtgcctttgagtgacacatgctaatagaaatttcatagtaaatgtaaataaggtcagaggatgtaatatggagcctgatgatgaagcattaatgtaaaaatggaacttatttttgtcaaaaatgagatgtacacttgtcatgatttatgtatgttgaccttttgtgtttattactgttttgaaaatagccatgttcattttctttccagttagagtaagtacttctgtggttaatgtatatttttattatggtttttaaaatgggaatcatttttatgtatctgtgcaaataataaatgcccatttggaaaaagagtaagctcttacataaaatggaccaaaaaatcccccttaattgaaaccaaaattttttctttctagttaggtttttttcccaactccttttaacttttggaatttattaataatttttttcttttttaatgatatgcccataggttcataaattgcttttgttcttttaaaattcatccatttggtttaacttaaaggaaccttttaaatgcctcacccttgaccctcagagctggaatttaaatgtttctaatacagtgatttggctgttatcaagaggttacatttcagctgggtgtcagccaggtgtggtggctcacacttgtaagcccagcactttgggaggccgaggcaggcagatcatctgaggtcaggagtttaagatcagccatgaccaacatggtgaaaccccatctctattaaatacacaaaataaaaattagccaggcatggtggcacacgcctgtcatctcagctactcaggaggctgaggcaggagaatcacttgaacccaggaggcagaggttgcagtgagtggagattgcgccattgcactccaacctaggcgacagagtgagactccgtctcaaaaaaaaaaaaaaaaaaaagaggctactgtacttatttttatatttgactacattaggtctttttcacgggaagctgttgttttctttccgtctcattactgtataagagtttccttaccctttatgtattgaaaaatatataaattccaaacttaaattatttggataattaagtttttgcagatcttggaagtaaagataatgttttgatcatattaatgaataaagttaactgtttcatttcacttacataagttaactggccaaattggatttatatgtggtttcatccattggttctgtcctggccaagttgcttatgtcatccatagacaggataattctttcttcaatcacaagtaggttaatgttcttatttgagaagttgataattgtcaggtagtaattcacactggtagtaaagatgtgcttttgttttcttaccaaatatttttatgtgtttccagagttcttttcaatagaaatattttcaataaagtgttaatagtgtaagataaagtattgtataaaccatggtttgtgaaagctttgtgt

SEQ ID NO: 434849 - DNA, 1224 bp, Homo sapiens
ctaccttggcctcccaaattgttgagattataggcatgagccaccacgtccagccctcactacctttctttaccactactcttattctcggtcgtgttgatttcaatatctctgttccctgaccttccttcccccatgctcttgtgctccaccctacctcaggcatccattcctgtgagcataccctcaatttttgcattattaattactacaccaccttcaaaatctccatttcaggcatcccgttttcagaccccacctcgtctttctagctcattctctctagcacctggatccaacctaggcgacagagtgagactccgtctcaaaaaaaaaaaaaaaaaaaagaggctactgtacttatttttatatttgactacattaggtctttttcacgggaagctgttgttttctttccgtctcattactgtataagagtttccttaccctttatgtattgaaaaatatataaattccaaacttaaattatttggataattaagtttttgcagatcttggaagtaaagataatgttttgatcatattaatgaataaagttaactgtttcatttcacttacataagttaactggccaaattggatttatatgtggtttcatccattggttctgtcctggccaagttgcttatgtcatccatagacaggataattctttcttcaatcacaagtaggttaatgttcttatttgagaagttgataattgtcaggtagtaattcacactggtagtaaagatgtgcttttgttttcttaccaaatatttttatgtgtttccagagttcttttcaatagaaatattttcaataaagtgttaatagtgtaagataaaaaaaaaaaaaaaaaaaaaaaaaaaaaatgttgggggggctgggccgaggaaaggtttttaaaaacccacttgcgtgtgtggcgggggggggcccaaggttggtgtacgtgggcgacacttgcggtacataacggtggtccccaaagaggagaacctccgggcgcatggcacatcatcggtgcgcgtgtgggttctccccccatataaaaaaaagcgccgggcggggaaacaccgagacgttgtccttggacgcaaatctcacaggatggaggggtcagagggggcctatcagcggggagttccttatccaacagggggaggtcaaagggggaggggcagaaaattaaaatagcccgggacaagggggggggagcgg

SEQ ID NO: 434850 - DNA, 5343 bp, Homo sapiens
  misc_feature (1363)..(1363): n is a, c, g, or t
  misc_feature (1561)..(1561): n is a, c, g, or t
  misc_feature (1742)..(1742): n is a, c, g, or t
  misc_feature (1990)..(1990): n is a, c, g, or t
  misc_feature (2235)..(2235): n is a, c, g, or t
  misc_feature (2370)..(2370): n is a, c, g, or t
  misc_feature (2407)..(2407): n is a, c, g, or t
  misc_feature (3178)..(3178): n is a, c, g, or t
cccctccttggccccaagcctggccagttgtgctaaaagtagcgctgacccaatcatggtctgtccagaggccaggactattttgactctgtcctcaggattcatgtggtctgaggcgtgtacgagctggactgctcccatgaccactcagatgtggtgccaggaatgttctggctgacacacctgtccccagagctgctaaacgctgctacttaccccacagccccacagcgtgcgtcctgagatactggttccaggagggataggtggtgaggacttgcaccaggcggtggttaggggctttctatcctcattcataagagagcaaccagccagttttgggtggcattgcttctcatagctccccactggactggagcatgttaatctgtgtatttgtgacattcactcagaatgggggcccgacaacagaaggctccttagagacagcaaacattattcttccaaggaaggctggaggatttccttctctggaggccgttaatagtggaagaacttttcatcctactggcttaaatataagtcccagtgcaaggctcctgcctggaacatcatcctcccctctactagattggctttgccattcttcaaagtccaactgaaatccccttccctaaggacttccttcttttgtcaccagaggggtacttagcacagacttcccattaatagagaggctttttcctcctttttttcttcccatctagtctgtgagttcttaacttcagatatctttcacttgccagcacccaggatgcggcagatgcccaacagttgtgggctggtgaaccagcacagccagcacggccactagctctgctcaagaaacaagtctgcgtctccttattgtgctagttcattcctcagttcactacacaatccttcaacgttggcctctttgcctgtctgcacactgtgcctggtctgcacactggaaataaacaatgtctaatgagatggggtccctgcctgagagaagctcatggcctagtgggggacacatgtcttgccatctagtgggcgaaaagcaatcattcagaggccacggtgaccagctttgcctcagggagtcgggaagggccttgcagaggctgtgatctgtggcaggccctcacagaagctcagaaaggcacgcgaggacaggcaggaggaagcgcgctccagaggagggccagcacgtgcgaaggcatggaggcatgaaaggcccttgcacctgggaaggccaaaaaatcaccatatttttgctgctttttgtctacagaccagctggctatggacagggaggctgcttggctctttcccacaaatagggaggttggagccaggcactagggcttgaccncagaaggtgtcagagctcccagagtccttgcctctctgccccctggggccatctgcaccctctcctcccatcctgcctccgctccttcccaattagaatgaaaattggctcctgtaatgctgatgtgcctactttcttgttagaatcttaataccgtatgaatcacaagtcccagctgccttggcatggtggtcaggntcagaggtttgaattaaagcaacacatggtcctgatggcttcatctgggggatgctgaggtaggggagaggctgctcctccttttccaccgataatgcgagtaccaccaaggctgctgaccgcagccttttccctcagaaagttctaagcaccttgtaacaccccctgataataagagtantcgtaccttttattgagcattttacaagtataatttcatttatttgtcagatgacttgctgatgtgtagttaggtgacgtgcctgagatttcatagctagtcataatagagccagattttgagacctcccatctcggggaccttagacagctcaagcaccactttctaataccactccaatcaaaaggaatgattttagcctgaggatgctggatggcttgatcttctgccataagagcccccaaacntcccctagcttccaggacaaaactctgacttattcagacgttcgccacaccttaattgcatgctgggtgccaggcacagggctgtggcctgaacaagtcctagggatgcatagactcagccatcctgtggcctccctcccaatggggtcacgactctcttcccactgccacccagagccttctcattctttaatgtgacctgttcagtcttccccaccactgcatttctctccttcttagcctcnacagggctcatcacccaaaccacagcattgagtgctgtgcttttgctttccttcactcagcaggcatttgtatgtcatttgtatgtggaaggcactggggatacattcagtatcccagtgccgtcatgaagcacngtctgagagagggagacagatgcgtagtcagtgcacnggctgcagcatgtgggggactgagagagacacctgccctgctctctttctcacctccactcagtcctataaagtggcatcatgaagcaatggaagaaagactggacccaaatcggaagacctgagctggtgctaccatctgggggacactggaggagtcattccatctcttcatctgcaaagtgggaataacaatacctaacctgcctgcctttcagagtttcaatgatgtgctttattaaataaaatgatgattttttaatgaataaaatgcatgaaagcattttacaggttataaagcactatacaagtagtactcttctgtctcctagccatgcctagcataaatctgggcacatagtagatattcagtaaatagcagttaacttaaattgatccattcaccccgcctaccaccttctatgggcgtttgaggccattggaaaccctaacactgacaatgcctgccctgcctgggggcggcagtgaggatcaagtgagaaggatgtgccttggaagctgtcagtactgaaccatcttggtcttgggaaacctccctggctccccattgtgggggcttggctgaggactggccagcccgggatgtggagtctcgggcatggggcaaccttcctccaagccctaggtccattctctgtggggagcaaacatgacacttccccaattttggttcccaaaccactcgggctgcctggctcaggatagtgcccatggcgtgggcacagtcccttgggggggccagatcagcatntgcccagccctcactagtctccacctctcgtttcagcacccctaccccacggaggatgagaagagaggaggaggaggaggagctggaggaggaggtcgacgagctgcagacgacaaatgtcagcgacctgggcttggaacacagtgactccctggagtagtcgggcagcccagatggcactgatcactgagcaggagaggagtgtcgccgggaggccttcagggtgggggggaaggggacatgggcaggaagcaccgagggagttgggccctagcttccccaaatcagtagcttgaagaaaggcaaaggagacacctgttccttcccaaccaccgagcttcaatgaggaccccagccccacttccctggaactgccgaggactctgtttggcggggccagtcgagcagcctgtgtggaaagacaggagtgagatctggactcaccaaatccctgaggacagatggcacccatggcccccacccacggaaggacttgagttgtttacaagccctgcactgaggcagattggtgctgttcgcagagtaggcctttgcccgggggcagacttagaaggaaggggagagacaaagggggactgagtttcatccccagaagtttctcagctcctttgacagacattcaagggcaggagggagccccaaagcataaccagtggccagaggagtgggagggcctgaggcatcacatcttgcagatcagaatgggatggaatccaccaggctccagctcatccctccaaggccctgtctctgcgcacagcaaccatggacatgggagaaagggatgggagccacagtgcccttcactctctcctggaaaccaactgtaagctggtgggctcaacctgtgggaggttaagaggagtcccttctgggttgactccaagagccaaggagatggcagaccctgggctaggaaccatatggaggtgactttgaggccacagctgtccctaggtgatcacagaacttagctcctttaacaacaggacaatggttttttaccctagatgttcccaccttcagtgctccacgccctccatagaccttcagagaaggtgaaaccaggttatctgggaatctttccagcccgcaggtcgccacggccatccctttgctcccagcctggctccatcagcctccagcttcctttcttcattctgtccttcagggaaggcagaagaaacattggaaagcatctagtccagtgggaagccaggggttggagaaggtgctacatccctcttcccatcaatatcctaaatgtgggggagggcccagagaatggcacccaagagcctgcggggatgcccatcccacacaccccacccagctgttctaaccctgctatccacagccctggaggaactggggctcctggaaggaggaggaggctctccactgtccaccctaacacataccctcccacccaccttccagacccccttggttggcaccctctcctccggttccctctcaccccatggctgtgaatgacaggacaggtcacacgtgtgttttccattgggtttaatttaatggacgtgcagtttcatttgtaaattgtgcattagccacctccttcagtggcaggatgtgagtggctacctggctcaactggaggggaccccttgggccctctggggcttcccctcccccacctggttggggtagagcaaaaggatggtcactcttccgaggtctccctgaaatgaatgtatttctcccccaaaagagctgatatttaatgttttaataaggatttttgagaaacaaataaccttatttataatctgggtgatccaatcattttttactcccttttgatgccatacatagaggaaagtctagcttttttggcgtgagacttttgcaatgtgcagtgggataaaatgcatttccttttctggttcgtttttcttgttaacacgcgcacacagacacacacacacaccgttccactcaccacctggacaggcgtcccccagcacggacacactggcacacaggtgcccacatctcttcctctcagcccctccacctgcctaatgttatgcaacctccttctgatgtatccaccaaaccagtactgaatgtggccgagacgttttcagtaaatcttattacctaccgtaaaaaaggtg

SEQ ID NO: 434851 - DNA, 3696 bp, Homo sapiens
acgtcccgagcagtgctgggaagtataggctgtgttgtcacgccggtgtcagtctgatgaagattggcatcaggtgaagtctggagcaggacttctgaggctttctatcctccatgctgctcactagaaaaggggctgtgaactgtgctttggctctagcagacaggaagaaattctggcccagctggaagtagaaagaggggagtgagtctcctgaggaccatctcagaggccccgggatcacccgaacagtcctccatgtgaatcaatcccatgatgcaacatgcctccccagcccccgctctgacgatgatggccacgcagaatgtcccgcccccaccctaccaggacagccccagatgacggcaaccgcccagccaccctccaaggcccaggctgtccacatctctgccccctcagctgctgccagcacacctgtgcccagtgcccccatcgacccccaggcccagctggaggctgacaagcgagctgtatacaggcaccctcttttcccgctcctgacgctgctgtttgagaaatgtgaacaggccacccagggctctgagtgcatcacctccgccagctttgatgtggacatcgagaactttgtccaccagcaggaacaggagcacaaacccttcttcagcgatgacccagaactggacaatctgatggtgaaggcaatccaggtcctgagaatccacctgctggagctggagaaagtcaatgaactctgcaaggacttttgtaaccgttacatcacctgcttcaaaaccaagatgcacagcgacaacctgctcaggaatgatctaggggggccctactcccccaaccagccctccatcaaccttcactcacaggacctcctgcagaattcccccaattccatgtccggagtctccaataacccccaggggattgtggtcccagcctcagcgctccagcagggcaacatcgccatgacaaccgtcaactcacaagttgtgtcaggtggagccttataccaaccggttaccatggtaacctcccagggtcaggtggtcacccaagcaatcccccagggagccatccagatccagaacacacaggttaaccttgacctcacctccctcctggacaatgaggataagaagtccaagaacaaacgaggagtcttgcccaagcatgccaccaatataatgcgttcttggctcttccagcatctcatgcacccctaccccacggaggatgagaagaggcagatcgcagcccagaccaacctcaccctcctgcaagtaaacaactggttcatcaatgcccggaggcgcatcctgcagcccatgcttgatgccagcaacccagatcctgcccccaaagccaagaagatcaagtctcagcaccggcccacccaaagattctggcccaactccatcgctgcgggggtgctgcagcagcagggcggtgccccagggacaaaccccgatggttccatcaacttggacaacctgcagtccctgtcctcagacagtgccaccatggccatgcagcaggctatgatggctgcacacgatgactcattggatgggacagaagaagaggatgaggatgagatggaagaggaggaggaggaggagctggaggaggaggtcgacgagctgcagacgacaaatgtcagcgacctgggcttggaacacagtgactccctggagtagtcgggcagcccagatggcactgatcactgagcaggagaggagtgtcgccgggaggccttcagggtgggggggaaggggacatgggcaggaagcaccgagggagttgggccctagcttccccaaatcagtagcttgaagaaaggcaaaggagacacctgttccttcccaaccaccgagcttcaatgaggaccccagccccacttccctggaactgccgaggactctgtttggcggggccagtcgagcagcctgtgtggaaagacaggagtgagatctggactcaccaaatccctgaggacagatggcacccatggcccccacccacggaaggacttgagttgtttacaagccctgcactgaggcagattggtgctgttcgcagagtaggcctttgcccgggggcagacttagaaggaaggggagagacaaagggggactgagtttcatccccagaagtttctcagctcctttgacagacattcaagggcaggagggagccccaaagcataaccagtggccagaggagtgggagggcctgaggcatcacatcttgcagatcagaatgggatggaatccaccaggctccagctcatccctccaaggccctgtctctgcgcacagcaaccatggacatgggagaaagggatgggagccacagtgcccttcactctctcctggaaaccaactgtaagctggtgggctcaacctgtgggaggttaagaggagtcccttctgggttgactccaagagccaaggagatggcagaccctgggctaggaaccatatggaggtgactttgaggccacagctgtccctaggtgatcacagaacttagctcctttaacaacaggacaatggttttttaccctagatgttcccaccttcagtgctccacgccctccatagaccttcagagaaggtgaaaccaggttatctgggaatctttccagcccgcaggtcgccacggccatccctttgctcccagcctggctccatcagcctccagcttcctttcttcattctgtccttcagggaaggcagaagaaacattggaaagcatctagtccagtgggaagccaggggttggagaaggtgctacatccctcttcccatcaatatcctaaatgtgggggagggcccagagaatggcacccaagagcctgcggggatgcccatcccacacaccccacccagctgttctaaccctgctatccacagccctggaggaactggggctcctggaaggaggaggaggctctccactgtccaccctaacacataccctcccacccaccttccagacccccttggttggcaccctctcctccggttccctctcaccccatggctgtgaatgacaggacaggtcacacgtgtgttttccattgggtttaatttaatggacgtgcagtttcatttgtaaattgtgcattagccacctccttcagtggcaggatgtgagtggctacctggctcaactggaggggaccccttgggccctctggggcttcccctcccccacctggttggggtagagcaaaaggatggtcactcttccgaggtctccctgaaatgaatgtatttctcccccaaaagagctgatatttaatgttttaataaggatttttgagaaacaaataaccttatttataatctgggtgatccaatcattttttactcccttttgatgccatacatagaggaaagtctagcttttttggcgtgagacttttgcaatgtgcagtgggataaaatgcatttccttttctggttcgtttttcttgttaacacgcgcacacagacacacacacacaccgttccactcaccacctggacaggcgtcccccagcacggacacactggcacacaggtgcccacatctcttcctctcagcccctccacctgcctaatgttatgcaacctccttctgatgtatccaccaaaccagtactgaatgtggccgagacgttttcagtaaatcttattacctaccgtaaaaaaggtg

SEQ ID NO: 434852 - DNA, 416 bp, Homo sapiens
acgtcccgagcagtgctgggaagtataggctgtgttgtcacgccggtgtcagtctgatgaagattggcatcaggtgaagtctggagcaggacttctgaggctttctatcctccatgctgctcactagaaaaggggctgtgaactgtgctttggctctagcagacaggaagaaattctggcccagctggaagtagaaagaggggagtgagtctcctgaggaccatctcagaggccccgggatcacccgaacagtcctccatgtgaatcaatcccatgatgcaacatgcctccccagcccccgctctgacgatgatggccacgcagaatgtcccgcccccaccctaccaggacagccccagtactgaatgtggccgagacgttttcagtaaatcttattacctaccgtaaaaaaggtg

SEQ ID NO: 434853 - DNA, 525 bp, Homo sapiens
acgtcccgagcagtgctgggaagtataggctgtgttgtcacgccggtgtcagtctgatgaagattggcatcaggtgaagtctggagcaggacttctgaggctttctatcctccatgctgctcactagaaaaggggctgtgaactgtgctttggctctagcagacaggaagaaattctggcccagctggaagtagaaagaggggagtgagtctcctgaggaccatctcagaggccccgggatcacccgaacagtaagaaatgctcttctgtcgtttaacatacagttacaccccccaagcaggatatcttttcttctgaaggcctctagaacgagctcagaacatgagctgacacttaacatgaacgaccttgaaagccaatcattgtgtgattattctcatgtcttcatgtcacctccttagctccttgaggaggagggctgggccttattcctgtctcttttcatctattctgtgaacaataaatggttctgtgaacaataaatccttggcctcgttgggctca

SEQ ID NO: 434854 - DNA, 1819 bp, Homo sapiens
tagcataacctgtttgtgaaactgcaaaaaggttgacatggctgaagcagaagatgggttggtactgaatggttgggagagatatgtagcggctgaccctgaaggacgttgcagcccatgctatggagacctgattttattttgtaagaggtgggcaacccctgaagcattttagtgatgcgaacagatgtgtctgttaccaagcaaagccagttaaagaaggtcacagaggaggaatgatcacaaagagtctgagaagccaactggggccaaacaagttttagaacctctactggctgatgccaacatcatcagagatgaactgttcttaccagaaacttctctgctcctgacaccccacctctccccagaagagaagaaggagagtggccacgttgattcagccaagcacctccaggaggtcccctctggatgtcccatgaggctgcccctcagccacagcccagagcacgtggagatggctttgctcagcaacatcctagcggcctattcctttgtctcagaaaatcctgagcgagcagctctgtactttgtttctggcgtgtgcatcgggctggtgctgaccctggctgctctggtgataaggatctcttgccacacagactgcaggcggcgtcccgggaagaagttcctgcaggacagagagagcagcagcgacagcagcgacagcgaggatggcagtgaggacaccgtgtccgatctctccgtgcggagacaccgccgcttcgagaggactttgaacaagaatgtgttcacctctgcggaggagctggagcgcgcccagcggctggaggagcgcgagcgcatcatcagggagatctggatgaatggccagcctgaggtgcccgggaccaggagcctgaatcgctactattagggagcagcaggaccccggaaaccactggaggccgcctggaaaggagagcgtctgcagggacagtgggcacaaggaactgaacccagctctgctaatattgtgatttcagagaaaaagcaggacatgccccttttctagccaggaggattgctcctttttggccaaatgtatggagaagtagaaaaatcaaagcagttcatcaccctttccaggtctcggaatggtgctgaaaaatcctctccaacactgtggatggagatcggagaaacgcgactgtggtttctcttgatttctgaggatctcagaagtttcagcagacttccttgctctgtgttattcctttgcaaaaggaaagatcattatagcatgagggctgggaatagcagggtgaacttaacccaataaatgcaatttcctaaatgacttcatgctatggaggtgattctgattcaaatagcatgatccatgcttattatttaaggctgatttttaaaatcttgtgttgcaagggcaacctcgtccattttaactggcacctcagggattaaaatcctactttttagtgtagttcccacctcattcatgaaaatgaatagaactattgtattatgggagatgtgtcagtgaactagaaaatgtcaataacctcaaaggatgaagggtttttattttaaatagtttataaaatatatattgacatgcatatttgaaaatgctgcataaaaataaaagtggtgtgttttccccctctttggagacaagaaaattttattatgactctagataattgtgattttaaacactttgttttttttttttttttttaattggatttcaaagaaaagaatggaaatgagaggtaaggattaaagccaaagttaggatgggaattaaaaaaataaacattacataaaatctttt

SEQ ID NO: 434855 - DNA, 1715 bp, Homo sapiens
ttcttggggtcttggctgtgcacgccccaataagcctggtgtctatgttcgtgtttcaaggtttgttacttggattgagggagtgatgagaaataattaattggacgggagacagagtgacgcactgactcacctagaggctgggacgtgggtagggatttagcatgctggaaataactggcagtaatcaaacgaagacactgtccccagctaccagctacgccaaacctcggcattttttgtgttattttctgactgctggattctgtagtaaggtgacatagctatgacatttgttaaaaataaactctgtacttaactttgatttgaataaaaaaaaggccaaacaagttttagaacctctactggctgatgccaacatcatcagagatgaactgttcttaccagaaacttctctgctcctgacaccccacctctccccagaagagaagaaggagagtggccacgttgattcagccaagcacctccaggaggtcccctctggatgtcccatgaggctgcccctcagccacagcccagagcacgtggagatggctttgctcagcaacatcctagcggcctattcctttgtctcagaaaatcctgagcgagcagctctgtactttgtttctggcgtgtgcatcgggctggtgctgaccctggctgctctggtgataaggatctcttgccacacagactgcaggcggcgtcccgggaagaagttcctgcaggacagagagagcagcagcgacagcagcgacagcgaggatggcagtgaggacaccgtgtccgatctctccgtgcggagacaccgccgcttcgagaggactttgaacaagaatgtgttcacctctgcggaggagctggagcgcgcccagcggctggaggagcgcgagcgcatcatcagggagatctggatgaatggccagcctgaggtgcccgggaccaggagcctgaatcgctactattagggagcagcaggaccccggaaaccactggaggccgcctggaaaggagagcgtctgcagggacagtgggcacaaggaactgaacccagctctgctaatattgtgatttcagagaaaaagcaggacatgccccttttctagccaggaggattgctcctttttggccaaatgtatggagaagtagaaaaatcaaagcagttcatcaccctttccaggtctcggaatggtgctgaaaaatcctctccaacactgtggatggagatcggagaaacgcgactgtggtttctcttgatttctgaggatctcagaagtttcagcagacttccttgctctgtgttattcctttgcaaaaggaaagatcattatagcatgagggctgggaatagcagggtgaacttaacccaataaatgcaatttcctaaatgacttcatgctatggaggtgattctgattcaaatagcatgatccatgcttattatttaaggctgatttttaaaatcttgtgttgcaagggcaacctcgtccattttaactggcacctcagggattaaaatcctactttttagtgtagttcccacctcattcatgaaaatgaatagaactattgtattatgggagatgtgtcagtgaactagaaaatgtcaataacctcaaaggatgaagggtttttattttaaatagtttataaaatatatattgacatgcatatttgaaaatgctgcataaaaataaaagtggtgtgttttc

SEQ ID NO: 434856 - DNA, 322 bp, Homo sapiens
cccagtcactgagccgccgccgaggattcagcagcctcccccttgagccccctcgcttcccgacgttccgttcccccctgcccgccttctcccgccaccgccgccgccgccttccgcaggccgtttccaccgaggaaaaggaatcgtatcgtatgtccgctatccagaacctccactctttcgacccctttgctgatgcaagtattttgtttatctctcccctggtcttacatacttagaatctagcttagtgccgtcgatgctcacagtgatggtttcaggctttggcgtcaggcttcttgcgttcaaatctcagttctgc

SEQ ID NO: 434857 - DNA, 1859 bp, Homo sapiens
gaaggaaatgagacaaccttttcctcccactgactcgggctcctgcagcttctgcggggcttggcgccgccgtccgtgagcacccaggccgggaccccacatccccaggccagccctgaccccggcggcccctccgccgggattcctttccgaggtactggtgccggcccaagacccgggcagcgctttgtcgtgtccgcccctcagtgatcagctccgggtccccctgctcggccccgcgcgccccaagcgcagtccccggaagtgcgcgccggggccccagcaaagagtctgagaagccaactggggccaaacaagttttagaacctctactggctgatgccaacatcatcagagatgaactgttcttaccagaaacttctctgctcctgacaccccacctctccccagaagagaagaaggagagtggccacgttgattcagccaagcacctccaggaggtcccctctggatgtcccatgaggctgcccctcagccacagcccagagcacgtggagatggctttgctcagcaacatcctagcggcctattcctttgtctcagaaaatcctgagcgagcagctctgtactttgtttctggcgtgtgcatcgggctggtgctgaccctggctgctctggtgataaggatctcttgccacacagactgcaggcggcgtcccgggaagaagttcctgcaggacagagagagcagcagcgacagcagcgacagcgaggatggcagtgaggacaccgtgtccgatctctccgtgcggagacaccgccgcttcgagaggactttgaacaagaatgtgttcacctctgcggaggagctggagcgcgcccagcggctggaggagcgcgagcgcatcatcagggagatctggatgaatggccagcctgaggtgcccgggaccaggagcctgaatcgctactattagggagcagcaggaccccggaaaccactggaggccgcctggaaaggagagcgtctgcagggacagtgggcacaaggaactgaacccagctctgctaatattgtgatttcagagaaaaagcaggacatgccccttttctagccaggaggattgctcctttttggccaaatgtatggagaagtagaaaaatcaaagcagttcatcaccctttccaggtctcggaatggtgctgaaaaatcctctccaacactgtggatggagatcggagaaacgcgactgtggtttctcttgatttctgaggatctcagaagtttcagcagacttccttgctctgtgttattcctttgcaaaaggaaagatcattatagcatgagggctgggaatagcagggtgaacttaacccaataaatgcaatttcctaaatgacttcatgctatggaggtgattctgattcaaatagcatgatccatgcttattatttaaggctgatttttaaaatcttgtgttgcaagggcaacctcgtccattttaactggcacctcagggattaaaatcctactttttagtgtagttcccacctcattcatgaaaatgaatagaactattgtattatgggagatgtgtcagtgaactagaaaatgtcaataacctcaaaggatgaagggtttttattttaaatagtttataaaatatatattgacatgcatatttgaaaatgctgcataaaaataaaagtggtgtgttttccccctctttggagacaagaaaattttattatgactctagataattgtgattttaaacactttgttttttttttttttttttaattggatttcaaagaaaagaatggaaatgagaggtaaggattaaagccaaagttaggatgggaattaaaaaaataaacattacataaaatctttt

SEQ ID NO: 434858 - DNA, 1885 bp, Homo sapiens
tgagtagctgaatacaggctcaaagcaggcgacgggacaggaatgagaggatggatgctggcaggggcttggagcttctgcggggcttggcgccgccgtccgtgagcacccaggccgggaccccacatccccaggccagccctgaccccggcggcccctccgccgggattcctttccgaggtactggtgccggcccaagacccgggcagcgctttgtcgtgtccgcccctcagtgatcagctccgggtccccctgctcggccccgcgcgccccaagcgcagtccccggaagtgcgcgccggggccccagcaaagagtctgagaagccaactggggccaaacaagttttagaacctctactggctgatgccaacatcatcagagatgaactgttcttaccagaaacttctctgctcctgacaccccacctctccccagaagagaagaaggagagtggccacgttgattcagccaagcacctccaggaggtcccctctggatgtcccatgaggctgcccctcagccacagcccagagcacgtggagatggctttgctcagcaacatcctagcggcctattcctttgtctcagaaaatcctgagcgagcagctctgtactttgtttctggcgtgtgcatcgggctggtgctgaccctggctgctctggtgataaggatctcttgccacacagactgcaggcggcgtcccgggaagaagttcctgcaggacagagagagcagcagcgacagcagcgacagcgaggatggcagtgaggacaccgtgtccgatctctccgtgcggagacaccgccgcttcgagaggactttgaacaagaatgtgttcacctctgcggaggagctggagcgcgcccagcggctggaggagcgcgagcgcatcatcagggagatctggatgaatggccagcctgaggtgcccgggaccaggagcctgaatcgctactattagggagcagcaggaccccggaaaccactggaggccgcctggaaaggagagcgtctgcagggacagtgggcacaaggaactgaacccagctctgctaatattgtgatttcagagaaaaagcaggacatgccccttttctagccaggaggattgctcctttttggccaaatgtatggagaagtagaaaaatcaaagcagttcatcaccctttccaggtctcggaatggtgctgaaaaatcctctccaacactgtggatggagatcggagaaacgcgactgtggtttctcttgatttctgaggatctcagaagtttcagcagacttccttgctctgtgttattcctttgcaaaaggaaagatcattatagcatgagggctgggaatagcagggtgaacttaacccaataaatgcaatttcctaaatgacttcatgctatggaggtgattctgattcaaatagcatgatccatgcttattatttaaggctgatttttaaaatcttgtgttgcaagggcaacctcgtccattttaactggcacctcagggattaaaatcctactttttagtgtagttcccacctcattcatgaaaatgaatagaactattgtattatgggagatgtgtcagtgaactagaaaatgtcaataacctcaaaggatgaagggtttttattttaaatagtttataaaatatatattgacatgcatatttgaaaatgctgcataaaaataaaagtggtgtgttttccccctctttggagacaagaaaattttattatgactctagataattgtgattttaaacactttgttttttttttttttttttaattggatttcaaagaaaagaatggaaatgagaggtaaggattaaagccaaagttaggatgggaattaaaaaaataaacattacataaaatctttt

SEQ ID NO: 434859 - DNA, 1973 bp, Homo sapiens
tgagtagctgaatacaggctcaaagcaggcgacgggacaggaatgagaggatggatgctggcaggggcttggagcttctgcggggcttggcgccgccgtccgtgagcacccaggccgggaccccacatccccaggccagccctgaccccggcggcccctccgccgggattcctttccgaggtactggtgccggcccaagacccgggcagcgctttgtcgtgtccgcccctcagtgatcagctccgggtccccctgctcggccccgcgcgccccaagcgcagtccccggaagtgcgcgccggggccccagcaaagtgcaggtaggtagatcgctgaccacatttgctcatttctggattattcattcaaaggaagcactatgagtcaatcattgggcacagagagtctgagaagccaactggggccaaacaagttttagaacctctactggctgatgccaacatcatcagagatgaactgttcttaccagaaacttctctgctcctgacaccccacctctccccagaagagaagaaggagagtggccacgttgattcagccaagcacctccaggaggtcccctctggatgtcccatgaggctgcccctcagccacagcccagagcacgtggagatggctttgctcagcaacatcctagcggcctattcctttgtctcagaaaatcctgagcgagcagctctgtactttgtttctggcgtgtgcatcgggctggtgctgaccctggctgctctggtgataaggatctcttgccacacagactgcaggcggcgtcccgggaagaagttcctgcaggacagagagagcagcagcgacagcagcgacagcgaggatggcagtgaggacaccgtgtccgatctctccgtgcggagacaccgccgcttcgagaggactttgaacaagaatgtgttcacctctgcggaggagctggagcgcgcccagcggctggaggagcgcgagcgcatcatcagggagatctggatgaatggccagcctgaggtgcccgggaccaggagcctgaatcgctactattagggagcagcaggaccccggaaaccactggaggccgcctggaaaggagagcgtctgcagggacagtgggcacaaggaactgaacccagctctgctaatattgtgatttcagagaaaaagcaggacatgccccttttctagccaggaggattgctcctttttggccaaatgtatggagaagtagaaaaatcaaagcagttcatcaccctttccaggtctcggaatggtgctgaaaaatcctctccaacactgtggatggagatcggagaaacgcgactgtggtttctcttgatttctgaggatctcagaagtttcagcagacttccttgctctgtgttattcctttgcaaaaggaaagatcattatagcatgagggctgggaatagcagggtgaacttaacccaataaatgcaatttcctaaatgacttcatgctatggaggtgattctgattcaaatagcatgatccatgcttattatttaaggctgatttttaaaatcttgtgttgcaagggcaacctcgtccattttaactggcacctcagggattaaaatcctactttttagtgtagttcccacctcattcatgaaaatgaatagaactattgtattatgggagatgtgtcagtgaactagaaaatgtcaataacctcaaaggatgaagggtttttattttaaatagtttataaaatatatattgacatgcatatttgaaaatgctgcataaaaataaaagtggtgtgttttccccctctttggagacaagaaaattttattatgactctagataattgtgattttaaacactttgttttttttttttttttttaattggatttcaaagaaaagaatggaaatgagaggtaaggattaaagccaaagttaggatgggaattaaaaaaataaacattacataaaatctttt

SEQ ID NO: 434860 - DNA, 1762 bp, Homo sapiens
tgagtagctgaatacaggctcaaagcaggcgacgggacaggaatgagaggatggatgctggcaggggcttggagcttctgcggggcttggcgccgccgtccgtgagcacccaggccgggaccccacatccccaggccagccctgaccccggcggcccctccgccgggattcctttccgaggtactggtgccggcccaagacccgggcagcgctttgtcgtgtccgcccctcagtgatcagctccgggtccccctgctcggccccgcgcgccccaagcgcagtccccggaagtgcgcgccggggccccagcaaagaagagaagaaggagagtggccacgttgattcagccaagcacctccaggaggtcccctctggatgtcccatgaggctgcccctcagccacagcccagagcacgtggagatggctttgctcagcaacatcctagcggcctattcctttgtctcagaaaatcctgagcgagcagctctgtactttgtttctggcgtgtgcatcgggctggtgctgaccctggctgctctggtgataaggatctcttgccacacagactgcaggcggcgtcccgggaagaagttcctgcaggacagagagagcagcagcgacagcagcgacagcgaggatggcagtgaggacaccgtgtccgatctctccgtgcggagacaccgccgcttcgagaggactttgaacaagaatgtgttcacctctgcggaggagctggagcgcgcccagcggctggaggagcgcgagcgcatcatcagggagatctggatgaatggccagcctgaggtgcccgggaccaggagcctgaatcgctactattagggagcagcaggaccccggaaaccactggaggccgcctggaaaggagagcgtctgcagggacagtgggcacaaggaactgaacccagctctgctaatattgtgatttcagagaaaaagcaggacatgccccttttctagccaggaggattgctcctttttggccaaatgtatggagaagtagaaaaatcaaagcagttcatcaccctttccaggtctcggaatggtgctgaaaaatcctctccaacactgtggatggagatcggagaaacgcgactgtggtttctcttgatttctgaggatctcagaagtttcagcagacttccttgctctgtgttattcctttgcaaaaggaaagatcattatagcatgagggctgggaatagcagggtgaacttaacccaataaatgcaatttcctaaatgacttcatgctatggaggtgattctgattcaaatagcatgatccatgcttattatttaaggctgatttttaaaatcttgtgttgcaagggcaacctcgtccattttaactggcacctcagggattaaaatcctactttttagtgtagttcccacctcattcatgaaaatgaatagaactattgtattatgggagatgtgtcagtgaactagaaaatgtcaataacctcaaaggatgaagggtttttattttaaatagtttataaaatatatattgacatgcatatttgaaaatgctgcataaaaataaaagtggtgtgttttccccctctttggagacaagaaaattttattatgactctagataattgtgattttaaacactttgttttttttttttttttttaattggatttcaaagaaaagaatggaaatgagaggtaaggattaaagccaaagttaggatgggaattaaaaaaataaacattacataaaatctttt

SEQ ID NO: 434861 - DNA, 1960 bp, Homo sapiens
tgagtagctgaatacaggctcaaagcaggcgacgggacaggaatgagaggatggatgctggcaggggcttggagcttctgcggggcttggcgccgccgtccgtgagcacccaggccgggaccccacatccccaggccagccctgaccccggcggcccctccgccgggattcctttccgaggtactggtgccggcccaagacccgggcagcgctttgtcgtgtccgcccctcagtgatcagctccgggtccccctgctcggccccgcgcgccccaagcgcagtccccggaagtgcgcgccggggccccagcaaagagtctgagaagccaactggggccaaacaagttttagaacctctactggctgatgccaacatcatcagagatgaactgttcttaccagaaacttctctgctcctgacaccccacctctccccaggaaacatttgccagacagatgaagagaaggggggcatttaggcaacaggaagagtgtgaccaaaagcatgaagagaagagaagaaggagagtggccacgttgattcagccaagcacctccaggaggtcccctctggatgtcccatgaggctgcccctcagccacagcccagagcacgtggagatggctttgctcagcaacatcctagcggcctattcctttgtctcagaaaatcctgagcgagcagctctgtactttgtttctggcgtgtgcatcgggctggtgctgaccctggctgctctggtgataaggatctcttgccacacagactgcaggcggcgtcccgggaagaagttcctgcaggacagagagagcagcagcgacagcagcgacagcgaggatggcagtgaggacaccgtgtccgatctctccgtgcggagacaccgccgcttcgagaggactttgaacaagaatgtgttcacctctgcggaggagctggagcgcgcccagcggctggaggagcgcgagcgcatcatcagggagatctggatgaatggccagcctgaggtgcccgggaccaggagcctgaatcgctactattagggagcagcaggaccccggaaaccactggaggccgcctggaaaggagagcgtctgcagggacagtgggcacaaggaactgaacccagctctgctaatattgtgatttcagagaaaaagcaggacatgccccttttctagccaggaggattgctcctttttggccaaatgtatggagaagtagaaaaatcaaagcagttcatcaccctttccaggtctcggaatggtgctgaaaaatcctctccaacactgtggatggagatcggagaaacgcgactgtggtttctcttgatttctgaggatctcagaagtttcagcagacttccttgctctgtgttattcctttgcaaaaggaaagatcattatagcatgagggctgggaatagcagggtgaacttaacccaataaatgcaatttcctaaatgacttcatgctatggaggtgattctgattcaaatagcatgatccatgcttattatttaaggctgatttttaaaatcttgtgttgcaagggcaacctcgtccattttaactggcacctcagggattaaaatcctactttttagtgtagttcccacctcattcatgaaaatgaatagaactattgtattatgggagatgtgtcagtgaactagaaaatgtcaataacctcaaaggatgaagggtttttattttaaatagtttataaaatatatattgacatgcatatttgaaaatgctgcataaaaataaaagtggtgtgttttccccctctttggagacaagaaaattttattatgactctagataattgtgattttaaacactttgttttttttttttttttttaattggatttcaaagaaaagaatggaaatgagaggtaaggattaaagccaaagttaggatgggaattaaaaaaataaacattacataaaatctttt

SEQ ID NO: 434862 - DNA, 1519 bp, Homo sapiens
gatgatttgaacccgatgggctgtgcctcaaaggtgaaccagggagaatcaaataaagagttccagaagtgaagagaagaaggagagtggccacgttgattcagccaagcacctccaggaggtcccctctggatgtcccatgaggctgcccctcagccacagcccagagcacgtggagatggctttgctcagcaacatcctagcggcctattcctttgtctcagaaaatcctgagcgagcagctctgtactttgtttctggcgtgtgcatcgggctggtgctgaccctggctgctctggtgataaggatctcttgccacacagactgcaggcggcgtcccgggaagaagttcctgcaggacagagagagcagcagcgacagcagcgacagcgaggatggcagtgaggacaccgtgtccgatctctccgtgcggagacaccgccgcttcgagaggactttgaacaagaatgtgttcacctctgcggaggagctggagcgcgcccagcggctggaggagcgcgagcgcatcatcagggagatctggatgaatggccagcctgaggtgcccgggaccaggagcctgaatcgctactattagggagcagcaggaccccggaaaccactggaggccgcctggaaaggagagcgtctgcagggacagtgggcacaaggaactgaacccagctctgctaatattgtgatttcagagaaaaagcaggacatgccccttttctagccaggaggattgctcctttttggccaaatgtatggagaagtagaaaaatcaaagcagttcatcaccctttccaggtctcggaatggtgctgaaaaatcctctccaacactgtggatggagatcggagaaacgcgactgtggtttctcttgatttctgaggatctcagaagtttcagcagacttccttgctctgtgttattcctttgcaaaaggaaagatcattatagcatgagggctgggaatagcagggtgaacttaacccaataaatgcaatttcctaaatgacttcatgctatggaggtgattctgattcaaatagcatgatccatgcttattatttaaggctgatttttaaaatcttgtgttgcaagggcaacctcgtccattttaactggcacctcagggattaaaatcctactttttagtgtagttcccacctcattcatgaaaatgaatagaactattgtattatgggagatgtgtcagtgaactagaaaatgtcaataacctcaaaggatgaagggtttttattttaaatagtttataaaatatatattgacatgcatatttgaaaatgctgcataaaaataaaagtggtgtgttttccccctctttggagacaagaaaattttattatgactctagataattgtgattttaaacactttgttttttttttttttttttaattggatttcaaagaaaagaatggaaatgagaggtaaggattaaagccaaagttaggatgggaattaaaaaaataaacattacataaaatctttt

SEQ ID NO: 434863 - DNA, 1645 bp, Homo sapiens
tgagtagctgaatacaggctcaaagcaggcgacgggacaggaatgagaggatggatgctggcaggggcttggagagtctgagaagccaactggggccaaacaagttttagaacctctactggctgatgccaacatcatcagagatgaactgttcttaccagaaacttctctgctcctgacaccccacctctccccagaagagaagaaggagagtggccacgttgattcagccaagcacctccaggaggtcccctctggatgtcccatgaggctgcccctcagccacagcccagagcacgtggagatggctttgctcagcaacatcctagcggcctattcctttgtctcagaaaatcctgagcgagcagctctgtactttgtttctggcgtgtgcatcgggctggtgctgaccctggctgctctggtgataaggatctcttgccacacagactgcaggcggcgtcccgggaagaagttcctgcaggacagagagagcagcagcgacagcagcgacagcgaggatggcagtgaggacaccgtgtccgatctctccgtgcggagacaccgccgcttcgagaggactttgaacaagaatgtgttcacctctgcggaggagctggagcgcgcccagcggctggaggagcgcgagcgcatcatcagggagatctggatgaatggccagcctgaggtgcccgggaccaggagcctgaatcgctactattagggagcagcaggaccccggaaaccactggaggccgcctggaaaggagagcgtctgcagggacagtgggcacaaggaactgaacccagctctgctaatattgtgatttcagagaaaaagcaggacatgccccttttctagccaggaggattgctcctttttggccaaatgtatggagaagtagaaaaatcaaagcagttcatcaccctttccaggtctcggaatggtgctgaaaaatcctctccaacactgtggatggagatcggagaaacgcgactgtggtttctcttgatttctgaggatctcagaagtttcagcagacttccttgctctgtgttattcctttgcaaaaggaaagatcattatagcatgagggctgggaatagcagggtgaacttaacccaataaatgcaatttcctaaatgacttcatgctatggaggtgattctgattcaaatagcatgatccatgcttattatttaaggctgatttttaaaatcttgtgttgcaagggcaacctcgtccattttaactggcacctcagggattaaaatcctactttttagtgtagttcccacctcattcatgaaaatgaatagaactattgtattatgggagatgtgtcagtgaactagaaaatgtcaataacctcaaaggatgaagggtttttattttaaatagtttataaaatatatattgacatgcatatttgaaaatgctgcataaaaataaaagtggtgtgttttccccctctttggagacaagaaaattttattatgactctagataattgtgattttaaacactttgttttttttttttttttttaattggatttcaaagaaaagaatggaaatgagaggtaaggattaaagccaaagttaggatgggaattaaaaaaataaacattacataaaatctttt

SEQ ID NO: 434864 - DNA, 1721 bp, Homo sapiens
tagcataacctgtttgtgaaactgcaaaaaggttgacatggctgaagcagaagatgggttggtactgaatggttgggagagatatgtagcggctgaccctgaaggacgttgcagcccatgctatggagacctgattttattttgtaagagagtctgagaagccaactggggccaaacaagttttagaacctctactggctgatgccaacatcatcagagatgaactgttcttaccagaaacttctctgctcctgacaccccacctctccccagaagagaagaaggagagtggccacgttgattcagccaagcacctccaggaggtcccctctggatgtcccatgaggctgcccctcagccacagcccagagcacgtggagatggctttgctcagcaacatcctagcggcctattcctttgtctcagaaaatcctgagcgagcagctctgtactttgtttctggcgtgtgcatcgggctggtgctgaccctggctgctctggtgataaggatctcttgccacacagactgcaggcggcgtcccgggaagaagttcctgcaggacagagagagcagcagcgacagcagcgacagcgaggatggcagtgaggacaccgtgtccgatctctccgtgcggagacaccgccgcttcgagaggactttgaacaagaatgtgttcacctctgcggaggagctggagcgcgcccagcggctggaggagcgcgagcgcatcatcagggagatctggatgaatggccagcctgaggtgcccgggaccaggagcctgaatcgctactattagggagcagcaggaccccggaaaccactggaggccgcctggaaaggagagcgtctgcagggacagtgggcacaaggaactgaacccagctctgctaatattgtgatttcagagaaaaagcaggacatgccccttttctagccaggaggattgctcctttttggccaaatgtatggagaagtagaaaaatcaaagcagttcatcaccctttccaggtctcggaatggtgctgaaaaatcctctccaacactgtggatggagatcggagaaacgcgactgtggtttctcttgatttctgaggatctcagaagtttcagcagacttccttgctctgtgttattcctttgcaaaaggaaagatcattatagcatgagggctgggaatagcagggtgaacttaacccaataaatgcaatttcctaaatgacttcatgctatggaggtgattctgattcaaatagcatgatccatgcttattatttaaggctgatttttaaaatcttgtgttgcaagggcaacctcgtccattttaactggcacctcagggattaaaatcctactttttagtgtagttcccacctcattcatgaaaatgaatagaactattgtattatgggagatgtgtcagtgaactagaaaatgtcaataacctcaaaggatgaagggtttttattttaaatagtttataaaatatatattgacatgcatatttgaaaatgctgcataaaaataaaagtggtgtgttttccccctctttggagacaagaaaattttattatgactctagataattgtgattttaaacactttgttttttttttttttttttaattggatttcaaagaaaagaatggaaatgagaggtaaggattaaagccaaagttaggatgggaattaaaaaaataaacattacataaaatctttt

SEQ ID NO: 434865 - DNA, 1522 bp, Homo sapiens
tgagtagctgaatacaggctcaaagcaggcgacgggacaggaatgagaggatggatgctggcaggggcttggagaagagaagaaggagagtggccacgttgattcagccaagcacctccaggaggtcccctctggatgtcccatgaggctgcccctcagccacagcccagagcacgtggagatggctttgctcagcaacatcctagcggcctattcctttgtctcagaaaatcctgagcgagcagctctgtactttgtttctggcgtgtgcatcgggctggtgctgaccctggctgctctggtgataaggatctcttgccacacagactgcaggcggcgtcccgggaagaagttcctgcaggacagagagagcagcagcgacagcagcgacagcgaggatggcagtgaggacaccgtgtccgatctctccgtgcggagacaccgccgcttcgagaggactttgaacaagaatgtgttcacctctgcggaggagctggagcgcgcccagcggctggaggagcgcgagcgcatcatcagggagatctggatgaatggccagcctgaggtgcccgggaccaggagcctgaatcgctactattagggagcagcaggaccccggaaaccactggaggccgcctggaaaggagagcgtctgcagggacagtgggcacaaggaactgaacccagctctgctaatattgtgatttcagagaaaaagcaggacatgccccttttctagccaggaggattgctcctttttggccaaatgtatggagaagtagaaaaatcaaagcagttcatcaccctttccaggtctcggaatggtgctgaaaaatcctctccaacactgtggatggagatcggagaaacgcgactgtggtttctcttgatttctgaggatctcagaagtttcagcagacttccttgctctgtgttattcctttgcaaaaggaaagatcattatagcatgagggctgggaatagcagggtgaacttaacccaataaatgcaatttcctaaatgacttcatgctatggaggtgattctgattcaaatagcatgatccatgcttattatttaaggctgatttttaaaatcttgtgttgcaagggcaacctcgtccattttaactggcacctcagggattaaaatcctactttttagtgtagttcccacctcattcatgaaaatgaatagaactattgtattatgggagatgtgtcagtgaactagaaaatgtcaataacctcaaaggatgaagggtttttattttaaatagtttataaaatatatattgacatgcatatttgaaaatgctgcataaaaataaaagtggtgtgttttccccctctttggagacaagaaaattttattatgactctagataattgtgattttaaacactttgttttttttttttttttttaattggatttcaaagaaaagaatggaaatgagaggtaaggattaaagccaaagttaggatgggaattaaaaaaataaacattacataaaatctttt

SEQ ID NO: 434866 - DNA, 1820 bp, Homo sapiens
gggaattgtttactgggaattaggaagatacagggcagagaaaggagaaaggtcaggaaaatcagggatgtaaggagtttctacttccttgaaagccaggaagctcgcttgaacaaagagcacaagaccccaaatctttgtggccccactggctgggagagctcgctggtctttctttaggagccttgctagtttttgcaagcatagttttcacaagcaattgaaggataatttccttagctctatagtgaagctatacccccaaaaaagtggggctggccagagagggtctgtagtttccaaagccccaaaggacacctgcaaatcagctgttgcaatgtttcttatcactcactttatgttcccaaacagaagagaagaaggagagtggccacgttgattcagccaagcacctccaggaggtcccctctggatgtcccatgaggctgcccctcagccacagcccagagcacgtggagatggctttgctcagcaacatcctagcggcctattcctttgtctcagaaaatcctgagcgagcagctctgtactttgtttctggcgtgtgcatcgggctggtgctgaccctggctgctctggtgataaggatctcttgccacacagactgcaggcggcgtcccgggaagaagttcctgcaggacagagagagcagcagcgacagcagcgacagcgaggatggcagtgaggacaccgtgtccgatctctccgtgcggagacaccgccgcttcgagaggactttgaacaagaatgtgttcacctctgcggaggagctggagcgcgcccagcggctggaggagcgcgagcgcatcatcagggagatctggatgaatggccagcctgaggtgcccgggaccaggagcctgaatcgctactattagggagcagcaggaccccggaaaccactggaggccgcctggaaaggagagcgtctgcagggacagtgggcacaaggaactgaacccagctctgctaatattgtgatttcagagaaaaagcaggacatgccccttttctagccaggaggattgctcctttttggccaaatgtatggagaagtagaaaaatcaaagcagttcatcaccctttccaggtctcggaatggtgctgaaaaatcctctccaacactgtggatggagatcggagaaacgcgactgtggtttctcttgatttctgaggatctcagaagtttcagcagacttccttgctctgtgttattcctttgcaaaaggaaagatcattatagcatgagggctgggaatagcagggtgaacttaacccaataaatgcaatttcctaaatgacttcatgctatggaggtgattctgattcaaatagcatgatccatgcttattatttaaggctgatttttaaaatcttgtgttgcaagggcaacctcgtccattttaactggcacctcagggattaaaatcctactttttagtgtagttcccacctcattcatgaaaatgaatagaactattgtattatgggagatgtgtcagtgaactagaaaatgtcaataacctcaaaggatgaagggtttttattttaaatagtttataaaatatatattgacatgcatatttgaaaatgctgcataaaaataaaagtggtgtgttttccccctctttggagacaagaaaattttattatgactctagataattgtgattttaaacactttgttttttttttttttttttaattggatttcaaagaaaagaatggaaatgagaggtaaggattaaagccaaagttaggatgggaattaaaaaaataaacattacataaaatctttt

SEQ ID NO: 434867 - DNA, 1849 bp, Homo sapiens
  misc_feature (55)..(55): n is a, c, g, or t
  misc_feature (63)..(64): n is a, c, g, or t
ttctccgggctgcaggaattggtacgaggagagagagagagatagagagagagantttgcatnncatataaaggagaaaggtcaggaaaatcagggatgtaaggagtttctacttccttgaaagccaggaagctcgcttgaacaaagagcacaagaccccaaatctttgtggccccactggctgggagagctcgctggtctttctttaggagccttgctagtttttgcaagcatagttttcacaagcaattgaaggataatttccttagctctatagtgaagctatacccccaaaaaagtggggctggccagagagggtctgtagtttccaaagccccaaaggacacctgcaaatcagctgttgcaatgtttcttatcactcactttatgttcccaaacagaagagaagaaggagagtggccacgttgattcagccaagcacctccaggaggtcccctctggatgtcccatgaggctgcccctcagccacagcccagagcacgtggagatggctttgctcagcaacatcctagcggcctattcctttgtctcagaaaatcctgagcgagcagctctgtactttgtttctggcgtgtgcatcgggctggtgctgaccctggctgctctggtgataaggatctcttgccacacagactgcaggcggcgtcccgggaagaagttcctgcaggacagagagagcagcagcgacagcagcgacagcgaggatggcagtgaggacaccgtgtccgatctctccgtgcggagacaccgccgcttcgagaggactttgaacaagaatgtgttcacctctgcggaggagctggagcgcgcccagcggctggaggagcgcgagcgcatcatcagggagatctggatgaatggccagcctgaggtgcccgggaccaggagcctgaatcgctactattagggagcagcaggaccccggaaaccactggaggccgcctggaaaggagagcgtctgcagggacagtgggcacaaggaactgaacccagctctgctaatattgtgatttcagagaaaaagcaggacatgccccttttctagccaggaggattgctcctttttggccaaatgtatggagaagtagaaaaatcaaagcagttcatcaccctttccaggtctcggaatggtgctgaaaaatcctctccaacactgtggatggagatcggagaaacgcgactgtggtttctcttgatttctgaggatctcagaagtttcagcagacttccttgctctgtgttattcctttgcaaaaggaaagatcattatagcatgagggctgggaatagcagggtgaacttaacccaataaatgcaatttcctaaatgacttcatgctatggaggtgattctgattcaaatagcatgatccatgcttattatttaaggctgatttttaaaatcttgtgttgcaagggcaacctcgtccattttaactggcacctcagggattaaaatcctactttttagtgtagttcccacctcattcatgaaaatgaatagaactattgtattatgggagatgtgtcagtgaactagaaaatgtcaataacctcaaaggatgaagggtttttattttaaatagtttataaaatatatattgacatgcatatttgaaaatgctgcataaaaataaaagtggtgtgttttccccctctttggagacaagaaaattttattatgactctagataattgtgattttaaacactttgttttttttttttttttttaattggatttcaaagaaaagaatggaaatgagaggtaaggattaaagccaaagttaggatgggaattaaaaaaataaacattacataaaatctttt

SEQ ID NO: 434868 - DNA, 1474 bp, Homo sapiens
tcaccgtttgtcaataattatattttgaatacattataaaatatgtcacattggaggacaatatttgtaaccatcaaaactttggggcctggtgagaagtgtaggctggagtcatattggatctctgcatatggagttgtcatctctcaaatgcttgcttcttcctcttcttcctccagaaaatcctgagcgagcagctctgtactttgtttctggcgtgtgcatcgggctggtgctgaccctggctgctctggtgataaggatctcttgccacacagactgcaggcggcgtcccgggaagaagttcctgcaggacagagagagcagcagcgacagcagcgacagcgaggatggcagtgaggacaccgtgtccgatctctccgtgcggagacaccgccgcttcgagaggactttgaacaagaatgtgttcacctctgcggaggagctggagcgcgcccagcggctggaggagcgcgagcgcatcatcagggagatctggatgaatggccagcctgaggtgcccgggaccaggagcctgaatcgctactattagggagcagcaggaccccggaaaccactggaggccgcctggaaaggagagcgtctgcagggacagtgggcacaaggaactgaacccagctctgctaatattgtgatttcagagaaaaagcaggacatgccccttttctagccaggaggattgctcctttttggccaaatgtatggagaagtagaaaaatcaaagcagttcatcaccctttccaggtctcggaatggtgctgaaaaatcctctccaacactgtggatggagatcggagaaacgcgactgtggtttctcttgatttctgaggatctcagaagtttcagcagacttccttgctctgtgttattcctttgcaaaaggaaagatcattatagcatgagggctgggaatagcagggtgaacttaacccaataaatgcaatttcctaaatgacttcatgctatggaggtgattctgattcaaatagcatgatccatgcttattatttaaggctgatttttaaaatcttgtgttgcaagggcaacctcgtccattttaactggcacctcagggattaaaatcctactttttagtgtagttcccacctcattcatgaaaatgaatagaactattgtattatgggagatgtgtcagtgaactagaaaatgtcaataacctcaaaggatgaagggtttttattttaaatagtttataaaatatatattgacatgcatatttgaaaatgctgcataaaaataaaagtggtgtgttttccccctctttggagacaagaaaattttattatgactctagataattgtgattttaaacactttgttttttttttttttttttaattggatttcaaagaaaagaatggaaatgagaggtaaggattaaagccaaagttaggatgggaattaaaaaaataaacattacataaaatctttt

SEQ ID NO: 434869 - DNA, 1465 bp, Homo sapiens
gatgatttgaacccgatgggctgtgcctcaaaggtgaaccagggagaatcaaataaagagttccagaagtgaagagaagaaggagagtggccacgttgattcagccaagcacctccaggaggtcccctctggatgtcccatgaggctgcccctcagccacagcccagagcacgtggagatggctttgctcagcaacatcctagcggcctattcctttgtctcagtgctgaccctggctgctctggtgataaggatctcttgccacacagactgcaggcggcgtcccgggaagaagttcctgcaggacagagagagcagcagcgacagcagcgacagcgaggatggcagtgaggacaccgtgtccgatctctccgtgcggagacaccgccgcttcgagaggactttgaacaagaatgtgttcacctctgcggaggagctggagcgcgcccagcggctggaggagcgcgagcgcatcatcagggagatctggatgaatggccagcctgaggtgcccgggaccaggagcctgaatcgctactattagggagcagcaggaccccggaaaccactggaggccgcctggaaaggagagcgtctgcagggacagtgggcacaaggaactgaacccagctctgctaatattgtgatttcagagaaaaagcaggacatgccccttttctagccaggaggattgctcctttttggccaaatgtatggagaagtagaaaaatcaaagcagttcatcaccctttccaggtctcggaatggtgctgaaaaatcctctccaacactgtggatggagatcggagaaacgcgactgtggtttctcttgatttctgaggatctcagaagtttcagcagacttccttgctctgtgttattcctttgcaaaaggaaagatcattatagcatgagggctgggaatagcagggtgaacttaacccaataaatgcaatttcctaaatgacttcatgctatggaggtgattctgattcaaatagcatgatccatgcttattatttaaggctgatttttaaaatcttgtgttgcaagggcaacctcgtccattttaactggcacctcagggattaaaatcctactttttagtgtagttcccacctcattcatgaaaatgaatagaactattgtattatgggagatgtgtcagtgaactagaaaatgtcaataacctcaaaggatgaagggtttttattttaaatagtttataaaatatatattgacatgcatatttgaaaatgctgcataaaaataaaagtggtgtgttttccccctctttggagacaagaaaattttattatgactctagataattgtgattttaaacactttgttttttttttttttttttaattggatttcaaagaaaagaatggaaatgagaggtaaggattaaagccaaagttaggatgggaattaaaaaaataaacattacataaaatctttt

SEQ ID NO: 434870 - DNA, 1805 bp, Homo sapiens
gaaggaaatgagacaaccttttcctcccactgactcgggctcctgcagcttctgcggggcttggcgccgccgtccgtgagcacccaggccgggaccccacatccccaggccagccctgaccccggcggcccctccgccgggattcctttccgaggtactggtgccggcccaagacccgggcagcgctttgtcgtgtccgcccctcagtgatcagctccgggtccccctgctcggccccgcgcgccccaagcgcagtccccggaagtgcgcgccggggccccagcaaagagtctgagaagccaactggggccaaacaagttttagaacctctactggctgatgccaacatcatcagagatgaactgttcttaccagaaacttctctgctcctgacaccccacctctccccagaagagaagaaggagagtggccacgttgattcagccaagcacctccaggaggtcccctctggatgtcccatgaggctgcccctcagccacagcccagagcacgtggagatggctttgctcagcaacatcctagcggcctattcctttgtctcagaaaatcctgagcgagcagctctgtactttgtttctggcgtgtgcatcgggctggtgctgaccctggctgctctggtgataaggatctcttgccacacagactgcaggcggcgtcccgggaagaagttcctgcaggacagagagagcagcagcgacagcagcgacagcgaggatggcagtgaggacaccgtgtccgatctctccgtgcggagacaccgccgcttcgagaggactttgaacaagaatgtgttcacctctgcggaggagctggagcgcgcccagcggctggaggagcgcgagcgcatcatcagggagatctggatgaatggccagcctgaggtgcccgggaccaggagcctgaatcgctactattagggagcagcaggaccccggaaaccactggaggccgcctggaaaggagagcgtctgcagggacagtgggcacaaggaactgaacccagctctgctaatattgtgatttcagagaaaaagcaggacatgccccttttctagccaggaggattgctcctttttggccaaatgtatggagaagtagaaaaatcaaagcagttcatcaccctttccaggtctcggaatggtgctgacttgatttctgaggatctcagaagtttcagcagacttccttgctctgtgttattcctttgcaaaaggaaagatcattatagcatgagggctgggaatagcagggtgaacttaacccaataaatgcaatttcctaaatgacttcatgctatggaggtgattctgattcaaatagcatgatccatgcttattatttaaggctgatttttaaaatcttgtgttgcaagggcaacctcgtccattttaactggcacctcagggattaaaatcctactttttagtgtagttcccacctcattcatgaaaatgaatagaactattgtattatgggagatgtgtcagtgaactagaaaatgtcaataacctcaaaggatgaagggtttttattttaaatagtttataaaatatatattgacatgcatatttgaaaatgctgcataaaaataaaagtggtgtgttttccccctctttggagacaagaaaattttattatgactctagataattgtgattttaaacactttgttttttttttttttttttaattggatttcaaagaaaagaatggaaatgagaggtaaggattaaagccaaagttaggatgggaattaaaaaaataaacattacataaaatctttt

SEQ ID NO: 434871 - DNA, 652 bp, Homo sapiens
tgagtagctgaatacaggctcaaagcaggcgacgggacaggaatgagaggatggatgctggcaggggcttggagcttctgcggggcttggcgccgccgtccgtgagcacccaggccgggaccccacatccccaggccagccctgaccccggcggcccctccgccgggattcctttccgaggtactggtgccggcccaagacccgggcagcgctttgtcgtgtccgcccctcagtgatcagctccgggtccccctgctcggccccgcgcgccccaagcgcagtccccggaagtgcgcgccggggccccagcaaaggtcctgactttttggaatgcccttcttcctccttggctggcaatcaatctttgagactagaagttaagtctccttttgggtgaagcatcattcttcagttcctacagaccattttgttgctccctgccctgccccaggttgggggaaagcctcagcctcagcctcagcctcccctctcccctccttttttttaaaaaataaatatgtatctcttgcagtattttgtttatctctcccctggtcttacatacttagaatctagcttagtgccgtcgatgctcacagtgatggtttcaggctttggcgtcaggcttcttgcgttcaaatctcagttctgc

SEQ ID NO: 434872 - DNA, 1014 bp, Homo sapiens
tgagtagctgaatacaggctcaaagcaggcgacgggacaggaatgagaggatggatgctggcaggggcttggagcttctgcggggcttggcgccgccgtccgtgagcacccaggccgggaccccacatccccaggccagccctgaccccggcggcccctccgccgggattcctttccgaggtactggtgccggcccaagacccgggcagcgctttgtcgtgtccgcccctcagtgatcagctccgggtccccctgctcggccccgcgcgccccaagcgcagtccccggaagtgcgcgccggggccccagcaaagagtctgagaagccaactggggccaaacaagttttagaacctctactggctgatgccaacatcatcagagatgaactgttcttaccagaaacttctctgctcctgacaccccacctctccccagaagagaagaaggagagtggccacgttgattcagccaagcacctccaggaggtcccctctggatgtcccatgaggctgcccctcagccacagcccagagcacgtggagatggctttgctcagcaacatcctagcggcctattcctttgtctcaggtttaattgtttgtgagggaatccgtctgccatgtaatcaggacactgaagcagccctgtgaagaggtcaatgaggtgaggaactttggcctccagctcacagttggcaaagaaccattggtgtgtgaccttgagagcaagtcctccagctccaatcaggtcttcagatgattccaactttatgagaagttgggcgtggtggttcacacctgtaatcccagtactttaggaggctgaggcggttggatcatctgaggtcaggagttcaagaccaactttctgagagacactgggtcagaccacccagccagactgctcccacaatcctcacctaaagaaactgtcttaagctactaaattctgggggcaatttgttacacaatagaaaactaatacataaagaggctatgtattatcctactta

SEQ ID NO: 434873 - DNA, 493 bp, Homo sapiens
taagggggaattgtttactgggaattaggaagatacagggcagagaaaggagaaaggtcaggaaaatcagggatgtaaggagtttctacttccttgaaagccaggaagctcgcttgaacaaagagcacaagaccccaaatctttgtggccccactggctgggagagctcgctggtctttctttaggagccttgctagtttttgcaagcatagttttcacaagcaattgaaggataatttccttagctctatagtgaagctatacccccaaaaaagtggggctggccagagagggtctgtagtttccaaagccccaaaggacacctgcaaatcagctgttgcaaaaatatgtctttaggagtccaggctacctggaacatggcctcaggacagcagaatgtttcttatcactcactttatgttcccaaacagaagagaagaaggagagtggccacgttgattcagccaagcacctccaggaggtcccctctgga

SEQ ID NO: 434874 - DNA, 4753 bp, Homo sapiens
taagcagatggccaggtgctgcagggagaggtcttggctctgatttgtttacgaggatgaaattctttggaatactactgctagaagtctgacttaagacccagcttatgggccacatggcacccagctgcttctgcagagaaggcaggccactgatgggtacagcaaagtgtggtgctgctggccaagccaaagacccgtgtaggatgactgggcctctgccccttgtgggtgttgccactgtgcttgagtgcctggtgaagaatgtgatgggatcactagcatgtctgcggagagcggccctgggacgagattgagaaatctgccagtaatgggggatggactagaaacttcccaaatgtctacaacacaggcccaggcccaaccccagccagccaacgcagccagcaccaaccccccgcccccagagacctccaaccctaacaagcccaagaggcagaccaaccaactgcaatacctgctcagagtggtgctcaagacactatggaaacaccagtttgcatggcctttccagcagcctgtggatgccgtcaagctgaacctccctgattactataagatcattaaaacgcctatggatatgggaacaataaagaagcgcttggaaaacaactattactggaatgctcaggaatgtatccaggacttcaacactatgtttacaaattgttacatctacaacaagcctggagatgacatagtcttaatggcagaagctctggaaaagctcttcttgcaaaaaataaatgagctacccacagaagaaaccgagatcatgatagtccaggcaaaaggaagaggacgtgggaggaaagaaacagggacagcaaaacctggcgtttccacggtaccaaacacaactcaagcatcgactcctccgcagacccagacccctcagccgaatcctcctcctgtgcaggccacgcctcaccccttccctgccgtcaccccggacctcatcgtccagacccctgtcatgacagtggtgcctccccagccactgcagacgcccccgccagtgcccccccagccacaacccccacccgctccagctccccagcccgtacagagccacccacccatcatcgcggccaccccacagcctgtgaagacaaagaagggagtgaagaggaaagcagacaccaccacccccaccaccattgaccccattcacgagccaccctcgctgcccccggagcccaagaccaccaagctgggccagcggcgggagagcagccggcctgtgaaacctccaaagaaggacgtgcccgactctcagcagcacccagcaccagagaagagcagcaaggtctcggagcagctcaagtgctgcagcggcatcctcaaggagatgtttgccaagaagcacgccgcctacgcctggcccttctacaagcctgtggacgtggaggcactgggcctacacgactactgtgacatcatcaagcaccccatggacatgagcacaatcaagtctaaactggaggcccgtgagtaccgtgatgctcaggagtttggtgctgacgtccgattgatgttctccaactgctataagtacaaccctcctgaccatgaggtggtggccatggcccgcaagctccaggatgtgttcgaaatgcgctttgccaagatgccggacgagcctgaggagccagtggtggccgtgtcctccccggcagtgccccctcccaccaaggttgtggccccgccctcatccagcgacagcagcagcgatagctcctcggacagtgacagttcgactgatgactctgaggaggagcgagcccagcggctggctgagctccaggagcagctcaaagccgtgcacgagcagcttgcagccctctctcagccccagcagaacaaaccaaagaaaaaggagaaagacaagaaggaaaagaaaaaagaaaagcacaaaaggaaagaggaagtggaagagaataaaaaaagcaaagccaaggaacctcctcctaaaaagacgaagaaaaataatagcagcaacagcaatgtgagcaagaaggagccagcgcccatgaagagcaagccccctcccacgtatgagtcggaggaagaggacaagtgcaagcctatgtcctatgaggagaagcggcagctcagcttggacatcaacaagctccccggcgagaagctgggccgcgtggtgcacatcatccagtcacgggagccctccctgaagaattccaaccccgacgagattgaaatcgactttgagaccctgaagccgtccacactgcgtgagctggagcgctatgtcacctcctgtttgcggaagaaaaggaaacctcaagctgagaaagttgatgtgattgccggctcctccaagatgaagggcttctcgtcctcagagtcggagagctccagtgagtccagctcctctgacagcgaagactccgaaacaggtcctgcctaatcattggacacggactcttaataaaacggtcttcagttccagattccttcccagcaagctatagcttaagtccattttcttccgtgaaagggacaggactccatcaagttatggaattcctcagagccctgggcctgtcccccggggtggattagtcatgtccagcagcacacgcctagtcccgccttcgggaaggctgcctgcctggccagccgcccaggcctctctgtgtaaagactgcctggctgtcctgcccagccttcctggttctctggggtcctctgggtgggtggcatctcctggagggtgatgacaatccccaacacatgcattcatgtggtgctactctgtgtgcaaagccagaccccaagtatgttttctctctttgtcccatccctctttttctgggactttggaccctaactacttccctcctgaaccttgcagtgacatcagtccaggagagctctcgttcagtgtgcggaagaacactctgacctctagagctgtcctagataaggagtgggagctttagaggcaaggcctctagaccctggaaggctcagtgaggctcttcccacagcatgcttctcactggtgccctgtaaggctcgagccaccgctgactctgagccttttggagtctttcctccttcgtctccattgttcccgtgcatttccaaaagcttaagttgcctggtgggcatttccccagtttctttggcctccgtcttctcaagtcacatagggaaagtacctcctggaaccaggctgcagtatgcaggacctgccaggcaggcactggtgaagggccttgggcctatcatcccctcaaccccacctcaccccacccgcctcctctagtggggtgagtctgggctggtggaccagagagggtgtcacagaccctcagggactgccccatggacacctctgactggtgttaacagtgtgaacattttccccgtcttcagtcccttagaatgacgacagcccctggggttggggcaggcgagtgtggccacatcatccaagccctcccagagacacaaataggcttttttgctctaaaaataaataccagcccttttttggtcacaaatccagcatctcagcagaaaactgcctgacatgaaaagtcccctgaggaactgcatctgcgtttcaggggcttttcattttttctccttttttaaagtgtagattgtgggtgcttcctagaggcctgccttcttctggaactggaagtgggctatcaccatgggcaagcccttgggtgcaggctccccacctgcctgggaactctggcagctctcctcagctccttgggcttgagcagctgcaactgccccagatttgctgtggaagcaggggctagccctggcctcaccagggcctcccggggccctgcattgatgctcaggagttcctgggctgctcttgatcctttctgggcatccagcttccagttaagctctgtttgccaaacaaactattctcagctgccctttggcctgcgcctgatgtgttcctgttgcagtcccgcctgcctgagacaggagcaggcaggagagccttcatgcccagattcccacaggacaattggggagctgctggcattgtctttctgggaagattctgctttcttggaccaaatggcagcctgattaccagtgtcgggcctgcatgctgcccccgacacacgcacgcacgcgcacacacgtgtgcacatgggccatagccacaagccagctctcctccagggtcctttcaacctcgctgtccagggaccctgtccttcttgcccgtggggcttccatctggcagagaacgttcagggcttgttgaacttgaaagctcattagacttaagctgtcacctgtgcttggtgccccaggaacagccagagaggacagtgcccactcacttcttgttggcagcctcctgtgcaggaagtgccagccgggcctcgacgcaccagctggctgtgggtcctgaggaggggcgggaggcggccgctcagtgcagatggggactcctctcctctgccctgaccttaccctccattacctccttcactggagtggggctggggggtgggtggaatcagtgttttaatcggatttttaaaaaacattttatttctttgtacaattaccatcctatgtaaagatgaaatttgtgttgagttgaagattgtcatggaataaagatcacaccgtacttgaggccatcttcatgtaaccctttctagagagttttgtgtgggggtgtcttggggctggtgtgttgtgaagctgt

SEQ ID NO: 434875 - DNA, 2735 bp, Homo sapiens
cagcttggacatcaagcaagctgagctgccgcttctcctcataggacataggcttgcacttgtcctcttcctccgactcatacgtgggagggggcttgctcttcatgggcgctggctccttcttggacatcaacaagctccccggcgagaagctgggccgcgtggtgcacatcatccagtcacgggagccctccctgaagaattccaaccccgacgagattgaaatcgactttgagaccctgaagccgtccacactgcgtgagctggagcgctatgtcacctcctgtttgcggaagaaaaggaaacctcaagctgagaaagttgatgtgattgccggctcctccaagatgaagggcttctcgtcctcagagtcggagagctccagtgagtccagctcctctgacagcgaagactccgaaacaggtcctgcctaatcattggacacggactcttaataaaacggtcttcagttccagattccttcccagcaagctatagcttaagtccattttcttccgtgaaagggacaggactccatcaagttatggaattcctcagagccctgggcctgtcccccggggtggattagtcatgtccagcagcacacgcctagtcccgccttcgggaaggctgcctgcctggccagccgcccaggcctctctgtgtaaagactgcctggctgtcctgcccagccttcctggttctctggggtcctctgggtgggtggcatctcctggagggtgatgacaatccccaacacatgcattcatgtggtgctactctgtgtgcaaagccagaccccaagtatgttttctctctttgtcccatccctctttttctgggactttggaccctaactacttccctcctgaaccttgcagtgacatcagtccaggagagctctcgttcagtgtgcggaagaacactctgacctctagagctgtcctagataaggagtgggagctttagaggcaaggcctctagaccctggaaggctcagtgaggctcttcccacagcatgcttctcactggtgccctgtaaggctcgagccaccgctgactctgagccttttggagtctttcctccttcgtctccattgttcccgtgcatttccaaaagcttaagttgcctggtgggcatttccccagtttctttggcctccgtcttctcaagtcacatagggaaagtacctcctggaaccaggctgcagtatgcaggacctgccaggcaggcactggtgaagggccttgggcctatcatcccctcaaccccacctcaccccacccgcctcctctagtggggtgagtctgggctggtggaccagagagggtgtcacagaccctcagggactgccccatggacacctctgactggtgttaacagtgtgaacattttccccgtcttcagtcccttagaatgacgacagcccctggggttggggcaggcgagtgtggccacatcatccaagccctcccagagacacaaataggcttttttgctctaaaaataaataccagcccttttttggtcacaaatccagcatctcagcagaaaactgcctgacatgaaaagtcccctgaggaactgcatctgcgtttcaggggcttttcattttttctccttttttaaagtgtagattgtgggtgcttcctagaggcctgccttcttctggaactggaagtgggctatcaccatgggcaagcccttgggtgcaggctccccacctgcctgggaactctggcagctctcctcagctccttgggcttgagcagctgcaactgccccagatttgctgtggaagcaggggctagccctggcctcaccagggcctcccggggccctgcattgatgctcaggagttcctgggctgctcttgatcctttctgggcatccagcttccagttaagctctgtttgccaaacaaactattctcagctgccctttggcctgcgcctgatgtgttcctgttgcagtcccgcctgcctgagacaggagcaggcaggagagccttcatgcccagattcccacaggacaattggggagctgctggcattgtctttctgggaagattctgctttcttggaccaaatggcagcctgattaccagtgtcgggcctgcatgctgcccccgacacacgcacgcacgcgcacacacgtgtgcacatgggccatagccacaagccagctctcctccagggtcctttcaacctcgctgtccagggaccctgtccttcttgcccgtggggcttccatctggcagagaacgttcagggcttgttgaacttgaaagctcattagacttaagctgtcacctgtgcttggtgccccaggaacagccagagaggacagtgcccactcacttcttgttggcagcctcctgtgcaggaagtgccagccgggcctcgacgcaccagctggctgtgggtcctgaggaggggcgggaggcggccgctcagtgcagatggggactcctctcctctgccctgaccttaccctccattacctccttcactggagtggggctggggggtgggtggaatcagtgttttaatcggatttttaaaaaacattttatttctttgtacaattaccatcctatgtaaagatgaaatttgtgttgagttgaagattgtcatggaataaagatcacaccgtacttgaggccatcttcatgtaaccctttctagagagttttgtgtgggggtgtcttggggctggtgtgttgtgaagctgt

SEQ ID NO: 434876 - DNA, 1089 bp, Homo sapiens
ctgcctgaccagctcccattgcttggattgcagctgagaaagttgatgtgattgccggctcctccaagatgaagggcttctcgtcctcagagtcggagagctccagtgagtccagctcctctgacagcgaagactccgaaacaggttaggtgacttgtgttctacgtgtcttaccaaactcttcccacctgtgcctggcactagctcggtcctgtgtccaggatgctagagcccagagacggcactcccagaacttgctgggttcctctgtctgtctgtctctttgttaactgtctccctggggccatgaatagccctgcactctgtgcagtagtgtccattctctcggcctggccgttatgctctccctgccagggtctggtcatggaggatgaatggccaagggcgttgacactgcggagccctggatggtgggcggggaagctgggccatgaggactgtgggcgtgggggtccaggctgtgctgttgaccttgatgtgaccacacccagctttctgcaccagtggagacttcgtgtccccagggccttccccgtatcacagtcacgtgcagtgcggccgcttcagggagatgcttcgctggtttctggtggatgtggagcagactgcagctggccagccgcatcgccagtctgctgctggccctgccatcacctgggccccagccattgcctacccctccccagagtgtgctcgttgctgtgttggctgctcctgaatctgccctaactccacacgcacctggacttgcgtgtccctcctgcagttctaactaacagtcccttcttttcaagccccgtgggtctgcacgttggaccctgggttccccattagagcccaccttctgagcagcagcctcagtgggaggtggaggcaggtagtgatgctgggtgccaggtgggagtggagaggggactgctctcctccaagtgtgcactttcctcattattctcaggggcgcagatgctcaggctggcgcaggggagaggctagggagggagccatggtgcccagaaggcctggcgaccagcccctgctgagagatggagctaacatcctgtgttacgg

SEQ ID NO: 434877 - DNA, 649 bp, Homo sapiens
taagcagatggccaggtgctgcagggagaggtcttggctctgatttgtttacgaggatgaaattctttggaatactactgctagaagtctgacttaagacccagcttatgggccacatggcacccagctgcttctgcagagaaggcaggccactgatgggtacagcaaagtgtggtgctgctggccaagccaaagacccgtgtaggatgactgggcctctgccccttgtgggtgttgccactgtgcttggtgagtggagacagctgtggagcagaggacttgaagcacacactgttccaaatgacgtccagccaaccaggccaccatccactctgcctctgtccccatggggatgatgatgaagatgataaagtcgcagcctgctttttagggttgttgtgtggataactaagccaatacagatgaagtgctcgataacagcatcagctcaagaagtggcaggtacctcctgtggagctcttctaggccctggtgcaggtctgtgtgatgatggcttgcataaagctctgctaagtgtggtttaaccagccatcgtcttggcgactgcttctgccttccctggcgtctttctacctgtgtgctccatcactttaggagaggggtgagtctgaacagaccagacagaatg

SEQ ID NO: 434878 - DNA, 518 bp, Homo sapiens
gggaggaggaggaggaggaagcggccgccgcggggtccgcggcgcgcccggcccgggtaagtcccggcctggcgcgggggccgcgagcgccgctgtcccggtccgcggtcctctaggcgggctcggccgcggcgctcacgtgggccggggccggcgcgctctccttctggcacccaggtcgttttgcctgggccggggcagcgcgcccccacccccatctcttcaccttcccggcggtccccggagtgctgcggagaaaggggcaggtcccctgcggagggaggtggctgcggctgcacgccggtctgaggccaggcctcagggcgggagcggtgccctggaggcgagcttggcccgcttgacgcacccactctcagcctggcagccccttgctgggcgctttgttttgctcggtccgtgctcgccggcgtccttgcaacggcctattttatttgcagtgttgtgtggtggtggtgattgtggtgatttggggtggggatgtgggggagttgtgattc

SEQ ID NO: 434879 - DNA, 210 bp, Homo sapiens
tcagcgtcggtaccgaaggagacacaggtgaggttacgcgtgccatgagaacccactctacaccacgacgctggtgcctcagtgttggccaaactctggagtcactgactggtttgactttcatacggtgaatatgcatttggtctgtactgatcatggaataaacacatctctcttttttttttttttttttttaaaatggagcctcac

SEQ ID NO: 434880 - DNA, 4749 bp, Homo sapiens
gctggcggcggcggcggcggcggcggcggcggctgggctgtttgttctggtctcccgcagccgaggagccgaagcagtggcggcggcagcggctgcggcggctgccggcggtgcccgcgggcgagcgcggcctgtgagctcggcagagcggcgggcgggccccggcgccgcgcaggcagctcggggagggggcggcggcagcgggcggacggccggcgggggcggcgtgcggcctagcgtctcagagtgcctggtgaagaatgtgatgggatcactagcatgtctgcggagagcggccctgggacgagattgagaaatctgccagtaatgggggatggactagaaacttcccaaatgtctacaacacaggcccaggcccaaccccagccagccaacgcagccagcaccaaccccccgcccccagagacctccaaccctaacaagcccaagaggcagaccaaccaactgcaatacctgctcagagtggtgctcaagacactatggaaacaccagtttgcatggcctttccagcagcctgtggatgccgtcaagctgaacctccctgattactataagatcattaaaacgcctatggatatgggaacaataaagaagcgcttggaaaacaactattactggaatgctcaggaatgtatccaggacttcaacactatgtttacaaattgttacatctacaacaagcctggagatgacatagtcttaatggcagaagctctggaaaagctcttcttgcaaaaaataaatgagctacccacagaagaaaccgagatcatgatagtccaggcaaaaggaagaggacgtgggaggaaagaaacagggacagcaaaacctggcgtttccacggtaccaaacacaactcaagcatcgactcctccgcagacccagacccctcagccgaatcctcctcctgtgcaggccacgcctcaccccttccctgccgtcaccccggacctcatcgtccagacccctgtcatgacagtggtgcctccccagccactgcagacgcccccgccagtgcccccccagccacaacccccacccgctccagctccccagcccgtacagagccacccacccatcatcgcggccaccccacagcctgtgaagacaaagaagggagtgaagaggaaagcagacaccaccacccccaccaccattgaccccattcacgagccaccctcgctgcccccggagcccaagaccaccaagctgggccagcggcgggagagcagccggcctgtgaaacctccaaagaaggacgtgcccgactctcagcagcacccagcaccagagaagagcagcaaggtctcggagcagctcaagtgctgcagcggcatcctcaaggagatgtttgccaagaagcacgccgcctacgcctggcccttctacaagcctgtggacgtggaggcactgggcctacacgactactgtgacatcatcaagcaccccatggacatgagcacaatcaagtctaaactggaggcccgtgagtaccgtgatgctcaggagtttggtgctgacgtccgattgatgttctccaactgctataagtacaaccctcctgaccatgaggtggtggccatggcccgcaagctccaggatgtgttcgaaatgcgctttgccaagatgccggacgagcctgaggagccagtggtggccgtgtcctccccggcagtgccccctcccaccaaggttgtggccccgccctcatccagcgacagcagcagcgatagctcctcggacagtgacagttcgactgatgactctgaggaggagcgagcccagcggctggctgagctccaggagcagctcaaagccgtgcacgagcagcttgcagccctctctcagccccagcagaacaaaccaaagaaaaaggagaaagacaagaaggaaaagaaaaaagaaaagcacaaaaggaaagaggaagtggaagagaataaaaaaagcaaagccaaggaacctcctcctaaaaagacgaagaaaaataatagcagcaacagcaatgtgagcaagaaggagccagcgcccatgaagagcaagccccctcccacgtatgagtcggaggaagaggacaagtgcaagcctatgtcctatgaggagaagcggcagctcagcttggacatcaacaagctccccggcgagaagctgggccgcgtggtgcacatcatccagtcacgggagccctccctgaagaattccaaccccgacgagattgaaatcgactttgagaccctgaagccgtccacactgcgtgagctggagcgctatgtcacctcctgtttgcggaagaaaaggaaacctcaagctgagaaagttgatgtgattgccggctcctccaagatgaagggcttctcgtcctcagagtcggagagctccagtgagtccagctcctctgacagcgaagactccgaaacaggtcctgcctaatcattggacacggactcttaataaaacggtcttcagttccagattccttcccagcaagctatagcttaagtccattttcttccgtgaaagggacaggactccatcaagttatggaattcctcagagccctgggcctgtcccccggggtggattagtcatgtccagcagcacacgcctagtcccgccttcgggaaggctgcctgcctggccagccgcccaggcctctctgtgtaaagactgcctggctgtcctgcccagccttcctggttctctggggtcctctgggtgggtggcatctcctggagggtgatgacaatccccaacacatgcattcatgtggtgctactctgtgtgcaaagccagaccccaagtatgttttctctctttgtcccatccctctttttctgggactttggaccctaactacttccctcctgaaccttgcagtgacatcagtccaggagagctctcgttcagtgtgcggaagaacactctgacctctagagctgtcctagataaggagtgggagctttagaggcaaggcctctagaccctggaaggctcagtgaggctcttcccacagcatgcttctcactggtgccctgtaaggctcgagccaccgctgactctgagccttttggagtctttcctccttcgtctccattgttcccgtgcatttccaaaagcttaagttgcctggtgggcatttccccagtttctttggcctccgtcttctcaagtcacatagggaaagtacctcctggaaccaggctgcagtatgcaggacctgccaggcaggcactggtgaagggccttgggcctatcatcccctcaaccccacctcaccccacccgcctcctctagtggggtgagtctgggctggtggaccagagagggtgtcacagaccctcagggactgccccatggacacctctgactggtgttaacagtgtgaacattttccccgtcttcagtcccttagaatgacgacagcccctggggttggggcaggcgagtgtggccacatcatccaagccctcccagagacacaaataggcttttttgctctaaaaataaataccagcccttttttggtcacaaatccagcatctcagcagaaaactgcctgacatgaaaagtcccctgaggaactgcatctgcgtttcaggggcttttcattttttctccttttttaaagtgtagattgtgggtgcttcctagaggcctgccttcttctggaactggaagtgggctatcaccatgggcaagcccttgggtgcaggctccccacctgcctgggaactctggcagctctcctcagctccttgggcttgagcagctgcaactgccccagatttgctgtggaagcaggggctagccctggcctcaccagggcctcccggggccctgcattgatgctcaggagttcctgggctgctcttgatcctttctgggcatccagcttccagttaagctctgtttgccaaacaaactattctcagctgccctttggcctgcgcctgatgtgttcctgttgcagtcccgcctgcctgagacaggagcaggcaggagagccttcatgcccagattcccacaggacaattggggagctgctggcattgtctttctgggaagattctgctttcttggaccaaatggcagcctgattaccagtgtcgggcctgcatgctgcccccgacacacgcacgcacgcgcacacacgtgtgcacatgggccatagccacaagccagctctcctccagggtcctttcaacctcgctgtccagggaccctgtccttcttgcccgtggggcttccatctggcagagaacgttcagggcttgttgaacttgaaagctcattagacttaagctgtcacctgtgcttggtgccccaggaacagccagagaggacagtgcccactcacttcttgttggcagcctcctgtgcaggaagtgccagccgggcctcgacgcaccagctggctgtgggtcctgaggaggggcgggaggcggccgctcagtgcagatggggactcctctcctctgccctgaccttaccctccattacctccttcactggagtggggctggggggtgggtggaatcagtgttttaatcggatttttaaaaaacattttatttctttgtacaattaccatcctatgtaaagatgaaatttgtgttgagttgaagattgtcatggaataaagatcacaccgtacttgaggccatcttcatgtaaccctttctagagagttttgtgtgggggtgtcttggggctggtgtgttgtgaagctgt

SEQ ID NO: 434881 - DNA, 4560 bp, Homo sapiens
gggaggaggaggaggaggaagcggccgccgcggggtccgcggcgcgcccggcccggagtgcctggtgaagaatgtgatgggatcactagcatgtctgcggagagcggccctgggacgagattgagaaatctgccagtaatgggggatggactagaaacttcccaaatgtctacaacacaggcccaggcccaaccccagccagccaacgcagccagcaccaaccccccgcccccagagacctccaaccctaacaagcccaagaggcagaccaaccaactgcaatacctgctcagagtggtgctcaagacactatggaaacaccagtttgcatggcctttccagcagcctgtggatgccgtcaagctgaacctccctgattactataagatcattaaaacgcctatggatatgggaacaataaagaagcgcttggaaaacaactattactggaatgctcaggaatgtatccaggacttcaacactatgtttacaaattgttacatctacaacaagcctggagatgacatagtcttaatggcagaagctctggaaaagctcttcttgcaaaaaataaatgagctacccacagaagaaaccgagatcatgatagtccaggcaaaaggaagaggacgtgggaggaaagaaacagggacagcaaaacctggcgtttccacggtaccaaacacaactcaagcatcgactcctccgcagacccagacccctcagccgaatcctcctcctgtgcaggccacgcctcaccccttccctgccgtcaccccggacctcatcgtccagacccctgtcatgacagtggtgcctccccagccactgcagacgcccccgccagtgcccccccagccacaacccccacccgctccagctccccagcccgtacagagccacccacccatcatcgcggccaccccacagcctgtgaagacaaagaagggagtgaagaggaaagcagacaccaccacccccaccaccattgaccccattcacgagccaccctcgctgcccccggagcccaagaccaccaagctgggccagcggcgggagagcagccggcctgtgaaacctccaaagaaggacgtgcccgactctcagcagcacccagcaccagagaagagcagcaaggtctcggagcagctcaagtgctgcagcggcatcctcaaggagatgtttgccaagaagcacgccgcctacgcctggcccttctacaagcctgtggacgtggaggcactgggcctacacgactactgtgacatcatcaagcaccccatggacatgagcacaatcaagtctaaactggaggcccgtgagtaccgtgatgctcaggagtttggtgctgacgtccgattgatgttctccaactgctataagtacaaccctcctgaccatgaggtggtggccatggcccgcaagctccaggatgtgttcgaaatgcgctttgccaagatgccggacgagcctgaggagccagtggtggccgtgtcctccccggcagtgccccctcccaccaaggttgtggccccgccctcatccagcgacagcagcagcgatagctcctcggacagtgacagttcgactgatgactctgaggaggagcgagcccagcggctggctgagctccaggagcagctcaaagccgtgcacgagcagcttgcagccctctctcagccccagcagaacaaaccaaagaaaaaggagaaagacaagaaggaaaagaaaaaagaaaagcacaaaaggaaagaggaagtggaagagaataaaaaaagcaaagccaaggaacctcctcctaaaaagacgaagaaaaataatagcagcaacagcaatgtgagcaagaaggagccagcgcccatgaagagcaagccccctcccacgtatgagtcggaggaagaggacaagtgcaagcctatgtcctatgaggagaagcggcagctcagcttggacatcaacaagctccccggcgagaagctgggccgcgtggtgcacatcatccagtcacgggagccctccctgaagaattccaaccccgacgagattgaaatcgactttgagaccctgaagccgtccacactgcgtgagctggagcgctatgtcacctcctgtttgcggaagaaaaggaaacctcaagctgagaaagttgatgtgattgccggctcctccaagatgaagggcttctcgtcctcagagtcggagagctccagtgagtccagctcctctgacagcgaagactccgaaacaggtcctgcctaatcattggacacggactcttaataaaacggtcttcagttccagattccttcccagcaagctatagcttaagtccattttcttccgtgaaagggacaggactccatcaagttatggaattcctcagagccctgggcctgtcccccggggtggattagtcatgtccagcagcacacgcctagtcccgccttcgggaaggctgcctgcctggccagccgcccaggcctctctgtgtaaagactgcctggctgtcctgcccagccttcctggttctctggggtcctctgggtgggtggcatctcctggagggtgatgacaatccccaacacatgcattcatgtggtgctactctgtgtgcaaagccagaccccaagtatgttttctctctttgtcccatccctctttttctgggactttggaccctaactacttccctcctgaaccttgcagtgacatcagtccaggagagctctcgttcagtgtgcggaagaacactctgacctctagagctgtcctagataaggagtgggagctttagaggcaaggcctctagaccctggaaggctcagtgaggctcttcccacagcatgcttctcactggtgccctgtaaggctcgagccaccgctgactctgagccttttggagtctttcctccttcgtctccattgttcccgtgcatttccaaaagcttaagttgcctggtgggcatttccccagtttctttggcctccgtcttctcaagtcacatagggaaagtacctcctggaaccaggctgcagtatgcaggacctgccaggcaggcactggtgaagggccttgggcctatcatcccctcaaccccacctcaccccacccgcctcctctagtggggtgagtctgggctggtggaccagagagggtgtcacagaccctcagggactgccccatggacacctctgactggtgttaacagtgtgaacattttccccgtcttcagtcccttagaatgacgacagcccctggggttggggcaggcgagtgtggccacatcatccaagccctcccagagacacaaataggcttttttgctctaaaaataaataccagcccttttttggtcacaaatccagcatctcagcagaaaactgcctgacatgaaaagtcccctgaggaactgcatctgcgtttcaggggcttttcattttttctccttttttaaagtgtagattgtgggtgcttcctagaggcctgccttcttctggaactggaagtgggctatcaccatgggcaagcccttgggtgcaggctccccacctgcctgggaactctggcagctctcctcagctccttgggcttgagcagctgcaactgccccagatttgctgtggaagcaggggctagccctggcctcaccagggcctcccggggccctgcattgatgctcaggagttcctgggctgctcttgatcctttctgggcatccagcttccagttaagctctgtttgccaaacaaactattctcagctgccctttggcctgcgcctgatgtgttcctgttgcagtcccgcctgcctgagacaggagcaggcaggagagccttcatgcccagattcccacaggacaattggggagctgctggcattgtctttctgggaagattctgctttcttggaccaaatggcagcctgattaccagtgtcgggcctgcatgctgcccccgacacacgcacgcacgcgcacacacgtgtgcacatgggccatagccacaagccagctctcctccagggtcctttcaacctcgctgtccagggaccctgtccttcttgcccgtggggcttccatctggcagagaacgttcagggcttgttgaacttgaaagctcattagacttaagctgtcacctgtgcttggtgccccaggaacagccagagaggacagtgcccactcacttcttgttggcagcctcctgtgcaggaagtgccagccgggcctcgacgcaccagctggctgtgggtcctgaggaggggcgggaggcggccgctcagtgcagatggggactcctctcctctgccctgaccttaccctccattacctccttcactggagtggggctggggggtgggtggaatcagtgttttaatcggatttttaaaaaacattttatttctttgtacaattaccatcctatgtaaagatgaaatttgtgttgagttgaagattgtcatggaataaagatcacaccgtacttgaggccatcttcatgtaaccctttctagagagttttgtgtgggggtgtcttggggctggtgtgttgtgaagctgt

SEQ ID NO: 434882 - DNA, 4775 bp, Homo sapiens
cagagcctttgctggctcctagtgggctctcaccacctcactctgcctcctctgttggtttgtggtctcctccctgctggagggtaagtctttggggagaggagacattggaaccctttcagtcaaagcatggggtggtccctctggccaacttggctagctaccgccagggaactcagtccttggagaccacagccagagggacttgtcattctgagcggtgcccatctgctgactgatatctcacgggggctcttctcttcctttgtagagtgcctggtgaagaatgtgatgggatcactagcatgtctgcggagagcggccctgggacgagattgagaaatctgccagtaatgggggatggactagaaacttcccaaatgtctacaacacaggcccaggcccaaccccagccagccaacgcagccagcaccaaccccccgcccccagagacctccaaccctaacaagcccaagaggcagaccaaccaactgcaatacctgctcagagtggtgctcaagacactatggaaacaccagtttgcatggcctttccagcagcctgtggatgccgtcaagctgaacctccctgattactataagatcattaaaacgcctatggatatgggaacaataaagaagcgcttggaaaacaactattactggaatgctcaggaatgtatccaggacttcaacactatgtttacaaattgttacatctacaacaagcctggagatgacatagtcttaatggcagaagctctggaaaagctcttcttgcaaaaaataaatgagctacccacagaagaaaccgagatcatgatagtccaggcaaaaggaagaggacgtgggaggaaagaaacagggacagcaaaacctggcgtttccacggtaccaaacacaactcaagcatcgactcctccgcagacccagacccctcagccgaatcctcctcctgtgcaggccacgcctcaccccttccctgccgtcaccccggacctcatcgtccagacccctgtcatgacagtggtgcctccccagccactgcagacgcccccgccagtgcccccccagccacaacccccacccgctccagctccccagcccgtacagagccacccacccatcatcgcggccaccccacagcctgtgaagacaaagaagggagtgaagaggaaagcagacaccaccacccccaccaccattgaccccattcacgagccaccctcgctgcccccggagcccaagaccaccaagctgggccagcggcgggagagcagccggcctgtgaaacctccaaagaaggacgtgcccgactctcagcagcacccagcaccagagaagagcagcaaggtctcggagcagctcaagtgctgcagcggcatcctcaaggagatgtttgccaagaagcacgccgcctacgcctggcccttctacaagcctgtggacgtggaggcactgggcctacacgactactgtgacatcatcaagcaccccatggacatgagcacaatcaagtctaaactggaggcccgtgagtaccgtgatgctcaggagtttggtgctgacgtccgattgatgttctccaactgctataagtacaaccctcctgaccatgaggtggtggccatggcccgcaagctccaggatgtgttcgaaatgcgctttgccaagatgccggacgagcctgaggagccagtggtggccgtgtcctccccggcagtgccccctcccaccaaggttgtggccccgccctcatccagcgacagcagcagcgatagctcctcggacagtgacagttcgactgatgactctgaggaggagcgagcccagcggctggctgagctccaggagcagctcaaagccgtgcacgagcagcttgcagccctctctcagccccagcagaacaaaccaaagaaaaaggagaaagacaagaaggaaaagaaaaaagaaaagcacaaaaggaaagaggaagtggaagagaataaaaaaagcaaagccaaggaacctcctcctaaaaagacgaagaaaaataatagcagcaacagcaatgtgagcaagaaggagccagcgcccatgaagagcaagccccctcccacgtatgagtcggaggaagaggacaagtgcaagcctatgtcctatgaggagaagcggcagctcagcttggacatcaacaagctccccggcgagaagctgggccgcgtggtgcacatcatccagtcacgggagccctccctgaagaattccaaccccgacgagattgaaatcgactttgagaccctgaagccgtccacactgcgtgagctggagcgctatgtcacctcctgtttgcggaagaaaaggaaacctcaagctgagaaagttgatgtgattgccggctcctccaagatgaagggcttctcgtcctcagagtcggagagctccagtgagtccagctcctctgacagcgaagactccgaaacaggtcctgcctaatcattggacacggactcttaataaaacggtcttcagttccagattccttcccagcaagctatagcttaagtccattttcttccgtgaaagggacaggactccatcaagttatggaattcctcagagccctgggcctgtcccccggggtggattagtcatgtccagcagcacacgcctagtcccgccttcgggaaggctgcctgcctggccagccgcccaggcctctctgtgtaaagactgcctggctgtcctgcccagccttcctggttctctggggtcctctgggtgggtggcatctcctggagggtgatgacaatccccaacacatgcattcatgtggtgctactctgtgtgcaaagccagaccccaagtatgttttctctctttgtcccatccctctttttctgggactttggaccctaactacttccctcctgaaccttgcagtgacatcagtccaggagagctctcgttcagtgtgcggaagaacactctgacctctagagctgtcctagataaggagtgggagctttagaggcaaggcctctagaccctggaaggctcagtgaggctcttcccacagcatgcttctcactggtgccctgtaaggctcgagccaccgctgactctgagccttttggagtctttcctccttcgtctccattgttcccgtgcatttccaaaagcttaagttgcctggtgggcatttccccagtttctttggcctccgtcttctcaagtcacatagggaaagtacctcctggaaccaggctgcagtatgcaggacctgccaggcaggcactggtgaagggccttgggcctatcatcccctcaaccccacctcaccccacccgcctcctctagtggggtgagtctgggctggtggaccagagagggtgtcacagaccctcagggactgccccatggacacctctgactggtgttaacagtgtgaacattttccccgtcttcagtcccttagaatgacgacagcccctggggttggggcaggcgagtgtggccacatcatccaagccctcccagagacacaaataggcttttttgctctaaaaataaataccagcccttttttggtcacaaatccagcatctcagcagaaaactgcctgacatgaaaagtcccctgaggaactgcatctgcgtttcaggggcttttcattttttctccttttttaaagtgtagattgtgggtgcttcctagaggcctgccttcttctggaactggaagtgggctatcaccatgggcaagcccttgggtgcaggctccccacctgcctgggaactctggcagctctcctcagctccttgggcttgagcagctgcaactgccccagatttgctgtggaagcaggggctagccctggcctcaccagggcctcccggggccctgcattgatgctcaggagttcctgggctgctcttgatcctttctgggcatccagcttccagttaagctctgtttgccaaacaaactattctcagctgccctttggcctgcgcctgatgtgttcctgttgcagtcccgcctgcctgagacaggagcaggcaggagagccttcatgcccagattcccacaggacaattggggagctgctggcattgtctttctgggaagattctgctttcttggaccaaatggcagcctgattaccagtgtcgggcctgcatgctgcccccgacacacgcacgcacgcgcacacacgtgtgcacatgggccatagccacaagccagctctcctccagggtcctttcaacctcgctgtccagggaccctgtccttcttgcccgtggggcttccatctggcagagaacgttcagggcttgttgaacttgaaagctcattagacttaagctgtcacctgtgcttggtgccccaggaacagccagagaggacagtgcccactcacttcttgttggcagcctcctgtgcaggaagtgccagccgggcctcgacgcaccagctggctgtgggtcctgaggaggggcgggaggcggccgctcagtgcagatggggactcctctcctctgccctgaccttaccctccattacctccttcactggagtggggctggggggtgggtggaatcagtgttttaatcggatttttaaaaaacattttatttctttgtacaattaccatcctatgtaaagatgaaatttgtgttgagttgaagattgtcatggaataaagatcacaccgtacttgaggccatcttcatgtaaccctttctagagagttttgtgtgggggtgtcttggggctggtgtgttgtgaagctgt

SEQ ID NO: 434883 - DNA, 4631 bp, Homo sapiens
gggaggaggaggaggaggaagcggccgccgcggggtccgcggcgcgcccggcccggagtgcctggtgaagaatgtgatgggatcactagcatgtctgcggagagcggccctgggacgagattgagaaatctgccagtaatgggggatggactagaaacttcccaaatgtctacaacacaggcccaggcccaaccccagccagccaacgcagccagcaccaaccccccgcccccagagacctccaaccctaacaagcccaagaggcagaccaaccaactgcaatacctgctcagagtggtgctcaagacactatggaaacaccagtttgcatggcctttccagcagcctgtggatgccgtcaagctgaacctccctgagggcattggtgaccttaggaagacgtgacacagaagtagaaaccagattgcgacggtgtgaatgagaaggattactataagatcattaaaacgcctatggatatgggaacaataaagaagcgcttggaaaacaactattactggaatgctcaggaatgtatccaggacttcaacactatgtttacaaattgttacatctacaacaagcctggagatgacatagtcttaatggcagaagctctggaaaagctcttcttgcaaaaaataaatgagctacccacagaagaaaccgagatcatgatagtccaggcaaaaggaagaggacgtgggaggaaagaaacagggacagcaaaacctggcgtttccacggtaccaaacacaactcaagcatcgactcctccgcagacccagacccctcagccgaatcctcctcctgtgcaggccacgcctcaccccttccctgccgtcaccccggacctcatcgtccagacccctgtcatgacagtggtgcctccccagccactgcagacgcccccgccagtgcccccccagccacaacccccacccgctccagctccccagcccgtacagagccacccacccatcatcgcggccaccccacagcctgtgaagacaaagaagggagtgaagaggaaagcagacaccaccacccccaccaccattgaccccattcacgagccaccctcgctgcccccggagcccaagaccaccaagctgggccagcggcgggagagcagccggcctgtgaaacctccaaagaaggacgtgcccgactctcagcagcacccagcaccagagaagagcagcaaggtctcggagcagctcaagtgctgcagcggcatcctcaaggagatgtttgccaagaagcacgccgcctacgcctggcccttctacaagcctgtggacgtggaggcactgggcctacacgactactgtgacatcatcaagcaccccatggacatgagcacaatcaagtctaaactggaggcccgtgagtaccgtgatgctcaggagtttggtgctgacgtccgattgatgttctccaactgctataagtacaaccctcctgaccatgaggtggtggccatggcccgcaagctccaggatgtgttcgaaatgcgctttgccaagatgccggacgagcctgaggagccagtggtggccgtgtcctccccggcagtgccccctcccaccaaggttgtggccccgccctcatccagcgacagcagcagcgatagctcctcggacagtgacagttcgactgatgactctgaggaggagcgagcccagcggctggctgagctccaggagcagctcaaagccgtgcacgagcagcttgcagccctctctcagccccagcagaacaaaccaaagaaaaaggagaaagacaagaaggaaaagaaaaaagaaaagcacaaaaggaaagaggaagtggaagagaataaaaaaagcaaagccaaggaacctcctcctaaaaagacgaagaaaaataatagcagcaacagcaatgtgagcaagaaggagccagcgcccatgaagagcaagccccctcccacgtatgagtcggaggaagaggacaagtgcaagcctatgtcctatgaggagaagcggcagctcagcttggacatcaacaagctccccggcgagaagctgggccgcgtggtgcacatcatccagtcacgggagccctccctgaagaattccaaccccgacgagattgaaatcgactttgagaccctgaagccgtccacactgcgtgagctggagcgctatgtcacctcctgtttgcggaagaaaaggaaacctcaagctgagaaagttgatgtgattgccggctcctccaagatgaagggcttctcgtcctcagagtcggagagctccagtgagtccagctcctctgacagcgaagactccgaaacaggtcctgcctaatcattggacacggactcttaataaaacggtcttcagttccagattccttcccagcaagctatagcttaagtccattttcttccgtgaaagggacaggactccatcaagttatggaattcctcagagccctgggcctgtcccccggggtggattagtcatgtccagcagcacacgcctagtcccgccttcgggaaggctgcctgcctggccagccgcccaggcctctctgtgtaaagactgcctggctgtcctgcccagccttcctggttctctggggtcctctgggtgggtggcatctcctggagggtgatgacaatccccaacacatgcattcatgtggtgctactctgtgtgcaaagccagaccccaagtatgttttctctctttgtcccatccctctttttctgggactttggaccctaactacttccctcctgaaccttgcagtgacatcagtccaggagagctctcgttcagtgtgcggaagaacactctgacctctagagctgtcctagataaggagtgggagctttagaggcaaggcctctagaccctggaaggctcagtgaggctcttcccacagcatgcttctcactggtgccctgtaaggctcgagccaccgctgactctgagccttttggagtctttcctccttcgtctccattgttcccgtgcatttccaaaagcttaagttgcctggtgggcatttccccagtttctttggcctccgtcttctcaagtcacatagggaaagtacctcctggaaccaggctgcagtatgcaggacctgccaggcaggcactggtgaagggccttgggcctatcatcccctcaaccccacctcaccccacccgcctcctctagtggggtgagtctgggctggtggaccagagagggtgtcacagaccctcagggactgccccatggacacctctgactggtgttaacagtgtgaacattttccccgtcttcagtcccttagaatgacgacagcccctggggttggggcaggcgagtgtggccacatcatccaagccctcccagagacacaaataggcttttttgctctaaaaataaataccagcccttttttggtcacaaatccagcatctcagcagaaaactgcctgacatgaaaagtcccctgaggaactgcatctgcgtttcaggggcttttcattttttctccttttttaaagtgtagattgtgggtgcttcctagaggcctgccttcttctggaactggaagtgggctatcaccatgggcaagcccttgggtgcaggctccccacctgcctgggaactctggcagctctcctcagctccttgggcttgagcagctgcaactgccccagatttgctgtggaagcaggggctagccctggcctcaccagggcctcccggggccctgcattgatgctcaggagttcctgggctgctcttgatcctttctgggcatccagcttccagttaagctctgtttgccaaacaaactattctcagctgccctttggcctgcgcctgatgtgttcctgttgcagtcccgcctgcctgagacaggagcaggcaggagagccttcatgcccagattcccacaggacaattggggagctgctggcattgtctttctgggaagattctgctttcttggaccaaatggcagcctgattaccagtgtcgggcctgcatgctgcccccgacacacgcacgcacgcgcacacacgtgtgcacatgggccatagccacaagccagctctcctccagggtcctttcaacctcgctgtccagggaccctgtccttcttgcccgtggggcttccatctggcagagaacgttcagggcttgttgaacttgaaagctcattagacttaagctgtcacctgtgcttggtgccccaggaacagccagagaggacagtgcccactcacttcttgttggcagcctcctgtgcaggaagtgccagccgggcctcgacgcaccagctggctgtgggtcctgaggaggggcgggaggcggccgctcagtgcagatggggactcctctcctctgccctgaccttaccctccattacctccttcactggagtggggctggggggtgggtggaatcagtgttttaatcggatttttaaaaaacattttatttctttgtacaattaccatcctatgtaaagatgaaatttgtgttgagttgaagattgtcatggaataaagatcacaccgtacttgaggccatcttcatgtaaccctttctagagagttttgtgtgggggtgtcttggggctggtgtgttgtgaagctgt

SEQ ID NO: 434884 - DNA, 4877 bp, Homo sapiens
gctggcggcggcggcggcggcggcggcggcggctgggctgtttgttctggtctcccgcagccgaggagccgaagcagtggcggcggcagcggctgcggcggctgccggcggtgcccgcgggcgagcgcggcctgtgagctcggcagagcggcgggcgggccccggcgccgcgcaggcagctcggggagggggcggcggcagcgggcggacggccggcgggggcggcgtgcggcctagcgtctcagagtgcctggtgaagaatgtgatgggatcactagcatgtctgcggagagcggccctgggacgagattgagaaatctgccagtaatgggggatggactagaaacttcccaaatgtctacaacacaggcccaggcccaaccccagccagccaacgcagccagcaccaaccccccgcccccagagacctccaaccctaacaagcccaagaggcagaccaaccaactgcaatacctgctcagagtggtgctcaagacactatggaaacaccagtttgcatggcctttccagcagcctgtggatgccgtcaagctgaacctccctgattactataagatcattaaaacgcctatggatatgggaacaataaagaagcgcttggaaaacaactattactggaatgctcaggaatgtatccaggacttcaacactatgtttacaaattgttacatctacaacaagttcagaccacagatgtgattaaaatcaaccctttcaaatagaacgactctggagggagacactatacagaactcagcttttgacctctgctggtgtagtgggtaaaaatgcccagaagagatgggtagcctggagatgacatagtcttaatggcagaagctctggaaaagctcttcttgcaaaaaataaatgagctacccacagaagaaaccgagatcatgatagtccaggcaaaaggaagaggacgtgggaggaaagaaacagggacagcaaaacctggcgtttccacggtaccaaacacaactcaagcatcgactcctccgcagacccagacccctcagccgaatcctcctcctgtgcaggccacgcctcaccccttccctgccgtcaccccggacctcatcgtccagacccctgtcatgacagtggtgcctccccagccactgcagacgcccccgccagtgcccccccagccacaacccccacccgctccagctccccagcccgtacagagccacccacccatcatcgcggccaccccacagcctgtgaagacaaagaagggagtgaagaggaaagcagacaccaccacccccaccaccattgaccccattcacgagccaccctcgctgcccccggagcccaagaccaccaagctgggccagcggcgggagagcagccggcctgtgaaacctccaaagaaggacgtgcccgactctcagcagcacccagcaccagagaagagcagcaaggtctcggagcagctcaagtgctgcagcggcatcctcaaggagatgtttgccaagaagcacgccgcctacgcctggcccttctacaagcctgtggacgtggaggcactgggcctacacgactactgtgacatcatcaagcaccccatggacatgagcacaatcaagtctaaactggaggcccgtgagtaccgtgatgctcaggagtttggtgctgacgtccgattgatgttctccaactgctataagtacaaccctcctgaccatgaggtggtggccatggcccgcaagctccaggatgtgttcgaaatgcgctttgccaagatgccggacgagcctgaggagccagtggtggccgtgtcctccccggcagtgccccctcccaccaaggttgtggccccgccctcatccagcgacagcagcagcgatagctcctcggacagtgacagttcgactgatgactctgaggaggagcgagcccagcggctggctgagctccaggagcagctcaaagccgtgcacgagcagcttgcagccctctctcagccccagcagaacaaaccaaagaaaaaggagaaagacaagaaggaaaagaaaaaagaaaagcacaaaaggaaagaggaagtggaagagaataaaaaaagcaaagccaaggaacctcctcctaaaaagacgaagaaaaataatagcagcaacagcaatgtgagcaagaaggagccagcgcccatgaagagcaagccccctcccacgtatgagtcggaggaagaggacaagtgcaagcctatgtcctatgaggagaagcggcagctcagcttggacatcaacaagctccccggcgagaagctgggccgcgtggtgcacatcatccagtcacgggagccctccctgaagaattccaaccccgacgagattgaaatcgactttgagaccctgaagccgtccacactgcgtgagctggagcgctatgtcacctcctgtttgcggaagaaaaggaaacctcaagctgagaaagttgatgtgattgccggctcctccaagatgaagggcttctcgtcctcagagtcggagagctccagtgagtccagctcctctgacagcgaagactccgaaacaggtcctgcctaatcattggacacggactcttaataaaacggtcttcagttccagattccttcccagcaagctatagcttaagtccattttcttccgtgaaagggacaggactccatcaagttatggaattcctcagagccctgggcctgtcccccggggtggattagtcatgtccagcagcacacgcctagtcccgccttcgggaaggctgcctgcctggccagccgcccaggcctctctgtgtaaagactgcctggctgtcctgcccagccttcctggttctctggggtcctctgggtgggtggcatctcctggagggtgatgacaatccccaacacatgcattcatgtggtgctactctgtgtgcaaagccagaccccaagtatgttttctctctttgtcccatccctctttttctgggactttggaccctaactacttccctcctgaaccttgcagtgacatcagtccaggagagctctcgttcagtgtgcggaagaacactctgacctctagagctgtcctagataaggagtgggagctttagaggcaaggcctctagaccctggaaggctcagtgaggctcttcccacagcatgcttctcactggtgccctgtaaggctcgagccaccgctgactctgagccttttggagtctttcctccttcgtctccattgttcccgtgcatttccaaaagcttaagttgcctggtgggcatttccccagtttctttggcctccgtcttctcaagtcacatagggaaagtacctcctggaaccaggctgcagtatgcaggacctgccaggcaggcactggtgaagggccttgggcctatcatcccctcaaccccacctcaccccacccgcctcctctagtggggtgagtctgggctggtggaccagagagggtgtcacagaccctcagggactgccccatggacacctctgactggtgttaacagtgtgaacattttccccgtcttcagtcccttagaatgacgacagcccctggggttggggcaggcgagtgtggccacatcatccaagccctcccagagacacaaataggcttttttgctctaaaaataaataccagcccttttttggtcacaaatccagcatctcagcagaaaactgcctgacatgaaaagtcccctgaggaactgcatctgcgtttcaggggcttttcattttttctccttttttaaagtgtagattgtgggtgcttcctagaggcctgccttcttctggaactggaagtgggctatcaccatgggcaagcccttgggtgcaggctccccacctgcctgggaactctggcagctctcctcagctccttgggcttgagcagctgcaactgccccagatttgctgtggaagcaggggctagccctggcctcaccagggcctcccggggccctgcattgatgctcaggagttcctgggctgctcttgatcctttctgggcatccagcttccagttaagctctgtttgccaaacaaactattctcagctgccctttggcctgcgcctgatgtgttcctgttgcagtcccgcctgcctgagacaggagcaggcaggagagccttcatgcccagattcccacaggacaattggggagctgctggcattgtctttctgggaagattctgctttcttggaccaaatggcagcctgattaccagtgtcgggcctgcatgctgcccccgacacacgcacgcacgcgcacacacgtgtgcacatgggccatagccacaagccagctctcctccagggtcctttcaacctcgctgtccagggaccctgtccttcttgcccgtggggcttccatctggcagagaacgttcagggcttgttgaacttgaaagctcattagacttaagctgtcacctgtgcttggtgccccaggaacagccagagaggacagtgcccactcacttcttgttggcagcctcctgtgcaggaagtgccagccgggcctcgacgcaccagctggctgtgggtcctgaggaggggcgggaggcggccgctcagtgcagatggggactcctctcctctgccctgaccttaccctccattacctccttcactggagtggggctggggggtgggtggaatcagtgttttaatcggatttttaaaaaacattttatttctttgtacaattaccatcctatgtaaagatgaaatttgtgttgagttgaagattgtcatggaataaagatcacaccgtacttgaggccatcttcatgtaaccctttctagagagttttgtgtgggggtgtcttggggctggtgtgttgtgaagctgt

SEQ ID NO: 434885 - DNA, 4224 bp, Homo sapiens
ggcagaagctctggaaaagctcttcttgcaaaaaataaatgagctacccacagaagaaacagggacagctcattttttttttgcaagaagcgcttggaaaacaactattactggaatgctcaggaatgtatccaggacttcaacactatgtttacaaattgttacatctacaacaagcctggagatgacatagtcttaatggcagaagctctggaaaagctcttcttgcaaaaaataaatgagctacccacagaagaaaccgagatcatgatagtccaggcaaaaggaagaggacgtgggaggaaagaaacagggacagcaaaacctggcgtttccacggtaccaaacacaactcaagcatcgactcctccgcagacccagacccctcagccgaatcctcctcctgtgcaggccacgcctcaccccttccctgccgtcaccccggacctcatcgtccagacccctgtcatgacagtggtgcctccccagccactgcagacgcccccgccagtgcccccccagccacaacccccacccgctccagctccccagcccgtacagagccacccacccatcatcgcggccaccccacagcctgtgaagacaaagaagggagtgaagaggaaagcagacaccaccacccccaccaccattgaccccattcacgagccaccctcgctgcccccggagcccaagaccaccaagctgggccagcggcgggagagcagccggcctgtgaaacctccaaagaaggacgtgcccgactctcagcagcacccagcaccagagaagagcagcaaggtctcggagcagctcaagtgctgcagcggcatcctcaaggagatgtttgccaagaagcacgccgcctacgcctggcccttctacaagcctgtggacgtggaggcactgggcctacacgactactgtgacatcatcaagcaccccatggacatgagcacaatcaagtctaaactggaggcccgtgagtaccgtgatgctcaggagtttggtgctgacgtccgattgatgttctccaactgctataagtacaaccctcctgaccatgaggtggtggccatggcccgcaagctccaggatgtgttcgaaatgcgctttgccaagatgccggacgagcctgaggagccagtggtggccgtgtcctccccggcagtgccccctcccaccaaggttgtggccccgccctcatccagcgacagcagcagcgatagctcctcggacagtgacagttcgactgatgactctgaggaggagcgagcccagcggctggctgagctccaggagcagctcaaagccgtgcacgagcagcttgcagccctctctcagccccagcagaacaaaccaaagaaaaaggagaaagacaagaaggaaaagaaaaaagaaaagcacaaaaggaaagaggaagtggaagagaataaaaaaagcaaagccaaggaacctcctcctaaaaagacgaagaaaaataatagcagcaacagcaatgtgagcaagaaggagccagcgcccatgaagagcaagccccctcccacgtatgagtcggaggaagaggacaagtgcaagcctatgtcctatgaggagaagcggcagctcagcttggacatcaacaagctccccggcgagaagctgggccgcgtggtgcacatcatccagtcacgggagccctccctgaagaattccaaccccgacgagattgaaatcgactttgagaccctgaagccgtccacactgcgtgagctggagcgctatgtcacctcctgtttgcggaagaaaaggaaacctcaagctgagaaagttgatgtgattgccggctcctccaagatgaagggcttctcgtcctcagagtcggagagctccagtgagtccagctcctctgacagcgaagactccgaaacaggtcctgcctaatcattggacacggactcttaataaaacggtcttcagttccagattccttcccagcaagctatagcttaagtccattttcttccgtgaaagggacaggactccatcaagttatggaattcctcagagccctgggcctgtcccccggggtggattagtcatgtccagcagcacacgcctagtcccgccttcgggaaggctgcctgcctggccagccgcccaggcctctctgtgtaaagactgcctggctgtcctgcccagccttcctggttctctggggtcctctgggtgggtggcatctcctggagggtgatgacaatccccaacacatgcattcatgtggtgctactctgtgtgcaaagccagaccccaagtatgttttctctctttgtcccatccctctttttctgggactttggaccctaactacttccctcctgaaccttgcagtgacatcagtccaggagagctctcgttcagtgtgcggaagaacactctgacctctagagctgtcctagataaggagtgggagctttagaggcaaggcctctagaccctggaaggctcagtgaggctcttcccacagcatgcttctcactggtgccctgtaaggctcgagccaccgctgactctgagccttttggagtctttcctccttcgtctccattgttcccgtgcatttccaaaagcttaagttgcctggtgggcatttccccagtttctttggcctccgtcttctcaagtcacatagggaaagtacctcctggaaccaggctgcagtatgcaggacctgccaggcaggcactggtgaagggccttgggcctatcatcccctcaaccccacctcaccccacccgcctcctctagtggggtgagtctgggctggtggaccagagagggtgtcacagaccctcagggactgccccatggacacctctgactggtgttaacagtgtgaacattttccccgtcttcagtcccttagaatgacgacagcccctggggttggggcaggcgagtgtggccacatcatccaagccctcccagagacacaaataggcttttttgctctaaaaataaataccagcccttttttggtcacaaatccagcatctcagcagaaaactgcctgacatgaaaagtcccctgaggaactgcatctgcgtttcaggggcttttcattttttctccttttttaaagtgtagattgtgggtgcttcctagaggcctgccttcttctggaactggaagtgggctatcaccatgggcaagcccttgggtgcaggctccccacctgcctgggaactctggcagctctcctcagctccttgggcttgagcagctgcaactgccccagatttgctgtggaagcaggggctagccctggcctcaccagggcctcccggggccctgcattgatgctcaggagttcctgggctgctcttgatcctttctgggcatccagcttccagttaagctctgtttgccaaacaaactattctcagctgccctttggcctgcgcctgatgtgttcctgttgcagtcccgcctgcctgagacaggagcaggcaggagagccttcatgcccagattcccacaggacaattggggagctgctggcattgtctttctgggaagattctgctttcttggaccaaatggcagcctgattaccagtgtcgggcctgcatgctgcccccgacacacgcacgcacgcgcacacacgtgtgcacatgggccatagccacaagccagctctcctccagggtcctttcaacctcgctgtccagggaccctgtccttcttgcccgtggggcttccatctggcagagaacgttcagggcttgttgaacttgaaagctcattagacttaagctgtcacctgtgcttggtgccccaggaacagccagagaggacagtgcccactcacttcttgttggcagcctcctgtgcaggaagtgccagccgggcctcgacgcaccagctggctgtgggtcctgaggaggggcgggaggcggccgctcagtgcagatggggactcctctcctctgccctgaccttaccctccattacctccttcactggagtggggctggggggtgggtggaatcagtgttttaatcggatttttaaaaaacattttatttctttgtacaattaccatcctatgtaaagatgaaatttgtgttgagttgaagattgtcatggaataaagatcacaccgtacttgaggccatcttcatgtaaccctttctagagagttttgtgtgggggtgtcttggggctggtgtgttgtgaagctgt

SEQ ID NO: 434886 - DNA, 4803 bp, Homo sapiens
cagagcctttgctggctcctagtgggctctcaccacctcactctgcctcctctgttggtttgtggtctcctccctgctggagggtaagtctttggggagaggagacattggaaccctttcagtcaaagcatggggtggtccctctggccaacttggctagctaccgccagggaactcagtccttggagaccacagccagagggacttgtcattctgagcggtgcccatctgctgactgatatctcacgggggctcttctcttcctttgtagagtgcctggtgaagaatgtgatgggatcactagcatgtctgcggagagcggccctgggacgagattgagaaatctgccaagacctccaaccctaacaagcccaagaggcagaccaaccaactgcaatacctgctcagagtggtgctcaagacactatggaaacaccagtttgcatggcctttccagcagcctgtggatgccgtcaagctgaacctccctgattactataagatcattaaaacgcctatggatatgggaacaataaagaagcgcttggaaaacaactattactggaatgctcaggaatgtatccaggacttcaacactatgtttacaaattgttacatctacaacaagttcagaccacagatgtgattaaaatcaaccctttcaaatagaacgactctggagggagacactatacagaactcagcttttgacctctgctggtgtagtgggtaaaaatgcccagaagagatgggtagcctggagatgacatagtcttaatggcagaagctctggaaaagctcttcttgcaaaaaataaatgagctacccacagaagaaaccgagatcatgatagtccaggcaaaaggaagaggacgtgggaggaaagaaacagggacagcaaaacctggcgtttccacggtaccaaacacaactcaagcatcgactcctccgcagacccagacccctcagccgaatcctcctcctgtgcaggccacgcctcaccccttccctgccgtcaccccggacctcatcgtccagacccctgtcatgacagtggtgcctccccagccactgcagacgcccccgccagtgcccccccagccacaacccccacccgctccagctccccagcccgtacagagccacccacccatcatcgcggccaccccacagcctgtgaagacaaagaagggagtgaagaggaaagcagacaccaccacccccaccaccattgaccccattcacgagccaccctcgctgcccccggagcccaagaccaccaagctgggccagcggcgggagagcagccggcctgtgaaacctccaaagaaggacgtgcccgactctcagcagcacccagcaccagagaagagcagcaaggtctcggagcagctcaagtgctgcagcggcatcctcaaggagatgtttgccaagaagcacgccgcctacgcctggcccttctacaagcctgtggacgtggaggcactgggcctacacgactactgtgacatcatcaagcaccccatggacatgagcacaatcaagtctaaactggaggcccgtgagtaccgtgatgctcaggagtttggtgctgacgtccgattgatgttctccaactgctataagtacaaccctcctgaccatgaggtggtggccatggcccgcaagctccaggatgtgttcgaaatgcgctttgccaagatgccggacgagcctgaggagccagtggtggccgtgtcctccccggcagtgccccctcccaccaaggttgtggccccgccctcatccagcgacagcagcagcgatagctcctcggacagtgacagttcgactgatgactctgaggaggagcgagcccagcggctggctgagctccaggagcagctcaaagccgtgcacgagcagcttgcagccctctctcagccccagcagaacaaaccaaagaaaaaggagaaagacaagaaggaaaagaaaaaagaaaagcacaaaaggaaagaggaagtggaagagaataaaaaaagcaaagccaaggaacctcctcctaaaaagacgaagaaaaataatagcagcaacagcaatgtgagcaagaaggagccagcgcccatgaagagcaagccccctcccacgtatgagtcggaggaagaggacaagtgcaagcctatgtcctatgaggagaagcggcagctcagcttggacatcaacaagctccccggcgagaagctgggccgcgtggtgcacatcatccagtcacgggagccctccctgaagaattccaaccccgacgagattgaaatcgactttgagaccctgaagccgtccacactgcgtgagctggagcgctatgtcacctcctgtttgcggaagaaaaggaaacctcaagctgagaaagttgatgtgattgccggctcctccaagatgaagggcttctcgtcctcagagtcggagagctccagtgagtccagctcctctgacagcgaagactccgaaacaggtcctgcctaatcattggacacggactcttaataaaacggtcttcagttccagattccttcccagcaagctatagcttaagtccattttcttccgtgaaagggacaggactccatcaagttatggaattcctcagagccctgggcctgtcccccggggtggattagtcatgtccagcagcacacgcctagtcccgccttcgggaaggctgcctgcctggccagccgcccaggcctctctgtgtaaagactgcctggctgtcctgcccagccttcctggttctctggggtcctctgggtgggtggcatctcctggagggtgatgacaatccccaacacatgcattcatgtggtgctactctgtgtgcaaagccagaccccaagtatgttttctctctttgtcccatccctctttttctgggactttggaccctaactacttccctcctgaaccttgcagtgacatcagtccaggagagctctcgttcagtgtgcggaagaacactctgacctctagagctgtcctagataaggagtgggagctttagaggcaaggcctctagaccctggaaggctcagtgaggctcttcccacagcatgcttctcactggtgccctgtaaggctcgagccaccgctgactctgagccttttggagtctttcctccttcgtctccattgttcccgtgcatttccaaaagcttaagttgcctggtgggcatttccccagtttctttggcctccgtcttctcaagtcacatagggaaagtacctcctggaaccaggctgcagtatgcaggacctgccaggcaggcactggtgaagggccttgggcctatcatcccctcaaccccacctcaccccacccgcctcctctagtggggtgagtctgggctggtggaccagagagggtgtcacagaccctcagggactgccccatggacacctctgactggtgttaacagtgtgaacattttccccgtcttcagtcccttagaatgacgacagcccctggggttggggcaggcgagtgtggccacatcatccaagccctcccagagacacaaataggcttttttgctctaaaaataaataccagcccttttttggtcacaaatccagcatctcagcagaaaactgcctgacatgaaaagtcccctgaggaactgcatctgcgtttcaggggcttttcattttttctccttttttaaagtgtagattgtgggtgcttcctagaggcctgccttcttctggaactggaagtgggctatcaccatgggcaagcccttgggtgcaggctccccacctgcctgggaactctggcagctctcctcagctccttgggcttgagcagctgcaactgccccagatttgctgtggaagcaggggctagccctggcctcaccagggcctcccggggccctgcattgatgctcaggagttcctgggctgctcttgatcctttctgggcatccagcttccagttaagctctgtttgccaaacaaactattctcagctgccctttggcctgcgcctgatgtgttcctgttgcagtcccgcctgcctgagacaggagcaggcaggagagccttcatgcccagattcccacaggacaattggggagctgctggcattgtctttctgggaagattctgctttcttggaccaaatggcagcctgattaccagtgtcgggcctgcatgctgcccccgacacacgcacgcacgcgcacacacgtgtgcacatgggccatagccacaagccagctctcctccagggtcctttcaacctcgctgtccagggaccctgtccttcttgcccgtggggcttccatctggcagagaacgttcagggcttgttgaacttgaaagctcattagacttaagctgtcacctgtgcttggtgccccaggaacagccagagaggacagtgcccactcacttcttgttggcagcctcctgtgcaggaagtgccagccgggcctcgacgcaccagctggctgtgggtcctgaggaggggcgggaggcggccgctcagtgcagatggggactcctctcctctgccctgaccttaccctccattacctccttcactggagtggggctggggggtgggtggaatcagtgttttaatcggatttttaaaaaacattttatttctttgtacaattaccatcctatgtaaagatgaaatttgtgttgagttgaagattgtcatggaataaagatcacaccgtacttgaggccatcttcatgtaaccctttctagagagttttgtgtgggggtgtcttggggctggtgtgttgtgaagctgt

SEQ ID NO: 434887 - DNA, 4828 bp, Homo sapiens
gctggcggcggcggcggcggcggcggcggcggctgggctgtttgttctggtctcccgcagccgaggagccgaagcagtggcggcggcagcggctgcggcggctgccggcggtgcccgcgggcgagcgcggcctgtgagctcggcagagcggcgggcgggccccggcgccgcgcaggcagctcggggagggggcggcggcagcgggcggacggccggcgggggcggcgtgcggcctagcgtctcagagtgcctggtgaagaatgtgatgggatcactagcatgtctgcggagagcggccctgggacgagattgagaaatctgccagtaatgggggatggactagaaacttcccaaatgtctacaacacaggcccaggcccaaccccagccagccaacgcagccagcaccaaccccccgcccccagagacctccaaccctaacaagcccaagaggcagaccaaccaactgcaatacctgctcagagtggtgctcaagacactatggaaacaccagtttgcatggcctttccagcagcctgtggatgccgtcaagctgaacctccctgattactataagatcattaaaacgcctatggatatgggaacaataaagaagcgcttggaaaacaactattactggaatgctcaggaatgtatccaggacttcaacactatgtttacaaattgttacatctacaacaagcctggagatgacatagtcttaatggcagaagctctggaaaagctcttcttgcaaaaaataaatgagctacccacagaagaaaccgagatcatgatagtccaggcaaaaggaagaggacgtgggaggaaagaaacagggacagcaaaacctggcgtttccacggtaccaaacacaactcaagcatcgactcctccgcagacccagacccctcagccgaatcctcctcctgtgcaggccacgcctcaccccttccctgccgtcaccccggacctcatcgtccagacccctgtcatgacagtggtgcctccccagccactgcagacgcccccgccagtgcccccccagccacaacccccacccgctccagctccccagcccgtacagagccacccacccatcatcgcggccaccccacagcctgtgaagacaaagaagggagtgaagaggaaagcagacaccaccacccccaccaccattgaccccattcacgagccaccctcgctgcccccggagcccaagaccaccaagctgggccagcggcgggagagcagccggcctgtgaaacctccaaagaaggacgtgcccgactctcagcagcacccagcaccagagaagagcagcaaggtctcggagcagctcaagtgctgcagcggcatcctcaaggagatgtttgccaagaagcacgccgcctacgcctggcccttctacaagcctgtggacgtggaggcactgggcctacacgactactgtgacatcatcaagcaccccatggacatgagcacaatcaagtctaaactggaggcccgtgagtaccgtgatgctcaggagtttggtgctgacgtccgattgatgttctccaactgctataagtacaaccctcctgaccatgaggtggtggccatggcccgcaagctccaggatgtgttcgaaatgcgctttgccaagatgccggacgagcctgaggagccagtggtggccgtgtcctccccggcagtgccccctcccaccaaggttgtggccccgccctcatccagcgacagcagcagcgatagctcctcggacagtgacagttcgactgatgactctgaggaggagcgagcccagcggctggctgagctccaggagcagcgatagctcctcggacagtgacagttcgactgatgactctgaggaggagcgacccagcggctggctgagctccaggagcctcaaagccgtgcacgagcagcttgcagccctctctcagccccagcagaacaaaccaaagaaaaaggagaaagacaagaaggaaaagaaaaaagaaaagcacaaaaggaaagaggaagtggaagagaataaaaaaagcaaagccaaggaacctcctcctaaaaagacgaagaaaaataatagcagcaacagcaatgtgagcaagaaggagccagcgcccatgaagagcaagccccctcccacgtatgagtcggaggaagaggacaagtgcaagcctatgtcctatgaggagaagcggcagctcagcttggacatcaacaagctccccggcgagaagctgggccgcgtggtgcacatcatccagtcacgggagccctccctgaagaattccaaccccgacgagattgaaatcgactttgagaccctgaagccgtccacactgcgtgagctggagcgctatgtcacctcctgtttgcggaagaaaaggaaacctcaagctgagaaagttgatgtgattgccggctcctccaagatgaagggcttctcgtcctcagagtcggagagctccagtgagtccagctcctctgacagcgaagactccgaaacaggtcctgcctaatcattggacacggactcttaataaaacggtcttcagttccagattccttcccagcaagctatagcttaagtccattttcttccgtgaaagggacaggactccatcaagttatggaattcctcagagccctgggcctgtcccccggggtggattagtcatgtccagcagcacacgcctagtcccgccttcgggaaggctgcctgcctggccagccgcccaggcctctctgtgtaaagactgcctggctgtcctgcccagccttcctggttctctggggtcctctgggtgggtggcatctcctggagggtgatgacaatccccaacacatgcattcatgtggtgctactctgtgtgcaaagccagaccccaagtatgttttctctctttgtcccatccctctttttctgggactttggaccctaactacttccctcctgaaccttgcagtgacatcagtccaggagagctctcgttcagtgtgcggaagaacactctgacctctagagctgtcctagataaggagtgggagctttagaggcaaggcctctagaccctggaaggctcagtgaggctcttcccacagcatgcttctcactggtgccctgtaaggctcgagccaccgctgactctgagccttttggagtctttcctccttcgtctccattgttcccgtgcatttccaaaagcttaagttgcctggtgggcatttccccagtttctttggcctccgtcttctcaagtcacatagggaaagtacctcctggaaccaggctgcagtatgcaggacctgccaggcaggcactggtgaagggccttgggcctatcatcccctcaaccccacctcaccccacccgcctcctctagtggggtgagtctgggctggtggaccagagagggtgtcacagaccctcagggactgccccatggacacctctgactggtgttaacagtgtgaacattttccccgtcttcagtcccttagaatgacgacagcccctggggttggggcaggcgagtgtggccacatcatccaagccctcccagagacacaaataggcttttttgctctaaaaataaataccagcccttttttggtcacaaatccagcatctcagcagaaaactgcctgacatgaaaagtcccctgaggaactgcatctgcgtttcaggggcttttcattttttctccttttttaaagtgtagattgtgggtgcttcctagaggcctgccttcttctggaactggaagtgggctatcaccatgggcaagcccttgggtgcaggctccccacctgcctgggaactctggcagctctcctcagctccttgggcttgagcagctgcaactgccccagatttgctgtggaagcaggggctagccctggcctcaccagggcctcccggggccctgcattgatgctcaggagttcctgggctgctcttgatcctttctgggcatccagcttccagttaagctctgtttgccaaacaaactattctcagctgccctttggcctgcgcctgatgtgttcctgttgcagtcccgcctgcctgagacaggagcaggcaggagagccttcatgcccagattcccacaggacaattggggagctgctggcattgtctttctgggaagattctgctttcttggaccaaatggcagcctgattaccagtgtcgggcctgcatgctgcccccgacacacgcacgcacgcgcacacacgtgtgcacatgggccatagccacaagccagctctcctccagggtcctttcaacctcgctgtccagggaccctgtccttcttgcccgtggggcttccatctggcagagaacgttcagggcttgttgaacttgaaagctcattagacttaagctgtcacctgtgcttggtgccccaggaacagccagagaggacagtgcccactcacttcttgttggcagcctcctgtgcaggaagtgccagccgggcctcgacgcaccagctggctgtgggtcctgaggaggggcgggaggcggccgctcagtgcagatggggactcctctcctctgccctgaccttaccctccattacctccttcactggagtggggctggggggtgggtggaatcagtgttttaatcggatttttaaaaaacattttatttctttgtacaattaccatcctatgtaaagatgaaatttgtgttgagttgaagattgtcatggaataaagatcacaccgtacttgaggccatcttcatgtaaccctttctagagagttttgtgtgggggtgtcttggggctggtgtgttgtgaagctgt

SEQ ID NO: 434888 - DNA, 4329 bp, Homo sapiens
gctggcggcggcggcggcggcggcggcggcggctgggctgtttgttctggtctcccgcagccgaggagccgaagcagtggcggcggcagcggctgcggcggctgccggcggtgcccgcgggcgagcgcggcctgtgagctcggcagagcggcgggcgggccccggcgccgcgcaggcagctcggggagggggcggcggcagcgggcggacggccggcgggggcggcgtgcggcctagcgtctcagagtgcctggtgaagaatgtgatgggatcactagcatgtctgcggagagcggccctgggacgagattgagaaatctgccagtaatgggggatggactagaaacttcccaaatgtctacaacacaggcccaggcccaaccccagccagccaacgcagccagcaccaaccccccgcccccagagacctccaaccctaacaagcccaagaggcagaccaaccaactgcaatacctgctcagagtggtgctcaagacactatggaaacaccagtttgcatggcctttccagcagcctgtggatgccgtcaagctgaacctccctgattactataagatcattaaaacgcctatggatatgggaacaataaagaagcgcttggaaaacaactattactggaatgctcaggaatgtatccaggacttcaacactatgtttacaaattgttacatctacaacaagcctggagatgacatagtcttaatggcagaagctctggaaaagctcttcttgcaaaaaataaatgagctacccacagaagaaaccgagatcatgatagtccaggcaaaaggaagaggacgtgggaggaaagaaacagggacagcaaaacctggcgtttccacggtaccaaacacaactcaagcatcgactcctccgcagacccagacccctcagccgaatcctcctcctgtgcaggccacgcctcaccccttccctgccgtcaccccggacctcatcgtccagacccctgtcatgacagtggtgcctccccagccactgcagacgcccccgccagtgcccccccagccacaacccccacccgctccagctccccagcccgtacagagccacccacccatcatcgcggccaccccacagcctgtgaagacaaagaagggagtgaagaggaaagcagacaccaccacccccaccaccattgaccccattcacgagccaccctcgctgcccccggagcccaagaccaccaagctgggccagcggcgggagagcagccggcctgtgaaacctccaaagaaggacgtgcccgactctcagcagcacccagcaccagagaagagcagcagcagcgatagctcctcggacagtgacagttcgactgatgactctgaggaggagcgagcccagcggctggctgagctccaggagcagctcaaagccgtgcacgagcagcttgcagccctctctcagccccagcagaacaaaccaaagaaaaaggagaaagacaagaaggaaaagaaaaaagaaaagcacaaaaggaaagaggaagtggaagagaataaaaaaagcaaagccaaggaacctcctcctaaaaagacgaagaaaaataatagcagcaacagcaatgtgagcaagaaggagccagcgcccatgaagagcaagccccctcccacgtatgagtcggaggaagaggacaagtgcaagcctatgtcctatgaggagaagcggcagctcagcttggacatcaacaagctccccggcgagaagctgggccgcgtggtgcacatcatccagtcacgggagccctccctgaagaattccaaccccgacgagattgaaatcgactttgagaccctgaagccgtccacactgcgtgagctggagcgctatgtcacctcctgtttgcggaagaaaaggaaacctcaagctgagaaagttgatgtgattgccggctcctccaagatgaagggcttctcgtcctcagagtcggagagctccagtgagtccagctcctctgacagcgaagactccgaaacaggtcctgcctaatcattggacacggactcttaataaaacggtcttcagttccagattccttcccagcaagctatagcttaagtccattttcttccgtgaaagggacaggactccatcaagttatggaattcctcagagccctgggcctgtcccccggggtggattagtcatgtccagcagcacacgcctagtcccgccttcgggaaggctgcctgcctggccagccgcccaggcctctctgtgtaaagactgcctggctgtcctgcccagccttcctggttctctggggtcctctgggtgggtggcatctcctggagggtgatgacaatccccaacacatgcattcatgtggtgctactctgtgtgcaaagccagaccccaagtatgttttctctctttgtcccatccctctttttctgggactttggaccctaactacttccctcctgaaccttgcagtgacatcagtccaggagagctctcgttcagtgtgcggaagaacactctgacctctagagctgtcctagataaggagtgggagctttagaggcaaggcctctagaccctggaaggctcagtgaggctcttcccacagcatgcttctcactggtgccctgtaaggctcgagccaccgctgactctgagccttttggagtctttcctccttcgtctccattgttcccgtgcatttccaaaagcttaagttgcctggtgggcatttccccagtttctttggcctccgtcttctcaagtcacatagggaaagtacctcctggaaccaggctgcagtatgcaggacctgccaggcaggcactggtgaagggccttgggcctatcatcccctcaaccccacctcaccccacccgcctcctctagtggggtgagtctgggctggtggaccagagagggtgtcacagaccctcagggactgccccatggacacctctgactggtgttaacagtgtgaacattttccccgtcttcagtcccttagaatgacgacagcccctggggttggggcaggcgagtgtggccacatcatccaagccctcccagagacacaaataggcttttttgctctaaaaataaataccagcccttttttggtcacaaatccagcatctcagcagaaaactgcctgacatgaaaagtcccctgaggaactgcatctgcgtttcaggggcttttcattttttctccttttttaaagtgtagattgtgggtgcttcctagaggcctgccttcttctggaactggaagtgggctatcaccatgggcaagcccttgggtgcaggctccccacctgcctgggaactctggcagctctcctcagctccttgggcttgagcagctgcaactgccccagatttgctgtggaagcaggggctagccctggcctcaccagggcctcccggggccctgcattgatgctcaggagttcctgggctgctcttgatcctttctgggcatccagcttccagttaagctctgtttgccaaacaaactattctcagctgccctttggcctgcgcctgatgtgttcctgttgcagtcccgcctgcctgagacaggagcaggcaggagagccttcatgcccagattcccacaggacaattggggagctgctggcattgtctttctgggaagattctgctttcttggaccaaatggcagcctgattaccagtgtcgggcctgcatgctgcccccgacacacgcacgcacgcgcacacacgtgtgcacatgggccatagccacaagccagctctcctccagggtcctttcaacctcgctgtccagggaccctgtccttcttgcccgtggggcttccatctggcagagaacgttcagggcttgttgaacttgaaagctcattagacttaagctgtcacctgtgcttggtgccccaggaacagccagagaggacagtgcccactcacttcttgttggcagcctcctgtgcaggaagtgccagccgggcctcgacgcaccagctggctgtgggtcctgaggaggggcgggaggcggccgctcagtgcagatggggactcctctcctctgccctgaccttaccctccattacctccttcactggagtggggctggggggtgggtggaatcagtgttttaatcggatttttaaaaaacattttatttctttgtacaattaccatcctatgtaaagatgaaatttgtgttgagttgaagattgtcatggaataaagatcacaccgtacttgaggccatcttcatgtaaccctttctagagagttttgtgtgggggtgtcttggggctggtgtgttgtgaagctgt

SEQ ID NO: 434889 - DNA, 4223 bp, Homo sapiens
gctggcggcggcggcggcggcggcggcggcggctgggctgtttgttctggtctcccgcagccgaggagccgaagcagtggcggcggcagcggctgcggcggctgccggcggtgcccgcgggcgagcgcggcctgtgagctcggcagagcggcgggcgggccccggcgccgcgcaggcagctcggggagggggcggcggcagcgggcggacggccggcgggggcggcgtgcggcctagcgtctcagagtgcctggtgaagaatgtgatgggatcactagcatgtctgcggagagcggccctgggacgagattgagaaatctgccagtaatgggggatggactagaaacttcccaaatgtctacaacacaggcccaggcccaaccccagccagccaacgcagccagcaccaaccccccgcccccagagacctccaaccctaacaagcccaagaggcagaccaaccaactgcaatacctgctcagagtggtgctcaagacactatggaaacaccagtttgcatggcctttccagcagcctgtggatgccgtcaagctgaacctccctgattactataagatcattaaaacgcctatggatatgggaacaataaagaagcgcttggaaaacaactattactggaatgctcaggaatgtatccaggacttcaacactatgtttacaaattgttacatctacaacaagcctggagatgacatagtcttaatggcagaagctctggaaaagctcttcttgcaaaaaataaatgagctacccacagaagaaaccgagatcatgatagtccaggcaaaaggaagaggacgtgggaggaaagaaacagggacagcaaaacctggcgtttccacggtaccaaacacaactcaagcatcgactcctccgcagacccagacccctcagccgaatcctcctcctgtgcaggccacgcctcaccccttccctgccgtcaccccggacctcatcgtccagacccctgtcatgacagtggtgcctccccagccactgcagacgcccccgccagtgcccccccagccacaacccccacccgctccagctccccagcccgtacagagccacccacccatcatcgcggccaccccacagcctgtgaagacaaagaagggagtgaagaggaaagcagacaccaccacccccaccaccattgaccccattcacgagccaccctcgctgcccccggagcccaagaccaccaagctgggccagcggcgggagagcagccggcctgtgaaacctccaaagaaggacgtgcccgactctcagcagcacccagcaccagagaagagcagcagcttgcagccctctctcagccccagcagaacaaaccaaagaaaaaggagaaagacaagaaggaaaagaaaaaagaaaagcacaaaaggaaagaggaagtggaagagaataaaaaaagcaaagccaaggaacctcctcctaaaaagacgaagaaaaataatagcagcaacagcaatgtgagcaagaaggagccagcgcccatgaagagcaagccccctcccacgtatgagtcggaggaagaggacaagtgcaagcctatgtcctatgaggagaagcggcagctcagcttggacatcaacaagctccccggcgagaagctgggccgcgtggtgcacatcatccagtcacgggagccctccctgaagaattccaaccccgacgagattgaaatcgactttgagaccctgaagccgtccacactgcgtgagctggagcgctatgtcacctcctgtttgcggaagaaaaggaaacctcaagctgagaaagttgatgtgattgccggctcctccaagatgaagggcttctcgtcctcagagtcggagagctccagtgagtccagctcctctgacagcgaagactccgaaacaggtcctgcctaatcattggacacggactcttaataaaacggtcttcagttccagattccttcccagcaagctatagcttaagtccattttcttccgtgaaagggacaggactccatcaagttatggaattcctcagagccctgggcctgtcccccggggtggattagtcatgtccagcagcacacgcctagtcccgccttcgggaaggctgcctgcctggccagccgcccaggcctctctgtgtaaagactgcctggctgtcctgcccagccttcctggttctctggggtcctctgggtgggtggcatctcctggagggtgatgacaatccccaacacatgcattcatgtggtgctactctgtgtgcaaagccagaccccaagtatgttttctctctttgtcccatccctctttttctgggactttggaccctaactacttccctcctgaaccttgcagtgacatcagtccaggagagctctcgttcagtgtgcggaagaacactctgacctctagagctgtcctagataaggagtgggagctttagaggcaaggcctctagaccctggaaggctcagtgaggctcttcccacagcatgcttctcactggtgccctgtaaggctcgagccaccgctgactctgagccttttggagtctttcctccttcgtctccattgttcccgtgcatttccaaaagcttaagttgcctggtgggcatttccccagtttctttggcctccgtcttctcaagtcacatagggaaagtacctcctggaaccaggctgcagtatgcaggacctgccaggcaggcactggtgaagggccttgggcctatcatcccctcaaccccacctcaccccacccgcctcctctagtggggtgagtctgggctggtggaccagagagggtgtcacagaccctcagggactgccccatggacacctctgactggtgttaacagtgtgaacattttccccgtcttcagtcccttagaatgacgacagcccctggggttggggcaggcgagtgtggccacatcatccaagccctcccagagacacaaataggcttttttgctctaaaaataaataccagcccttttttggtcacaaatccagcatctcagcagaaaactgcctgacatgaaaagtcccctgaggaactgcatctgcgtttcaggggcttttcattttttctccttttttaaagtgtagattgtgggtgcttcctagaggcctgccttcttctggaactggaagtgggctatcaccatgggcaagcccttgggtgcaggctccccacctgcctgggaactctggcagctctcctcagctccttgggcttgagcagctgcaactgccccagatttgctgtggaagcaggggctagccctggcctcaccagggcctcccggggccctgcattgatgctcaggagttcctgggctgctcttgatcctttctgggcatccagcttccagttaagctctgtttgccaaacaaactattctcagctgccctttggcctgcgcctgatgtgttcctgttgcagtcccgcctgcctgagacaggagcaggcaggagagccttcatgcccagattcccacaggacaattggggagctgctggcattgtctttctgggaagattctgctttcttggaccaaatggcagcctgattaccagtgtcgggcctgcatgctgcccccgacacacgcacgcacgcgcacacacgtgtgcacatgggccatagccacaagccagctctcctccagggtcctttcaacctcgctgtccagggaccctgtccttcttgcccgtggggcttccatctggcagagaacgttcagggcttgttgaacttgaaagctcattagacttaagctgtcacctgtgcttggtgccccaggaacagccagagaggacagtgcccactcacttcttgttggcagcctcctgtgcaggaagtgccagccgggcctcgacgcaccagctggctgtgggtcctgaggaggggcgggaggcggccgctcagtgcagatggggactcctctcctctgccctgaccttaccctccattacctccttcactggagtggggctggggggtgggtggaatcagtgttttaatcggatttttaaaaaacattttatttctttgtacaattaccatcctatgtaaagatgaaatttgtgttgagttgaagattgtcatggaataaagatcacaccgtacttgaggccatcttcatgtaaccctttctagagagttttgtgtgggggtgtcttggggctggtgtgttgtgaagctgt

SEQ ID NO: 434890 - DNA, 3715 bp, Homo sapiens
gtgccgacattttcaccatagtgttttgaggcttttttagttttaagacttgttacgtgtttcttcttctgggagtggagtcccaagcatggggcaggcagagcagggaacagtgctgtgtccctttgaccagctcctgtactgtgtcatcacgatgagctgggcccagccctctccatcagttctccccgtcatttctggctcaggctccgcctcctgtgggttctgagtccacctgcctgcgagccaggcaggtgagctgggatgttggcagggccagtcccagccctgaggctgagaactggggtgatggcctgtccccccactagagtcttgaccaaactgagagccaagaaaccgacttgctcttctaggcatccctttcgtctgctgccagccacttctccatggtcacattgggcagacacagctaacagggacttgtcttgtgttccagtctaaactggaggcccgtgagtaccgtgatgctcaggagtttggtgctgacgtccgattgatgttctccaactgctataagtacaaccctcctgaccatgaggtggtggccatggcccgcaagctccaggatgtgttcgaaatgcgctttgccaagatgccggacgagcctgaggagccagtggtggccgtgtcctccccggcagtgccccctcccaccaaggttgtggccccgccctcatccagcgacagcagcagcgatagctcctcggacagtgacagttcgactgatgactctgaggaggagcgagcccagcggctggctgagctccaggagcagctcaaagccgtgcacgagcagcttgcagccctctctcagccccagcagaacaaaccaaagaaaaaggagaaagacaagaaggaaaagaaaaaagaaaagcacaaaaggaaagaggaagtggaagagaataaaaaaagcaaagccaaggaacctcctcctaaaaagacgaagaaaaataatagcagcaacagcaatgtgagcaagaaggagccagcgcccatgaagagcaagccccctcccacgtatgagtcggaggaagaggacaagtgcaagcctatgtcctatgaggagaagcggcagctcagcttggacatcaacaagctccccggcgagaagctgggccgcgtggtgcacatcatccagtcacgggagccctccctgaagaattccaaccccgacgagattgaaatcgactttgagaccctgaagccgtccacactgcgtgagctggagcgctatgtcacctcctgtttgcggaagaaaaggaaacctcaagctgagaaagttgatgtgattgccggctcctccaagatgaagggcttctcgtcctcagagtcggagagctccagtgagtccagctcctctgacagcgaagactccgaaacaggtcctgcctaatcattggacacggactcttaataaaacggtcttcagttccagattccttcccagcaagctatagcttaagtccattttcttccgtgaaagggacaggactccatcaagttatggaattcctcagagccctgggcctgtcccccggggtggattagtcatgtccagcagcacacgcctagtcccgccttcgggaaggctgcctgcctggccagccgcccaggcctctctgtgtaaagactgcctggctgtcctgcccagccttcctggttctctggggtcctctgggtgggtggcatctcctggagggtgatgacaatccccaacacatgcattcatgtggtgctactctgtgtgcaaagccagaccccaagtatgttttctctctttgtcccatccctctttttctgggactttggaccctaactacttccctcctgaaccttgcagtgacatcagtccaggagagctctcgttcagtgtgcggaagaacactctgacctctagagctgtcctagataaggagtgggagctttagaggcaaggcctctagaccctggaaggctcagtgaggctcttcccacagcatgcttctcactggtgccctgtaaggctcgagccaccgctgactctgagccttttggagtctttcctccttcgtctccattgttcccgtgcatttccaaaagcttaagttgcctggtgggcatttccccagtttctttggcctccgtcttctcaagtcacatagggaaagtacctcctggaaccaggctgcagtatgcaggacctgccaggcaggcactggtgaagggccttgggcctatcatcccctcaaccccacctcaccccacccgcctcctctagtggggtgagtctgggctggtggaccagagagggtgtcacagaccctcagggactgccccatggacacctctgactggtgttaacagtgtgaacattttccccgtcttcagtcccttagaatgacgacagcccctggggttggggcaggcgagtgtggccacatcatccaagccctcccagagacacaaataggcttttttgctctaaaaataaataccagcccttttttggtcacaaatccagcatctcagcagaaaactgcctgacatgaaaagtcccctgaggaactgcatctgcgtttcaggggcttttcattttttctccttttttaaagtgtagattgtgggtgcttcctagaggcctgccttcttctggaactggaagtgggctatcaccatgggcaagcccttgggtgcaggctccccacctgcctgggaactctggcagctctcctcagctccttgggcttgagcagctgcaactgccccagatttgctgtggaagcaggggctagccctggcctcaccagggcctcccggggccctgcattgatgctcaggagttcctgggctgctcttgatcctttctgggcatccagcttccagttaagctctgtttgccaaacaaactattctcagctgccctttggcctgcgcctgatgtgttcctgttgcagtcccgcctgcctgagacaggagcaggcaggagagccttcatgcccagattcccacaggacaattggggagctgctggcattgtctttctgggaagattctgctttcttggaccaaatggcagcctgattaccagtgtcgggcctgcatgctgcccccgacacacgcacgcacgcgcacacacgtgtgcacatgggccatagccacaagccagctctcctccagggtcctttcaacctcgctgtccagggaccctgtccttcttgcccgtggggcttccatctggcagagaacgttcagggcttgttgaacttgaaagctcattagacttaagctgtcacctgtgcttggtgccccaggaacagccagagaggacagtgcccactcacttcttgttggcagcctcctgtgcaggaagtgccagccgggcctcgacgcaccagctggctgtgggtcctgaggaggggcgggaggcggccgctcagtgcagatggggactcctctcctctgccctgaccttaccctccattacctccttcactggagtggggctggggggtgggtggaatcagtgttttaatcggatttttaaaaaacattttatttctttgtacaattaccatcctatgtaaagatgaaatttgtgttgagttgaagattgtcatggaataaagatcacaccgtacttgaggccatcttcatgtaaccctttctagagagttttgtgtgggggtgtcttggggctggtgtgttgtgaagctgt

SEQ ID NO: 434891 - DNA, 3541 bp, Homo sapiens
agcgggatgtgcctgagggaagggacaaggtgggcaggctgtccctccacatcagaaccttcctagaccttttagtccaagaggaagcccaggccctggaacggtggctgcgtggatttttcccgccaactcgaagaaactcagcgccccctgctgtctgctgtgggacgtgctctgagacctggtgcttggccattgtggctacagatgcctgtgctgccccttcccctagtctgaggaaaagcaagacaagccctctggccttgggggcccagtgccccagtctaaactggaggcccgtgagtaccgtgatgctcaggagtttggtgctgacgtccgattgatgttctccaactgctataagtacaaccctcctgaccatgaggtggtggccatggcccgcaagctccaggatgtgttcgaaatgcgctttgccaagatgccggacgagcctgaggagccagtggtggccgtgtcctccccggcagtgccccctcccaccaaggttgtggccccgccctcatccagcgacagcagcagcgatagctcctcggacagtgacagttcgactgatgactctgaggaggagcgagcccagcggctggctgagctccaggagcagctcaaagccgtgcacgagcagcttgcagccctctctcagccccagcagaacaaaccaaagaaaaaggagaaagacaagaaggaaaagaaaaaagaaaagcacaaaaggaaagaggaagtggaagagaataaaaaaagcaaagccaaggaacctcctcctaaaaagacgaagaaaaataatagcagcaacagcaatgtgagcaagaaggagccagcgcccatgaagagcaagccccctcccacgtatgagtcggaggaagaggacaagtgcaagcctatgtcctatgaggagaagcggcagctcagcttggacatcaacaagctccccggcgagaagctgggccgcgtggtgcacatcatccagtcacgggagccctccctgaagaattccaaccccgacgagattgaaatcgactttgagaccctgaagccgtccacactgcgtgagctggagcgctatgtcacctcctgtttgcggaagaaaaggaaacctcaagctgagaaagttgatgtgattgccggctcctccaagatgaagggcttctcgtcctcagagtcggagagctccagtgagtccagctcctctgacagcgaagactccgaaacaggtcctgcctaatcattggacacggactcttaataaaacggtcttcagttccagattccttcccagcaagctatagcttaagtccattttcttccgtgaaagggacaggactccatcaagttatggaattcctcagagccctgggcctgtcccccggggtggattagtcatgtccagcagcacacgcctagtcccgccttcgggaaggctgcctgcctggccagccgcccaggcctctctgtgtaaagactgcctggctgtcctgcccagccttcctggttctctggggtcctctgggtgggtggcatctcctggagggtgatgacaatccccaacacatgcattcatgtggtgctactctgtgtgcaaagccagaccccaagtatgttttctctctttgtcccatccctctttttctgggactttggaccctaactacttccctcctgaaccttgcagtgacatcagtccaggagagctctcgttcagtgtgcggaagaacactctgacctctagagctgtcctagataaggagtgggagctttagaggcaaggcctctagaccctggaaggctcagtgaggctcttcccacagcatgcttctcactggtgccctgtaaggctcgagccaccgctgactctgagccttttggagtctttcctccttcgtctccattgttcccgtgcatttccaaaagcttaagttgcctggtgggcatttccccagtttctttggcctccgtcttctcaagtcacatagggaaagtacctcctggaaccaggctgcagtatgcaggacctgccaggcaggcactggtgaagggccttgggcctatcatcccctcaaccccacctcaccccacccgcctcctctagtggggtgagtctgggctggtggaccagagagggtgtcacagaccctcagggactgccccatggacacctctgactggtgttaacagtgtgaacattttccccgtcttcagtcccttagaatgacgacagcccctggggttggggcaggcgagtgtggccacatcatccaagccctcccagagacacaaataggcttttttgctctaaaaataaataccagcccttttttggtcacaaatccagcatctcagcagaaaactgcctgacatgaaaagtcccctgaggaactgcatctgcgtttcaggggcttttcattttttctccttttttaaagtgtagattgtgggtgcttcctagaggcctgccttcttctggaactggaagtgggctatcaccatgggcaagcccttgggtgcaggctccccacctgcctgggaactctggcagctctcctcagctccttgggcttgagcagctgcaactgccccagatttgctgtggaagcaggggctagccctggcctcaccagggcctcccggggccctgcattgatgctcaggagttcctgggctgctcttgatcctttctgggcatccagcttccagttaagctctgtttgccaaacaaactattctcagctgccctttggcctgcgcctgatgtgttcctgttgcagtcccgcctgcctgagacaggagcaggcaggagagccttcatgcccagattcccacaggacaattggggagctgctggcattgtctttctgggaagattctgctttcttggaccaaatggcagcctgattaccagtgtcgggcctgcatgctgcccccgacacacgcacgcacgcgcacacacgtgtgcacatgggccatagccacaagccagctctcctccagggtcctttcaacctcgctgtccagggaccctgtccttcttgcccgtggggcttccatctggcagagaacgttcagggcttgttgaacttgaaagctcattagacttaagctgtcacctgtgcttggtgccccaggaacagccagagaggacagtgcccactcacttcttgttggcagcctcctgtgcaggaagtgccagccgggcctcgacgcaccagctggctgtgggtcctgaggaggggcgggaggcggccgctcagtgcagatggggactcctctcctctgccctgaccttaccctccattacctccttcactggagtggggctggggggtgggtggaatcagtgttttaatcggatttttaaaaaacattttatttctttgtacaattaccatcctatgtaaagatgaaatttgtgttgagttgaagattgtcatggaataaagatcacaccgtacttgaggccatcttcatgtaaccctttctagagagttttgtgtgggggtgtcttggggctggtgtgttgtgaagctgt

SEQ ID NO: 434892 - DNA, 4167 bp, Homo sapiens
gccatcccaggagctgcgtgctgcctccgtggtccagccccagcccctcgtggtggtgaaggaggagaagatccactcacccatcatccgcagcgagcccttcagcccctcgctgcggccggagccccccaagcacccggagagcatcaaggcccccgtccacctgccccagcggccggaaatgaagcctgtggatgtcgggaggcctgtgatccggcccccagagcagaacgcaccgccaccaggggcccctgacaaggacaaacagaaacaggagccgaagactccagttgcgcccaaaaaggacctgaaaatcaagaacatgggctcctgggccagcctagtgcagaagcatccgaccaccccctcctccacagccaagtcatccagcgacagcttcgagcagttccgccgcgccgctcgggagaaagaggagcgtgagaaggccctgaaggctcaggccgagcacgctgagaaggagaaggagcggctgcggcaggagcgcatgaggagccgagaggacgaggatgcgctggagcaggcccggcgggcccatgaggaggcacgtcggcgccaggagcagcagcagcagcagcgccaggagcaacagcagcagcagcaacagcaagcagctgcggtggctgccgccgccaccccacaggcccagagctcccagccccagtccatgctggaccagcagagggagttggcccggaagcgggagcaggagcgaagacgccgggaagccatggcagctaccattgacatgaatttccagagtgatctattgtcaatatttgaagaaaatcttttctgagcgcacctaggtggcttctgactttgattttctggcaaaacattgactttccatagtgttaggggcggtggtggaggtgggatcagcggccaggggatgcctcagggcctggccctcctgcatgctatgcccggggcaggcctgacgggcagctgaggattgcagagcctgtctgccttacggccagtcggacagacgtcccgccacccaccacccctcacaggacgtccgctcagcacacgccttgttacgagcaagtgccggctggacccaagccctgcatccccacatgcggggcagaggcccttctctccgccaaatgtctacacagtatacacaggaccagcagcgatagctcctcggacagtgacagttcgactgatgactctgaggaggagcgagcccagcggctggctgagctccaggagcagctcaaagccgtgcacgagcagcttgcagccctctctcagccccagcagaacaaaccaaagaaaaaggagaaagacaagaaggaaaagaaaaaagaaaagcacaaaaggaaagaggaagtggaagagaataaaaaaagcaaagccaaggaacctcctcctaaaaagacgaagaaaaataatagcagcaacagcaatgtgagcaagaaggagccagcgcccatgaagagcaagccccctcccacgtatgagtcggaggaagaggacaagtgcaagcctatgtcctatgaggagaagcggcagctcagcttggacatcaacaagctccccggcgagaagctgggccgcgtggtgcacatcatccagtcacgggagccctccctgaagaattccaaccccgacgagattgaaatcgactttgagaccctgaagccgtccacactgcgtgagctggagcgctatgtcacctcctgtttgcggaagaaaaggaaacctcaagctgagaaagttgatgtgattgccggctcctccaagatgaagggcttctcgtcctcagagtcggagagctccagtgagtccagctcctctgacagcgaagactccgaaacaggtcctgcctaatcattggacacggactcttaataaaacggtcttcagttccagattccttcccagcaagctatagcttaagtccattttcttccgtgaaagggacaggactccatcaagttatggaattcctcagagccctgggcctgtcccccggggtggattagtcatgtccagcagcacacgcctagtcccgccttcgggaaggctgcctgcctggccagccgcccaggcctctctgtgtaaagactgcctggctgtcctgcccagccttcctggttctctggggtcctctgggtgggtggcatctcctggagggtgatgacaatccccaacacatgcattcatgtggtgctactctgtgtgcaaagccagaccccaagtatgttttctctctttgtcccatccctctttttctgggactttggaccctaactacttccctcctgaaccttgcagtgacatcagtccaggagagctctcgttcagtgtgcggaagaacactctgacctctagagctgtcctagataaggagtgggagctttagaggcaaggcctctagaccctggaaggctcagtgaggctcttcccacagcatgcttctcactggtgccctgtaaggctcgagccaccgctgactctgagccttttggagtctttcctccttcgtctccattgttcccgtgcatttccaaaagcttaagttgcctggtgggcatttccccagtttctttggcctccgtcttctcaagtcacatagggaaagtacctcctggaaccaggctgcagtatgcaggacctgccaggcaggcactggtgaagggccttgggcctatcatcccctcaaccccacctcaccccacccgcctcctctagtggggtgagtctgggctggtggaccagagagggtgtcacagaccctcagggactgccccatggacacctctgactggtgttaacagtgtgaacattttccccgtcttcagtcccttagaatgacgacagcccctggggttggggcaggcgagtgtggccacatcatccaagccctcccagagacacaaataggcttttttgctctaaaaataaataccagcccttttttggtcacaaatccagcatctcagcagaaaactgcctgacatgaaaagtcccctgaggaactgcatctgcgtttcaggggcttttcattttttctccttttttaaagtgtagattgtgggtgcttcctagaggcctgccttcttctggaactggaagtgggctatcaccatgggcaagcccttgggtgcaggctccccacctgcctgggaactctggcagctctcctcagctccttgggcttgagcagctgcaactgccccagatttgctgtggaagcaggggctagccctggcctcaccagggcctcccggggccctgcattgatgctcaggagttcctgggctgctcttgatcctttctgggcatccagcttccagttaagctctgtttgccaaacaaactattctcagctgccctttggcctgcgcctgatgtgttcctgttgcagtcccgcctgcctgagacaggagcaggcaggagagccttcatgcccagattcccacaggacaattggggagctgctggcattgtctttctgggaagattctgctttcttggaccaaatggcagcctgattaccagtgtcgggcctgcatgctgcccccgacacacgcacgcacgcgcacacacgtgtgcacatgggccatagccacaagccagctctcctccagggtcctttcaacctcgctgtccagggaccctgtccttcttgcccgtggggcttccatctggcagagaacgttcagggcttgttgaacttgaaagctcattagacttaagctgtcacctgtgcttggtgccccaggaacagccagagaggacagtgcccactcacttcttgttggcagcctcctgtgcaggaagtgccagccgggcctcgacgcaccagctggctgtgggtcctgaggaggggcgggaggcggccgctcagtgcagatggggactcctctcctctgccctgaccttaccctccattacctccttcactggagtggggctggggggtgggtggaatcagtgttttaatcggatttttaaaaaacattttatttctttgtacaattaccatcctatgtaaagatgaaatttgtgttgagttgaagattgtcatggaataaagatcacaccgtacttgaggccatcttcatgtaaccctttctagagagttttgtgtgggggtgtcttggggctggtgtgttgtgaagctgt

SEQ ID NO: 434893 - DNA, 3630 bp, Homo sapiens
cccctagaggaggtgcgcttgtggcaggtacattcccaccggggacctctgcgtgtgctgtgtcctctgcctggaatgccctctcaaaccacagacaactcctgctcccccgcacgcatctggtgggagcctcggctaactgttttggggtttgaggatgcccttggtccagtaccatctcagacttcagtgagctggctgtcttagtggcctgggtctcatgtccttgcctgggcggtgtcctccagggagtgagtgccccgctatctctggaccaccttgttcttcaaagtgagatttgagagaagagtgttgcaagagttgtcagaggcccttggctggcccttgcccctgtctcggcagcaaagagacaggatcaccatcctctttcgccctcggttgctttctgttgagttggccccagcagccaatgagggcaggtgatgctaggccgcggcctgggtacccagcagccgtcacagcatgtctttccctcaccaggatgtgttcgaaatgcgctttgccaagatgccggacgagcctgaggagccagtggtggccgtgtcctccccggcagtgccccctcccaccaaggttgtggccccgccctcatccagcgacagcagcagcgatagctcctcggacagtgacagttcgactgatgactctgaggaggagcgagcccagcggctggctgagctccaggagcagctcaaagccgtgcacgagcagcttgcagccctctctcagccccagcagaacaaaccaaagaaaaaggagaaagacaagaaggaaaagaaaaaagaaaagcacaaaaggaaagaggaagtggaagagaataaaaaaagcaaagccaaggaacctcctcctaaaaagacgaagaaaaataatagcagcaacagcaatgtgagcaagaaggagccagcgcccatgaagagcaagccccctcccacgtatgagtcggaggaagaggacaagtgcaagcctatgtcctatgaggagaagcggcagctcagcttggacatcaacaagctccccggcgagaagctgggccgcgtggtgcacatcatccagtcacgggagccctccctgaagaattccaaccccgacgagattgaaatcgactttgagaccctgaagccgtccacactgcgtgagctggagcgctatgtcacctcctgtttgcggaagaaaaggaaacctcaagctgagaaagttgatgtgattgccggctcctccaagatgaagggcttctcgtcctcagagtcggagagctccagtgagtccagctcctctgacagcgaagactccgaaacaggtcctgcctaatcattggacacggactcttaataaaacggtcttcagttccagattccttcccagcaagctatagcttaagtccattttcttccgtgaaagggacaggactccatcaagttatggaattcctcagagccctgggcctgtcccccggggtggattagtcatgtccagcagcacacgcctagtcccgccttcgggaaggctgcctgcctggccagccgcccaggcctctctgtgtaaagactgcctggctgtcctgcccagccttcctggttctctggggtcctctgggtgggtggcatctcctggagggtgatgacaatccccaacacatgcattcatgtggtgctactctgtgtgcaaagccagaccccaagtatgttttctctctttgtcccatccctctttttctgggactttggaccctaactacttccctcctgaaccttgcagtgacatcagtccaggagagctctcgttcagtgtgcggaagaacactctgacctctagagctgtcctagataaggagtgggagctttagaggcaaggcctctagaccctggaaggctcagtgaggctcttcccacagcatgcttctcactggtgccctgtaaggctcgagccaccgctgactctgagccttttggagtctttcctccttcgtctccattgttcccgtgcatttccaaaagcttaagttgcctggtgggcatttccccagtttctttggcctccgtcttctcaagtcacatagggaaagtacctcctggaaccaggctgcagtatgcaggacctgccaggcaggcactggtgaagggccttgggcctatcatcccctcaaccccacctcaccccacccgcctcctctagtggggtgagtctgggctggtggaccagagagggtgtcacagaccctcagggactgccccatggacacctctgactggtgttaacagtgtgaacattttccccgtcttcagtcccttagaatgacgacagcccctggggttggggcaggcgagtgtggccacatcatccaagccctcccagagacacaaataggcttttttgctctaaaaataaataccagcccttttttggtcacaaatccagcatctcagcagaaaactgcctgacatgaaaagtcccctgaggaactgcatctgcgtttcaggggcttttcattttttctccttttttaaagtgtagattgtgggtgcttcctagaggcctgccttcttctggaactggaagtgggctatcaccatgggcaagcccttgggtgcaggctccccacctgcctgggaactctggcagctctcctcagctccttgggcttgagcagctgcaactgccccagatttgctgtggaagcaggggctagccctggcctcaccagggcctcccggggccctgcattgatgctcaggagttcctgggctgctcttgatcctttctgggcatccagcttccagttaagctctgtttgccaaacaaactattctcagctgccctttggcctgcgcctgatgtgttcctgttgcagtcccgcctgcctgagacaggagcaggcaggagagccttcatgcccagattcccacaggacaattggggagctgctggcattgtctttctgggaagattctgctttcttggaccaaatggcagcctgattaccagtgtcgggcctgcatgctgcccccgacacacgcacgcacgcgcacacacgtgtgcacatgggccatagccacaagccagctctcctccagggtcctttcaacctcgctgtccagggaccctgtccttcttgcccgtggggcttccatctggcagagaacgttcagggcttgttgaacttgaaagctcattagacttaagctgtcacctgtgcttggtgccccaggaacagccagagaggacagtgcccactcacttcttgttggcagcctcctgtgcaggaagtgccagccgggcctcgacgcaccagctggctgtgggtcctgaggaggggcgggaggcggccgctcagtgcagatggggactcctctcctctgccctgaccttaccctccattacctccttcactggagtggggctggggggtgggtggaatcagtgttttaatcggatttttaaaaaacattttatttctttgtacaattaccatcctatgtaaagatgaaatttgtgttgagttgaagattgtcatggaataaagatcacaccgtacttgaggccatcttcatgtaaccctttctagagagttttgtgtgggggtgtcttggggctggtgtgttgtgaagctgt

SEQ ID NO: 434894 - DNA, 3228 bp, Homo sapiens
  misc_feature (11)..(11): n is a, c, g, or t
  misc_feature (38)..(38): n is a, c, g, or t
  misc_feature (94)..(94): n is a, c, g, or t
aaggagaaagncaagaaggaaaagaaaaaagaaaagcncaaaaggaaagaggaagtggaagagaataaaaaaagcaaagccaaggaacctctcnctaaaaagacgaagaaaaataatagcagcaacagcaatgtgagcaagaaggagccagtggtggccgtgtcctccccggcagtgccccctcccaccaaggttgtggccccgccctcatccagcgacagcagcagcgatagctcctcggacagtgacagttcgactgatgactctgaggaggagcgagcccagcggctggctgagctccaggagcagctcaaagccgtgcacgagcagcttgcagccctctctcagccccagcagaacaaaccaaagaaaaaggagaaagacaagaaggaaaagaaaaaagaaaagcacaaaaggaaagaggaagtggaagagaataaaaaaagcaaagccaaggaacctcctcctaaaaagacgaagaaaaataatagcagcaacagcaatgtgagcaagaaggagccagcgcccatgaagagcaagccccctcccacgtatgagtcggaggaagaggacaagtgcaagcctatgtcctatgaggagaagcggcagctcagcttggacatcaacaagctccccggcgagaagctgggccgcgtggtgcacatcatccagtcacgggagccctccctgaagaattccaaccccgacgagattgaaatcgactttgagaccctgaagccgtccacactgcgtgagctggagcgctatgtcacctcctgtttgcggaagaaaaggaaacctcaagctgagaaagttgatgtgattgccggctcctccaagatgaagggcttctcgtcctcagagtcggagagctccagtgagtccagctcctctgacagcgaagactccgaaacaggtcctgcctaatcattggacacggactcttaataaaacggtcttcagttccagattccttcccagcaagctatagcttaagtccattttcttccgtgaaagggacaggactccatcaagttatggaattcctcagagccctgggcctgtcccccggggtggattagtcatgtccagcagcacacgcctagtcccgccttcgggaaggctgcctgcctggccagccgcccaggcctctctgtgtaaagactgcctggctgtcctgcccagccttcctggttctctggggtcctctgggtgggtggcatctcctggagggtgatgacaatccccaacacatgcattcatgtggtgctactctgtgtgcaaagccagaccccaagtatgttttctctctttgtcccatccctctttttctgggactttggaccctaactacttccctcctgaaccttgcagtgacatcagtccaggagagctctcgttcagtgtgcggaagaacactctgacctctagagctgtcctagataaggagtgggagctttagaggcaaggcctctagaccctggaaggctcagtgaggctcttcccacagcatgcttctcactggtgccctgtaaggctcgagccaccgctgactctgagccttttggagtctttcctccttcgtctccattgttcccgtgcatttccaaaagcttaagttgcctggtgggcatttccccagtttctttggcctccgtcttctcaagtcacatagggaaagtacctcctggaaccaggctgcagtatgcaggacctgccaggcaggcactggtgaagggccttgggcctatcatcccctcaaccccacctcaccccacccgcctcctctagtggggtgagtctgggctggtggaccagagagggtgtcacagaccctcagggactgccccatggacacctctgactggtgttaacagtgtgaacattttccccgtcttcagtcccttagaatgacgacagcccctggggttggggcaggcgagtgtggccacatcatccaagccctcccagagacacaaataggcttttttgctctaaaaataaataccagcccttttttggtcacaaatccagcatctcagcagaaaactgcctgacatgaaaagtcccctgaggaactgcatctgcgtttcaggggcttttcattttttctccttttttaaagtgtagattgtgggtgcttcctagaggcctgccttcttctggaactggaagtgggctatcaccatgggcaagcccttgggtgcaggctccccacctgcctgggaactctggcagctctcctcagctccttgggcttgagcagctgcaactgccccagatttgctgtggaagcaggggctagccctggcctcaccagggcctcccggggccctgcattgatgctcaggagttcctgggctgctcttgatcctttctgggcatccagcttccagttaagctctgtttgccaaacaaactattctcagctgccctttggcctgcgcctgatgtgttcctgttgcagtcccgcctgcctgagacaggagcaggcaggagagccttcatgcccagattcccacaggacaattggggagctgctggcattgtctttctgggaagattctgctttcttggaccaaatggcagcctgattaccagtgtcgggcctgcatgctgcccccgacacacgcacgcacgcgcacacacgtgtgcacatgggccatagccacaagccagctctcctccagggtcctttcaacctcgctgtccagggaccctgtccttcttgcccgtggggcttccatctggcagagaacgttcagggcttgttgaacttgaaagctcattagacttaagctgtcacctgtgcttggtgccccaggaacagccagagaggacagtgcccactcacttcttgttggcagcctcctgtgcaggaagtgccagccgggcctcgacgcaccagctggctgtgggtcctgaggaggggcgggaggcggccgctcagtgcagatggggactcctctcctctgccctgaccttaccctccattacctccttcactggagtggggctggggggtgggtggaatcagtgttttaatcggatttttaaaaaacattttatttctttgtacaattaccatcctatgtaaagatgaaatttgtgttgagttgaagattgtcatggaataaagatcacaccgtacttgaggccatcttcatgtaaccctttctagagagttttgtgtgggggtgtcttggggctggtgtgttgtgaagctgt

SEQ ID NO: 434895 - DNA, 3257 bp, Homo sapiens
gacgtgtccgtgtgctcttacttagattcttaggggccctccttctgcgatcaggatggccgtgagacttggtgtctgtcggcttgatcagctcctctggtgaggaagacactggcagtctttggagttgagtgaatgggtggagatagtcttgttaggaatctggttaacatgacaggcgcaaagctgggggccttcccttcccctgcctcccctatgcccacaccctgatgccccaggtgcatgctgtcgcatgttttttggagcagacgcctgggtcttgggtgacaggaaggtggtttcagccctgagtgtgtgtcttgcctgtctggtctacactcaaagccgtgcacgagcagcttgcagccctctctcagccccagcagaacaaaccaaagaaaaaggagaaagacaagaaggaaaagaaaaaagaaaagcacaaaaggaaagaggaagtggaagagaataaaaaaagcaaagccaaggaacctcctcctaaaaagacgaagaaaaataatagcagcaacagcaatgtgagcaagaaggagccagcgcccatgaagagcaagccccctcccacgtatgagtcggaggaagaggacaagtgcaagcctatgtcctatgaggagaagcggcagctcagcttggacatcaacaagctccccggcgagaagctgggccgcgtggtgcacatcatccagtcacgggagccctccctgaagaattccaaccccgacgagattgaaatcgactttgagaccctgaagccgtccacactgcgtgagctggagcgctatgtcacctcctgtttgcggaagaaaaggaaacctcaagctgagaaagttgatgtgattgccggctcctccaagatgaagggcttctcgtcctcagagtcggagagctccagtgagtccagctcctctgacagcgaagactccgaaacaggtcctgcctaatcattggacacggactcttaataaaacggtcttcagttccagattccttcccagcaagctatagcttaagtccattttcttccgtgaaagggacaggactccatcaagttatggaattcctcagagccctgggcctgtcccccggggtggattagtcatgtccagcagcacacgcctagtcccgccttcgggaaggctgcctgcctggccagccgcccaggcctctctgtgtaaagactgcctggctgtcctgcccagccttcctggttctctggggtcctctgggtgggtggcatctcctggagggtgatgacaatccccaacacatgcattcatgtggtgctactctgtgtgcaaagccagaccccaagtatgttttctctctttgtcccatccctctttttctgggactttggaccctaactacttccctcctgaaccttgcagtgacatcagtccaggagagctctcgttcagtgtgcggaagaacactctgacctctagagctgtcctagataaggagtgggagctttagaggcaaggcctctagaccctggaaggctcagtgaggctcttcccacagcatgcttctcactggtgccctgtaaggctcgagccaccgctgactctgagccttttggagtctttcctccttcgtctccattgttcccgtgcatttccaaaagcttaagttgcctggtgggcatttccccagtttctttggcctccgtcttctcaagtcacatagggaaagtacctcctggaaccaggctgcagtatgcaggacctgccaggcaggcactggtgaagggccttgggcctatcatcccctcaaccccacctcaccccacccgcctcctctagtggggtgagtctgggctggtggaccagagagggtgtcacagaccctcagggactgccccatggacacctctgactggtgttaacagtgtgaacattttccccgtcttcagtcccttagaatgacgacagcccctggggttggggcaggcgagtgtggccacatcatccaagccctcccagagacacaaataggcttttttgctctaaaaataaataccagcccttttttggtcacaaatccagcatctcagcagaaaactgcctgacatgaaaagtcccctgaggaactgcatctgcgtttcaggggcttttcattttttctccttttttaaagtgtagattgtgggtgcttcctagaggcctgccttcttctggaactggaagtgggctatcaccatgggcaagcccttgggtgcaggctccccacctgcctgggaactctggcagctctcctcagctccttgggcttgagcagctgcaactgccccagatttgctgtggaagcaggggctagccctggcctcaccagggcctcccggggccctgcattgatgctcaggagttcctgggctgctcttgatcctttctgggcatccagcttccagttaagctctgtttgccaaacaaactattctcagctgccctttggcctgcgcctgatgtgttcctgttgcagtcccgcctgcctgagacaggagcaggcaggagagccttcatgcccagattcccacaggacaattggggagctgctggcattgtctttctgggaagattctgctttcttggaccaaatggcagcctgattaccagtgtcgggcctgcatgctgcccccgacacacgcacgcacgcgcacacacgtgtgcacatgggccatagccacaagccagctctcctccagggtcctttcaacctcgctgtccagggaccctgtccttcttgcccgtggggcttccatctggcagagaacgttcagggcttgttgaacttgaaagctcattagacttaagctgtcacctgtgcttggtgccccaggaacagccagagaggacagtgcccactcacttcttgttggcagcctcctgtgcaggaagtgccagccgggcctcgacgcaccagctggctgtgggtcctgaggaggggcgggaggcggccgctcagtgcagatggggactcctctcctctgccctgaccttaccctccattacctccttcactggagtggggctggggggtgggtggaatcagtgttttaatcggatttttaaaaaacattttatttctttgtacaattaccatcctatgtaaagatgaaatttgtgttgagttgaagattgtcatggaataaagatcacaccgtacttgaggccatcttcatgtaaccctttctagagagttttgtgtgggggtgtcttggggctggtgtgttgtgaagctgt

SEQ ID NO: 434896 - DNA, 3382 bp, Homo sapiens
gctggcggcggcggcggcggcggcggcggcggctgggctgtttgttctggtctcccgcagccgaggagccgaagcagtggcggcggcagcggctgcggcggctgccggcggtgcccgcgggcgagcgcggcctgtgagctcggcagagcggcgggcgggccccggcgccgcgcaggcagctcggggagggggcggcggcagcgggcggacggccggcgggggcggcgtgcggcctagcgtctcagagtgcctggtgaagaatgtgatgggatcactagcatgtctgcggagagcggccctgggacgagattgagaaatctgccagtaatgggggatggactagaaacttcccaaatgtctacaacacaggcccaggcccaaccccagccagccaacgcagccagcaccaaccccccgcccccagagacctccaaccctaacaagcccaagaggcagaccaaccaactgcaatacctgctcagagtggtgctcaagacactatggaaacaccagtttgcatggcctttccagcagcctgtggatgccgtcaagctgaacctccctgattactataagatcattaaaacgcctatggatatgggaacaataaagaagcgcttggaaaacaactattactggaatgctcaggaatgtatccaggacttcaacactatgtttacaaattgttacatctacaacaagcctggagatgacatagtcttaatggcagaagctctggaaaagctcttcttgcaaaaaataaatgagctacccacagaagaaaccgagatcatgatagtccaggcaaaaggaagaggacgtgggaggaaagaaacagggacagcaaaacctggcgtttccacggtaccaaacacaactcaagcatcgactcctccgcagacccagacccctcagccgaatcctcctcctgtgcaggccacgcctcaccccttccctgccgtcaccccggacctcatcgtccagacccctgtcatgacagtggtgcctccccagccactgcagacgcccccgccagtgcccccccagccacaacccccacccgctccagctccccagcccgtacagagccacccacccatcatcgcggccaccccacagcctgtgaagacaaagaagggagtgaagaggaaagcagacaccaccacccccaccaccattgaccccattcacgagccaccctcgctgcccccggagcccaagaccaccaagctgggccagcggcgggagagcagccggcctgtgaaacctccaaagaaggacgtgcccgactctcagcagcacccagcaccagagaagagcagcaaggtctcggagcagctcaagtgctgcagcggcatcctcaaggagatgtttgccaagaagcacgccgcctacgcctggcccttctacaagcctgtggacgtggaggcactgggcctacacgactactgtgacatcatcaagcaccccatggacatgagcacaatcaagtctaaactggaggcccgtgagtaccgtgatgctcaggagtttggtgctgacgtccgattgatgttctccaactgctataagtacaaccctcctgaccatgaggtggtggccatggcccgcaagctccaggatgtgttcgaaatgcgctttgccaagatgccggacgagcctgaggagccagtggtggccgtgtcctccccggcagtgccccctcccaccaaggttgtggccccgccctcatccagcgacagcagcagcgatagctcctcggacagtgacagttcgactgatgactctgaggaggagcgagcccagcggctggctgagctccaggagcagctcaaagccgtgcacgagcagcttgcagccctctctcagccccagcagaacaaaccaaagaaaaaggagaaagacaagaaggaaaagaaaaaagaaaagcacaaaaggaaagaggaagtggaagagaataaaaaaagcaaagccaaggaacctcctcctaaaaagacgaagaaaaataatagcagcaacagcaatgtgagcaagaaggagccagcgcccatgaagagcaagccccctcccacgtatgagtcggaggaagaggacaagtgcaagcctatgtcctatgaggagaagcggcagctcagcttggacatcaacaagctccccggcgagaagctgggccgcgtggtgcacatcatccagtcacgggagccctccctgaagaattccaaccccgacgagattgaaatcgactttgagaccctgaagccgtccacactgcgtgagctggagcgctatgtcacctcctgtttgcggaagaaaaggaaacctcaagctgagaaagttgatgtgattgccggctcctccaagatgaagggcttctcgtcctcagagtcggagagctccagtgagtccagctcctctgacagcgaagactccgaaacaggttaggtgacttgtgttctacgtgtcttaccaaactcttcccacctgtgcctggcactagctcggtcctgtgtccaggatgctagagcccagagacggcactcccagaacttgctgggttcctctgtctgtctgtctctttgttaactgtctccctggggccatgaatagccctgcactctgtgcagtagtgtccattctctcggcctggccgttatgctctccctgccagggtctggtcatggaggatgaatggccaagggcgttgacactgcggagccctggatggtgggcggggaagctgggccatgaggactgtgggcgtgggggtccaggctgtgctgttgaccttgatgtgaccacacccagctttctgcaccagtggagacttcgtgtccccagggccttccccgtatcacagtcacgtgcagtgcggccgcttcagggagatgcttcgctggtttctggtggatgtggagcagactgcagctggccagccgcatcgccagtctgctgctggccctgccatcacctgggccccagccattgcctacccctccccagagtgtgctcgttgctgtgttggctgctcctgaatctgccctaactccacacgcacctggacttgcgtgtccctcctgcagttctaactaacagtcccttcttttcaagccccgtgggtctgcacgttggaccctgggttccccattagagcccaccttctgagcagcagcctcagtgggaggtggaggcaggtagtgatgctgggtgccaggtgggagtggagaggggactgctctcctccaagtgtgcactttcctcattattctcaggggcgcagatgctcaggctggcgcaggggagaggctagggagggagccatggtgcccagaaggcctggcgaccagcccctgctgagagatggagctaacatcctgtgttacgg

SEQ ID NO: 434897 - DNA, 2608 bp, Homo sapiens
gctggcggcggcggcggcggcggcggcggcggctgggctgtttgttctggtctcccgcagccgaggagccgaagcagtggcggcggcagcggctgcggcggctgccggcggtgcccgcgggcgagcgcggcctgtgagctcggcagagcggcgggcgggccccggcgccgcgcaggcagctcggggagggggcggcggcagcgggcggacggccggcgggggcggcgtgcggcctagcgtctcagagtgcctggtgaagaatgtgatgggatcactagcatgtctgcggagagcggccctgggacgagattgagaaatctgccagtaatgggggatggactagaaacttcccaaatgtctacaacacaggcccaggcccaaccccagccagccaacgcagccagcaccaaccccccgcccccagagacctccaaccctaacaagcccaagaggcagaccaaccaactgcaatacctgctcagagtggtgctcaagacactatggaaacaccagtttgcatggcctttccagcagcctgtggatgccgtcaagctgaacctccctgattactataagatcattaaaacgcctatggatatgggaacaataaagaagcgcttggaaaacaactattactggaatgctcaggaatgtatccaggacttcaacactatgtttacaaattgttacatctacaacaagcctggagatgacatagtcttaatggcagaagctctggaaaagctcttcttgcaaaaaataaatgagctacccacagaagaaaccgagatcatgatagtccaggcaaaaggaagaggacgtgggaggaaagaaacagggacagcaaaacctggcgtttccacggtaccaaacacaactcaagcatcgactcctccgcagacccagacccctcagccgaatcctcctcctgtgcaggccacgcctcaccccttccctgccgtcaccccggacctcatcgtccagacccctgtcatgacagtggtgcctccccagccactgcagacgcccccgccagtgcccccccagccacaacccccacccgctccagctccccagcccgtacagagccacccacccatcatcgcggccaccccacagcctgtgaagacaaagaagggagtgaagaggaaagcagacaccaccacccccaccaccattgaccccattcacgagccaccctcgctgcccccggagcccaagaccaccaagctgggccagcggcgggagagcagccggcctgtgaaacctccaaagaaggacgtgcccgactctcagcagcacccagcaccagagaagagcagcaaggtctcggagcagctcaagtgctgcagcggcatcctcaaggagatgtttgccaagaagcacgccgcctacgcctggcccttctacaagcctgtggacgtggaggcactgggcctacacgactactgtgacatcatcaagcaccccatggacatgagcacaatcaagtctaaactggaggcccgtgagtaccgtgatgctcaggagtttggtgctgacgtccgattgatgttctccaactgctataagtacaaccctcctgaccatgaggtggtggccatggcccgcaagctccaggatgtgttcgaaatgcgctttgccaagatgccggacgagcctgaggagccagtggtggccgtgtcctccccggcagtgccccctcccaccaaggttgtggccccgccctcatccagcgacagcagcagcgatagctcctcggacagtgacagttcgactgatgactctgaggaggagcgagcccagcggctggctgagctccaggagcagctcaaagccgtgcacgagcagcttgcagccctctctcagccccagcagaacaaaccaaagaaaaaggagaaagacaagaaggaaaagaaaaaagaaaagcacaaaaggaaagaggaagtggaagagaataaaaaaagcaaagccaaggaacctcctcctaaaaagacgaagaaaaataatagcagcaacagcaatgtgagcaagaaggagccagcgcccatgaagagcaagccccctcccacgtatgagtcggaggaagaggacaagtgcaagcctatgtcctatgaggagaagcggcagctcagcttggacatcaacaagctccccggcgagaagctgggccgcgtggtgcacatcatccagtcacgggagccctccctgaagaattccaaccccgacgagattgaaatcgactttgagaccctgaagccgtccacactgcgtgagctggagcgctatgtcacctcctgtttgcggaagaaaaggaaacctcaagctgagaaagttgatgtgattgccggctcctccaagatgaagggcttctcgtcctcagagtcggagagctccagtgagtccagctcctctgacagcgaagactccgaaacagagatggctccgaagtcaaaaaagaaggggcaccccgggagggagcagaagaagcaccatcatcaccaccatcagcagatgcagcaggccccggctcctgtgccccagcagccgcccccgcctccccagcagcccccaccgcctccacctccgcagcagcaacagcagccgc

SEQ ID NO: 434898 - DNA, 2918 bp, Homo sapiens
gctggcggcggcggcggcggcggcggcggcggctgggctgtttgttctggtctcccgcagccgaggagccgaagcagtggcggcggcagcggctgcggcggctgccggcggtgcccgcgggcgagcgcggcctgtgagctcggcagagcggcgggcgggccccggcgccgcgcaggcagctcggggagggggcggcggcagcgggcggacggccggcgggggcggcgtgcggcctagcgtctcagagtgcctggtgaagaatgtgatgggatcactagcatgtctgcggagagcggccctgggacgagattgagaaatctgccagtaatgggggatggactagaaacttcccaaatgtctacaacacaggcccaggcccaaccccagccagccaacgcagccagcaccaaccccccgcccccagagacctccaaccctaacaagcccaagaggcagaccaaccaactgcaatacctgctcagagtggtgctcaagacactatggaaacaccagtttgcatggcctttccagcagcctgtggatgccgtcaagctgaacctccctgattactataagatcattaaaacgcctatggatatgggaacaataaagaagcgcttggaaaacaactattactggaatgctcaggaatgtatccaggacttcaacactatgtttacaaattgttacatctacaacaagcctggagatgacatagtcttaatggcagaagctctggaaaagctcttcttgcaaaaaataaatgagctacccacagaagaaaccgagatcatgatagtccaggcaaaaggaagaggacgtgggaggaaagaaacagggacagcaaaacctggcgtttccacggtaccaaacacaactcaagcatcgactcctccgcagacccagacccctcagccgaatcctcctcctgtgcaggccacgcctcaccccttccctgccgtcaccccggacctcatcgtccagacccctgtcatgacagtggtgcctccccagccactgcagacgcccccgccagtgcccccccagccacaacccccacccgctccagctccccagcccgtacagagccacccacccatcatcgcggccaccccacagcctgtgaagacaaagaagggagtgaagaggaaagcagacaccaccacccccaccaccattgaccccattcacgagccaccctcgctgcccccggagcccaagaccaccaagctgggccagcggcgggagagcagccggcctgtgaaacctccaaagaaggacgtgcccgactctcagcagcacccagcaccagagaagagcagcaaggtctcggagcagctcaagtgctgcagcggcatcctcaaggagatgtttgccaagaagcacgccgcctacgcctggcccttctacaagcctgtggacgtggaggcactgggcctacacgactactgtgacatcatcaagcaccccatggacatgagcacaatcaagtctaaactggaggcccgtgagtaccgtgatgctcaggagtttggtgctgacgtccgattgatgttctccaactgctataagtacaaccctcctgaccatgaggtggtggccatggcccgcaagctccaggatgtgttcgaaatgcgctttgccaagatgccggacgagcctgaggagccagtggtggccgtgtcctccccggcagtgccccctcccaccaaggttgtggccccgccctcatccagcgacagcagcagcgatagctcctcggacagtgacagttcgactgatgactctgaggaggagcgagcccagcggctggctgagctccaggagcagctcaaagccgtgcacgagcagcttgcagccctctctcagccccagcagaacaaaccaaagaaaaaggagaaagacaagaaggaaaagaaaaaagaaaagcacaaaaggaaagaggaagtggaagagaataaaaaaagcaaagccaaggaacctcctcctaaaaagacgaagaaaaataatagcagcaacagcaatgtgagcaagaaggagccagcgcccatgaagagcaagccccctcccacgtatgagtcggaggaagaggacaagtgcaagcctatgtcctatgaggagaagcggcagctcagcttggacatcaacaagctccccggcgagaagctgggccgcgtggtgcacatcatccagtcacgggagccctccctgaagaattccaaccccgacgagattgaaatcgactttgagaccctgaagccgtccacactgcgtgagctggagcgctatgtcacctcctgtttgcggaagaaaaggaaacctcaagctgagaaagttgatgtgattgccggctcctccaagatgaagggcttctcgtcctcagagtcggagagctccagtgagtccagctcctctgacagcgaagactccgaaacaggtcctgcctaatcattggacacggactcttaataaaacggtcttcagttccagattccttcccagcaagctatagcttaagtccattttcttccgtgaaagggacaggactccatcaagttatggaattcctcagagccctgggcctgtcccccggggtggattagtcatgtccagcagcacacgcctagtcccgccttcgggaaggctgctggcagcgacagctctcgtgtcagatgctggtgctgccacatcctggacagagccactggagggacccccgtaggggtagaacaatcccaaaaagcaatagaggggagaacagtgtcaaacagaaccagattatccaaggcaaccactatcggaatggcacacaataccgaacgtggaaacacgaaacgtgtggaaaccaccaagcaaaggggaaaaagcacaaacaaacaaaaataccaggaacagatatgcacatgtaaataacaaag

SEQ ID NO: 434899 - DNA, 2739 bp, Homo sapiens
gctggcggcggcggcggcggcggcggcggcggctgggctgtttgttctggtctcccgcagccgaggagccgaagcagtggcggcggcagcggctgcggcggctgccggcggtgcccgcgggcgagcgcggcctgtgagctcggcagagcggcgggcgggccccggcgccgcgcaggcagctcggggagggggcggcggcagcgggcggacggccggcgggggcggcgtgcggcctagcgtctcagagtgcctggtgaagaatgtgatgggatcactagcatgtctgcggagagcggccctgggacgagattgagaaatctgccagtaatgggggatggactagaaacttcccaaatgtctacaacacaggcccaggcccaaccccagccagccaacgcagccagcaccaaccccccgcccccagagacctccaaccctaacaagcccaagaggcagaccaaccaactgcaatacctgctcagagtggtgctcaagacactatggaaacaccagtttgcatggcctttccagcagcctgtggatgccgtcaagctgaacctccctgattactataagatcattaaaacgcctatggatatgggaacaataaagaagcgcttggaaaacaactattactggaatgctcaggaatgtatccaggacttcaacactatgtttacaaattgttacatctacaacaagcctggagatgacatagtcttaatggcagaagctctggaaaagctcttcttgcaaaaaataaatgagctacccacagaagaaaccgagatcatgatagtccaggcaaaaggaagaggacgtgggaggaaagaaacagggacagcaaaacctggcgtttccacggtaccaaacacaactcaagcatcgactcctccgcagacccagacccctcagccgaatcctcctcctgtgcaggccacgcctcaccccttccctgccgtcaccccggacctcatcgtccagacccctgtcatgacagtggtgcctccccagccactgcagacgcccccgccagtgcccccccagccacaacccccacccgctccagctccccagcccgtacagagccacccacccatcatcgcggccaccccacagcctgtgaagacaaagaagggagtgaagaggaaagcagacaccaccacccccaccaccattgaccccattcacgagccaccctcgctgcccccggagcccaagaccaccaagctgggccagcggcgggagagcagccggcctgtgaaacctccaaagaaggacgtgcccgactctcagcagcacccagcaccagagaagagcagcaaggtctcggagcagctcaagtgctgcagcggcatcctcaaggagatgtttgccaagaagcacgccgcctacgcctggcccttctacaagcctgtggacgtggaggcactgggcctacacgactactgtgacatcatcaagcaccccatggacatgagcacaatcaagtctaaactggaggcccgtgagtaccgtgatgctcaggagtttggtgctgacgtccgattgatgttctccaactgctataagtacaaccctcctgaccatgaggtggtggccatggcccgcaagctccaggatgtgttcgaaatgcgctttgccaagatgccggacgagcctgaggagccagtggtggccgtgtcctccccggcagtgccccctcccaccaaggttgtggccccgccctcatccagcgacagcagcagcgatagctcctcggacagtgacagttcgactgatgactctgaggaggagcgagcccagcggctggctgagctccaggagcagctcaaagccgtgcacgagcagcttgcagccctctctcagccccagcagaacaaaccaaagaaaaaggagaaagacaagaaggaaaagaaaaaagaaaagcacaaaaggaaagaggaagtggaagagaataaaaaaagcaaagccaaggaacctcctcctaaaaagacgaagaaaaataatagcagcaacagcaatgtgagcaagaaggagccagcgcccatgaagagcaagccccctcccacgtatgagtcggaggaagaggacaagtgcaagcctatgtcctatgaggagaagcggcagctcagcttggacatcaacaagctccccggcgagaagctgggccgcgtggtgcacatcatccagtcacgggagccctccctgaagaattccaaccccgacgagattgaaatcgactttgagaccctgaagccgtccacactgcgtgagctggagcgctatgtcacctcctgtttgcggaagaaaaggaaacctcaaggtgtgcttgggccccctgggcatggggttccttctgtgggcaccctcagagtaacttttccctccttgctcagtccactctttctgcgcccccccccttttttttttccaattataatatctgtgttcttgacacagaaacctccgaaaggttgtgacattgcactcacccctaggctgtcagtgcctttctacatatctgactggtggtgtctggggcctctctgcaccttgttgcctgcagctgtgttctaagccggagctgctttcaacccaggctacctgctgctgagtcttcctccggcctctttggggaaggaggaaaggcgggtctgcagggtcccaggacctgtgtaccgatacgttatgcagcactgagccagcctctgtccctctctagcagggacagttcgg

SEQ ID NO: 434900 - DNA, 2608 bp, Homo sapiens
gctggcggcggcggcggcggcggcggcggcggctgggctgtttgttctggtctcccgcagccgaggagccgaagcagtggcggcggcagcggctgcggcggctgccggcggtgcccgcgggcgagcgcggcctgtgagctcggcagagcggcgggcgggccccggcgccgcgcaggcagctcggggagggggcggcggcagcgggcggacggccggcgggggcggcgtgcggcctagcgtctcagagtgcctggtgaagaatgtgatgggatcactagcatgtctgcggagagcggccctgggacgagattgagaaatctgccagtaatgggggatggactagaaacttcccaaatgtctacaacacaggcccaggcccaaccccagccagccaacgcagccagcaccaaccccccgcccccagagacctccaaccctaacaagcccaagaggcagaccaaccaactgcaatacctgctcagagtggtgctcaagacactatggaaacaccagtttgcatggcctttccagcagcctgtggatgccgtcaagctgaacctccctgattactataagatcattaaaacgcctatggatatgggaacaataaagaagcgcttggaaaacaactattactggaatgctcaggaatgtatccaggacttcaacactatgtttacaaattgttacatctacaacaagcctggagatgacatagtcttaatggcagaagctctggaaaagctcttcttgcaaaaaataaatgagctacccacagaagaaaccgagatcatgatagtccaggcaaaaggaagaggacgtgggaggaaagaaacagggacagcaaaacctggcgtttccacggtaccaaacacaactcaagcatcgactcctccgcagacccagacccctcagccgaatcctcctcctgtgcaggccacgcctcaccccttccctgccgtcaccccggacctcatcgtccagacccctgtcatgacagtggtgcctccccagccactgcagacgcccccgccagtgcccccccagccacaacccccacccgctccagctccccagcccgtacagagccacccacccatcatcgcggccaccccacagcctgtgaagacaaagaagggagtgaagaggaaagcagacaccaccacccccaccaccattgaccccattcacgagccaccctcgctgcccccggagcccaagaccaccaagctgggccagcggcgggagagcagccggcctgtgaaacctccaaagaaggacgtgcccgactctcagcagcacccagcaccagagaagagcagcaaggtctcggagcagctcaagtgctgcagcggcatcctcaaggagatgtttgccaagaagcacgccgcctacgcctggcccttctacaagcctgtggacgtggaggcactgggcctacacgactactgtgacatcatcaagcaccccatggacatgagcacaatcaagtctaaactggaggcccgtgagtaccgtgatgctcaggagtttggtgctgacgtccgattgatgttctccaactgctataagtacaaccctcctgaccatgaggtggtggccatggcccgcaagctccaggatgtgttcgaaatgcgctttgccaagatgccggacgagcctgaggagccagtggtggccgtgtcctccccggcagtgccccctcccaccaaggttgtggccccgccctcatccagcgacagcagcagcgatagctcctcggacagtgacagttcgactgatgactctgaggaggagcgagcccagcggctggctgagctccaggagcagctcaaagccgtgcacgagcagcttgcagccctctctcagccccagcagaacaaaccaaagaaaaaggagaaagacaagaaggaaaagaaaaaagaaaagcacaaaaggaaagaggaagtggaagagaataaaaaaagcaaagccaaggaacctcctcctaaaaagacgaagaaaaataggagcaacggaacacaggcaggaggaggatggcgggggtgggtgctgctttcccagctgtgtcccaggccaccatgtattccccaccctctgccccagcagcatgcagtgcagtgggccagccctaccacttcctctgattccagctattgcttgggctgtggtcttccattgagctgtgattccagctaaagcctggagctgcttgaggattctgtattgagacaggcaggggtagggcacaaatgccactctcccaccacccctagggcatctgcagacctgggtggagcaggctggaggaagacactgtcccaggtgggctgtggacagtactgtggctttgctgtcattagcactggggttaggtctgccaagcacatggggcagggcatgtcctaggaatcttctagctttcacttgtcacatagctgacatctggttcttcccaagtgtcatgcacaggtctttgtgagcagaagtgtccccacagcttatgtccctcttaggaatacccgtttaacctcatccagcgacagcagcagcgatagctcctcggacagtgacagttcgactgatgactctgaggaggagcggcccc

SEQ ID NO: 434901 - DNA, 1985 bp, Homo sapiens
gctggcggcggcggcggcggcggcggcggcggctgggctgtttgttctggtctcccgcagccgaggagccgaagcagtggcggcggcagcggctgcggcggctgccggcggtgcccgcgggcgagcgcggcctgtgagctcggcagagcggcgggcgggccccggcgccgcgcaggcagctcggggagggggcggcggcagcgggcggacggccggcgggggcggcgtgcggcctagcgtctcagagtgcctggtgaagaatgtgatgggatcactagcatgtctgcggagagcggccctgggacgagattgagaaatctgccagtaatgggggatggactagaaacttcccaaatgtctacaacacaggcccaggcccaaccccagccagccaacgcagccagcaccaaccccccgcccccagagacctccaaccctaacaagcccaagaggcagaccaaccaactgcaatacctgctcagagtggtgctcaagacactatggaaacaccagtttgcatggcctttccagcagcctgtggatgccgtcaagctgaacctccctgattactataagatcattaaaacgcctatggatatgggaacaataaagaagcgcttggaaaacaactattactggaatgctcaggaatgtatccaggacttcaacactatgtttacaaattgttacatctacaacaagcctggagatgacatagtcttaatggcagaagctctggaaaagctcttcttgcaaaaaataaatgagctacccacagaagaaaccgagatcatgatagtccaggcaaaaggaagaggacgtgggaggaaagaaacagggacagcaaaacctggcgtttccacggtaccaaacacaactcaagcatcgactcctccgcagacccagacccctcagccgaatcctcctcctgtgcaggccacgcctcaccccttccctgccgtcaccccggacctcatcgtccagacccctgtcatgacagtggtgcctccccagccactgcagacgcccccgccagtgcccccccagccacaacccccacccgctccagctccccagcccgtacagagccacccacccatcatcgcggccaccccacagcctgtgaagacaaagaagggagtgaagaggaaagcagacaccaccacccccaccaccattgaccccattcacgagccaccctcgctgcccccggagcccaagaccaccaagctgggccagcggcgggagagcagccggcctgtgaaacctccaaagaaggacgtgcccgactctcagcagcacccagcaccagagaagagcagcaaggtctcggagcagctcaagtgctgcagcggcatcctcaaggagatgtttgccaagaagcacgccgcctacgcctggcccttctacaagcctgtggacgtggaggcactgggcctacacgactactgtgacatcatcaagcaccccatggacatgagcacaatcaagtctaaactggaggcccgtgagtaccgtgatgctcaggagtttggtgctgacgtccgattgatgttctccaactgctataagtacaaccctcctgaccatgaggtggtggccatggcccgcaagctccaggatgtgttcgaaatgcgctttgccaagatgccggacgagcctgaggagccagtggtggccgtgtcctccccggcagtgccccctcccaccaaggttgtggccccgccctcatccagcgacagcagcagcgatagctcctcggacagtgacagttcgactgatgactctgaggaggagcgagcccagcggctggctgagctccaggagcagctcaaagccgtgcacgagcagcttgcagccctctctcagccccagcagaacaaaccaaagaaaaaggagaaagacaagaaggaaaagaaaaaagaaaagctagcggccgcaaacttacacccccagaaagcgagggacatccacaggaaggagag

SEQ ID NO: 434902 - DNA, 2393 bp, Homo sapiens
gccatcccaggagctgcgtgctgcctccgtggtccagccccagcccctcgtggtggtgaaggaggagaagatccactcacccatcatccgcagcgagcccttcagcccctcgctgcggccggagccccccaagcacccggagagcatcaaggcccccgtccacctgccccagcggccggaaatgaagcctgtggatgtcgggaggcctgtgatccggcccccagagcagaacgcaccgccaccaggggcccctgacaaggacaaacagaaacaggagccgaagactccagttgcgcccaaaaaggacctgaaaatcaagaacatgggctcctgggccagcctagtgcagaagcatccgaccaccccctcctccacagccaagtcatccagcgacagcttcgagcagttccgccgcgccgctcgggagaaagaggagcgtgagaaggccctgaaggctcaggccgagcacgctgagaaggagaaggagcggctgcggcaggagcgcatgaggagccgagaggacgaggatgcgctggagcaggcccggcgggcccatgaggaggcacgtcggcgccaggagcagcagcagcagcagcgccaggagcaacagcagcagcagcaacagcaagcagctgcggtggctgccgccgccaccccacaggcccagagctcccagccccagtccatgctggaccagcagagggagttggcccggaagcgggagcaggagcgaagacgccgggaagccatggcagctaccattgacatgaatttccagagtgatctattgtcaatatttgaagaaaatcttttctgagcgcacctaggtggcttctgactttgattttctggcaaaacattgactttccatagtgttaggggcggtggtggaggtgggatcagcggccaggggatgcctcagggcctggccctcctgcatgctatgcccggggcaggcctgacgggcagctgaggattgcagagcctgtctgccttacggccagtcggacagacgtcccgccacccaccacccctcacaggacgtccgctcagcacacgccttgttacgagcaagtgccggctggacccaagccctgcatccccacatgcggggcagaggcccttctctccgccaaatgtctacacagtatacacaggacatcgttgctgccgccgtgactggttttctgtccccaagaacgtgacgttcgtgatgtcctgcccgccgggagtctttccccacaccccagccatcgccgcccgctcccaggaggccagggcaggcctgcgtgggctggaggcgggcgaggccggcccaccccctcgctggcactgactttgccttgaacagaccccccgaccctcccccacaagcctttaattgagagccgctctctgtaagtgtttgcttgtgcaaaagggaatagtgccgtggaggtgtgtgtgtccatggcatccggagcgaggcgactgtcctgcgtgggtagccctcggccggggagtgaggccaccaaccaaagtcagttccttcccacctgtgtttctgtttcgtttttttttttcttttttttctatatatattttttgttgaattctattttatttttaattctctcttctcctccagacacaatggcactgcttatctccgaaatggtgtgatcgtctcctcattgagcagcggctgccaccgcgctgtgggtagtgtgtgaccgtggctgtactgtatagtgaacatagttggcatatctttgtttgaagtttgttggtgactccaccaaactggtgtgaaaaaagaaaaaagctcaaaaaaatccacaaaaagacaaaacacacaaaaaaaatcctgcctatattttactcagtttcaaactttattagtctatttttaattataaaaccagaaagctacaatttcttttctttcccctccacccccccccccccacccatttgttggcttttttgttttttaatgtcagatctgttgagttggtttttttggttttggtttttgtttttgtttttgttttttactgagaaaggaagggccaagggatgaggtgggaaccgggccctgggggcgccacagactaaggcagagactcccctacctggcgcccagccccaaccagctggccgctcctgcccatgcttttttttttttttttttttaatttttataattggagcccctggtgaggttacgcgtgccatgagaacccactctacaccacgacgctggtgcctcagtgttggccaaactctggagtcactgactggtttgactttcatacggtgaatatgcatttggtctgtactgatcatggaataaacacatctctcttttttttttttttttttttttttttttccccaggttttcgggttgt

SEQ ID NO: 434903 - DNA, 2432 bp, Homo sapiens
gccatcccaggagctgcgtgctgcctccgtggtccagccccagcccctcgtggtggtgaaggaggagaagatccactcacccatcatccgcagcgagcccttcagcccctcgctgcggccggagccccccaagcacccggagagcatcaaggcccccgtccacctgccccagcggccggaaatgaagcctgtggatgtcgggaggcctgtgatccggcccccagagcagaacgcaccgccaccaggggcccctgacaaggacaaacagaaacaggagccgaagactccagttgcgcccaaaaaggacctgaaaatcaagaacatgggctcctgggccagcctagtgcagaagcatccgaccaccccctcctccacagccaagtcatccagcgacagcttcgagcagttccgccgcgccgctcgggagaaagaggagcgtgagaaggccctgaaggctcaggccgagcacgctgagaaggagaaggagcggctgcggcaggagcgcatgaggagccgagaggacgaggatgcgctggagcaggcccggcgggcccatgaggaggcacgtcggcgccaggagcagcagcagcagcagcgccaggagcaacagcagcagcagcaacagcaagcagctgcggtggctgccgccgccaccccacaggcccagagctcccagccccagtccatgctggaccagcagagggagttggcccggaagcgggagcaggagcgaagacgccgggaagccatggcagctaccattgacatgaatttccagagtgatctattgtcaatatttgaagaaaatcttttctgagcgcacctaggtggcttctgactttgattttctggcaaaacattgactttccatagtgttaggggcggtggtggaggtgggatcagcggccaggggatgcctcagggcctggccctcctgcatgctatgcccggggcaggcctgacgggcagctgaggattgcagagcctgtctgccttacggccagtcggacagacgtcccgccacccaccacccctcacaggacgtccgctcagcacacgccttgttacgagcaagtgccggctggacccaagccctgcatccccacatgcggggcagaggcccttctctccgccaaatgtctacacagtatacacaggacatcgttgctgccgccgtgactggttttctgtccccaagaacgtgacgttcgtgatgtcctgcccgccgggagtctttccccacaccccagccatcgccgcccgctcccaggaggccagggcaggcctgcgtgggctggaggcgggcgaggccggcccaccccctcgctggcactgactttgccttgaacagaccccccgaccctcccccacaagcctttaattgagagccgctctctgtaagtgtttgcttgtgcaaaagggaatagtgccgtggaggtgtgtgtgtccatggcatccggagcgaggcgactgtcctgcgtgggtagccctcggccggggagtgaggccaccaaccaaagtcagttccttcccacctgtgtttctgtttcgtttttttttttcttttttttctatatatattttttgttgaattctattttatttttaattctctcttctcctccagacacaatggcactgcttatctccgaaatggtgtgatcgtctcctcattgagcagcggctgccaccgcgctgtgggtagtgtgtgaccgtggctgtactgtatagtgaacatagttggcatatctttgtttgaagtttgttggtgactccaccaaactggtgtgaaaaaagaaaaaagctcaaaaaaatccacaaaaagacaaaacacacaaaaaaaatcctgcctatattttactcagtttcaaactttattagtctatttttaattataaaaccagaaagctacaatttcttttctttcccctccacccccccccccccacccatttgttggcttttttgttttttaatgtcagatctgttgagttggtttttttggttttggtttttgtttttgtttttgttttttactgagaaaggaagggccaagggatgaggtgggaaccgggccctgggggcgccacagactaaggcagagactcccctacctggcgcccagccccaaccagctggccgctcctgcccatgcttttttttttttttttttttaatttttataattggagcccctggtgaggttacgcgtgccatgagaacccactctacaccacgacgctggtgcctcagtgttggccaaactctggagtcactgactggtttgactttcatacggtgaatatgcatttggtctgtactgatcatggaataaacacatctctctttttttttttttttttttttttttttttttttttttttttttttttttttttttttttttttttttccccaggttttcgggttgt

SEQ ID NO: 434904 - DNA, 2245 bp, Homo sapiens
gccatcccaggagctgcgtgctgcctccgtggtccagccccagcccctcgtggtggtgaaggaggagaagatccactcacccatcatccgcagcgagcccttcagcccctcgctgcggccggagccccccaagcacccggagagcatcaaggcccccgtccacctgccccagcggccggaaatgaagcctgtggatgtcgggaggcctgtgatccggcccccagagcagaacgcaccgccaccaggggcccctgacaaggacaaacagaaacaggagccgaagactccagttgcgcccaaaaaggacctgaaaatcaagaacatgggctcctgggccagcctagtgcagaagcatccgaccaccccctcctccacagccaagtcatccagcgacagcttcgagcagttccgccgcgccgctcgggagaaagaggagcgtgagaaggccctgaaggctcaggccgagcacgctgagaaggagaaggagcggctgcggcaggagcgcatgaggagccgagaggacgaggatgcgctggagcaggcccggcgggcccatgaggaggcacgtcggcgccaggagcagcagcagcagcagcgccaggagcaacagcagcagcagcaacagcaagcagctgcggtggctgccgccgccaccccacaggcccagagctcccagccccagtccatgctggaccagcagagggagttggcccggaagcgggagcaggagcgaagacgccgggaagccatggcagctaccattgacatgaatttccagagtgatctattgtcaatatttgaagaaaatcttttctgagcgcacctaggtggcttctgactttgattttctggcaaaacattgactttccatagtgttaggggcggtggtggaggtgggatcagcggccaggggatgcctcagggcctggccctcctgcatgctatgcccggggcaggcctgacgggcagctgaggattgcagagcctgtctgccttacggccagtcggacagacgtcccgccacccaccacccctcacaggacgtccgctcagcacacgccttgttacgagcaagtgccggctggacccaagccctgcatccccacatgcggggcagaggcccttctctccgccaaatgtctacacagtatacacaggacatcgttgctgccgccgtgactggttttctgtccccaagaacgtgacgttcgtgatgtcctgcccgccgggagtctttccccacaccccagccatcgccgcccgctcccaggaggccagggcaggcctgcgtgggctggaggcgggcgaggccggcccaccccctcgctggcactgactttgccttgaacagaccccccgaccctcccccacaagcctttaattgagagccgctctctgtaagtgtttgcttgtgcaaaagggaatagtgccgtggaggtgtgtgtgtccatggcatccggagcgaggcgactgtcctgcgtgggtagccctcggccggggagtgaggccaccaaccaaaacacaatggcactgcttatctccgaaatggtgtgatcgtctcctcattgagcagcggctgccaccgcgctgtgggtagtgtgtgaccgtggctgtactgtatagtgaacatagttggcatatctttgtttgaagtttgttggtgactccaccaaactggtgtgaaaaaagaaaaaagctcaaaaaaatccacaaaaagacaaaacacacaaaaaaaatcctgcctatattttactcagtttcaaactttattagtctatttttaattataaaaccagaaagctacaatttcttttctttcccctccacccccccccccccacccatttgttggcttttttgttttttaatgtcagatctgttgagttggtttttttggttttggtttttgtttttgtttttgttttttactgagaaaggaagggccaagggatgaggtgggaaccgggccctgggggcgccacagactaaggcagagactcccctacctggcgcccagccccaaccagctggccgctcctgcccatgcttttttttttttttttttttaatttttataattggagcccctggtgaggttacgcgtgccatgagaacccactctacaccacgacgctggtgcctcagtgttggccaaactctggagtcactgactggtttgactttcatacggtgaatatgcatttggtctgtactgatcatggaataaacacatctctcttttttt

SEQ ID NO: 434905 - DNA, 818 bp, Homo sapiens
actgagaaaggaagggccaagggatgaggtgggaaccgggccctgggggcgccacagactaaggcagagactcccctacctggcgcccagccccaaccagcagcagcagcagcgccaggagcaacagcagcagcagcaacagcaagcagctgccaccgcgctgtgggtagtgtgtgaccgtggctgtactgtatagtgaacatagttggcatatctttgtttgaagtttgttggtgactccaccaaactggtgtgaaaaaagaaaaaagctcaaaaaaatccacaaaaagacaaaacacacaaaaaaaatcctgcctatattttactcagtttcaaactttattagtctatttttaattataaaaccagaaagctacaatttcttttctttcccctccacccccccccccccacccatttgttggcttttttgttttttaatgtcagatctgttgagttggtttttttggttttggtttttgtttttgtttttgttttttactgagaaaggaagggccaagggatgaggtgggaaccgggccctgggggcgccacagactaaggcagagactcccctacctggcgcccagccccaaccagctggccgctcctgcccatgcttttttttttttttttttttaatttttataattggagcccctggtgaggttacgcgtgccatgagaacccactctacaccacgacgctggtgcctcagtgttggccaaactctggagtcactgactggtttgactttcatacggtgaatatgcatttggtctgtactgatcatggaataaacacatctctcttttttt

SEQ ID NO: 434906 - DNA, 2019 bp, Homo sapiens
gccatcccaggagctgcgtgctgcctccgtggtccagccccagcccctcgtggtggtgaaggaggagaagatccactcacccatcatccgcagcgagcccttcagcccctcgctgcggccggagccccccaagcacccggagagcatcaaggcccccgtccacctgccccagcggccggaaatgaagcctgtggatgtcgggaggcctgtgatccggcccccagagcagaacgcaccgccaccaggggcccctgacaaggacaaacagaaacaggagccgaagactccagttgcgcccaaaaaggacctgaaaatcaagaacatgggctcctgggccagcctagtgcagaagcatccgaccaccccctcctccacagccaagtcatccagcgacagcttcgagcagttccgccgcgccgctcgggagaaagaggagcgtgagaaggccctgaaggctcaggccgagcacgctgagaaggagaaggagcggctgcggcaggagcgcatgaggagccgagaggacgaggatgcgctggagcaggcccggcgggcccatgaggaggcacgtcggcgccaggagcagcagcagcagcagcgccaggagcaacagcagcagcagcaacagcaagcagctgcggtggctgccgccgccaccccacaggcccagagctcccagccccagtccatgctggaccagcagagggagttggcccggaagcgggagcaggagcgaagacgccgggaagccatggcagctaccattgacatgaatttccagagtgatctattgtcaatatttgaagaaaatcttttctgagcgcacctaggtggcttctgactttgattttctggcaaaacattgactttccatagtgttaggggcggtggtggaggtgggatcagcggccaggggatgcctcagggcctggccctcctgcatgctatgcccggggcaggcctgacgggcagctgaggattgcagagcctgtctgccttacggccagtcggacagacgtcccgccacccaccacccctcacaggacgtccgctcagcacacgccttgttacgagcaagtgccggctggacccaagccctgcatccccacatgcggggcagaggcccttctctccgccaaatgtctacacagtatacacaggacatcgttgctgccgccgtgactggttttctgtccccaagaacgtgacgttcgtgatgtcctgcccgccgggagtctttccccacaccccagccatcgccgcccgctcccaggaggccagggcaggcctgcgtgggctggaggcgggcgaggccggcccaccccctcgctggcactgactttgccttgaacagaccccccgaccctcccccacaagcctttaattgagagccgctctctgtaagtgtttgcttgtgcaaaagggaatagtgccgtggaggtgtgtgtgtccatggcatccggagcgaggcgactgtcctgcgtgggtagccctcggccggggagtgaggccaccaaccaaagtcagttccttcccacctgtgtttctgtttcgtttttttttttcttttttttctatatatattttttgttgaattctattttatttttaattctctcttctcctccagacacaatggcactgcttatctccgaaatggtgtgatcgtctcctcattgagcagcggctgccaccgcgctgtgggtagtgtgtgaccgtggctgtactgtatagtgaacatagttggcatatctttgtttgaagtttgttggtgactccaccaaactggtgaggttacgcgtgccatgagaacccactctacaccacgacgctggtgcctcagtgttggccaaactctggagtcactgactggtttgactttcatacggtgaatatgcatttggtctgtactgatcatggaataaacacatctctctttttttttttttttttttttttttttttttttttttttttttttttttttttttttttttttttttccccaggttttcgggttgt

SEQ ID NO: 434907 - DNA, 2353 bp, Homo sapiens
gccatcccaggagctgcgtgctgcctccgtggtccagccccagcccctcgtggtggtgaaggaggagaagatccactcacccatcatccgcagcgagcccttcagcccctcgctgcggccggagccccccaagcacccggagagcatcaaggcccccgtccacctgccccagcggccggaaatgaagcctgtggatgtcgggaggcctgtgatccggcccccagagcagaacgcaccgccaccaggggcccctgacaaggacaaacagaaacaggagccgaagactccagttgcgcccaaaaaggacctgaaaatcaagaacatgggctcctgggccagcctagtgcagaagcatccgaccaccccctcctccacagccaagtcatccagcgacagcttcgagcagttccgccgcgccgctcgggagaaagaggagcgtgagaaggccctgaaggctcaggccgagcacgctgagaaggagaaggagcggctgcggcaggagcgcatgaggagccgagaggacgaggatgcgctggagcaggcccggcgggcccatgaggaggcacgtcggcgccaggagcagcagcagcagcagcgccaggagcaacagcagcagcagcaacagcaagcagctgcggtggctgccgccgccaccccacaggcccagagctcccagccccagtccatgctggaccagcagagggagttggcccggaagcgggagcaggagcgaagacgccgggaagccatggcagctaccattgacatgaatttccagagtgatctattgtcaatatttgaagaaaatcttttctgagcgcacctaggtggcttctgactttgattttctggcaaaacattgactttccatagtgttaggggcggtggtggaggtgggatcagcggccaggggatgcctcagggcctggccctcctgcatgctatgcccggggcaggcctgacgggcagctgaggattgcagagcctgtctgccttacggccagtcggacagacgtcccgccacccaccacccctcacaggacgtccgctcagcacacgccttgttacgagcaagtgccggctggacccaagccctgcatccccacatgcggggcagaggcccttctctccgccaaatgtctacacagtatacacaggacatcgttgctgccgccgtgactggttttctgtccccaagaacgtgacgttcgtgatgtcctgcccgccgggagtctttccccacaccccagccatcgccgcccgctcccaggaggccagggcaggcctgcgtgggctggaggcgggcgaggccggcccaccccctcgctggcactgactttgccttgaacagaccccccgaccctcccccacaagcctttaattgagagccgctctctgtaagtgtttgcttgtgcaaaagggaatagtgccgtggaggtgtgtgtgtccatggcatccggagcgaggcgactgtcctgcgtgggtagccctcggccggggagtgaggccaccaaccaaagtcagttccttcccacctgtgtttctgtttcgtttttttttttcttttttttctatatatattttttgttgaattctattttatttttaattctctcttctcctccagacacaatggcactgcttatctccgaaatggtgtgatcgtctcctcattgagcagcggctgccaccgcgctgtgggtagtgtgtgaccgtggctgtactgtatagtgaacatagttggcatatctttgtttgaagtttgttggtgactccaccaaactggtgtgaaaaaagaaaaaagctcaaaaaaatccacaaaaagacaaaacacacaaaaaaaatcctgcctatattttactcagtttcaaactttattagtctatttttaattataaaaccagaaagctacaatttcttttctttcccctccacccccccccccccacccatttgttggcttttttgttttttaatgtcagatctgttgagttggtttttttggttttggtttttgtttttgtttttgttttttactgagaaaggaagggccaagggatgaggtgggaaccgggccctgggggcgccacagactaaggcagagactcccctacctggcgcccagccccaaccagctggccgctcctgcccatgcttttttttttttttttttttaatttttataattggagcccctggtgaggttacgcgtgccatgagaacccactctacaccacgacgctggtgcctcagtgttggccaaactctggagtcactgactggtttgactttcatacggtgaatatgcatttggtctgtactgatcatggaataaacacatctctcttttttt

SEQ ID NO: 434908 - DNA, 2072 bp, Homo sapiens
  misc_feature (1988)..(1988): n is a, c, g, or t
gccatcccaggagctgcgtgctgcctccgtggtccagccccagcccctcgtggtggtgaaggaggagaagatccactcacccatcatccgcagcgagcccttcagcccctcgctgcggccggagccccccaagcacccggagagcatcaaggcccccgtccacctgccccagcggccggaaatgaagcctgtggatgtcgggaggcctgtgatccggcccccagagcagaacgcaccgccaccaggggcccctgacaaggacaaacagaaacaggagccgaagactccagttgcgcccaaaaaggacctgaaaatcaagaacatgggctcctgggccagcctagtgcagaagcatccgaccaccccctcctccacagccaagtcatccagcgacagcttcgagcagttccgccgcgccgctcgggagaaagaggagcgtgagaaggccctgaaggctcaggccgagcacgctgagaaggagaaggagcggctgcggcaggagcgcatgaggagccgagaggacgaggatgcgctggagcaggcccggcgggcccatgaggaggcacgtcggcgccaggagcagcagcagcagcagcgccaggagcaacagcagcagcagcaacagcaagcagctgcggtggctgccgccgccaccccacaggcccagagctcccagccccagtccatgctggaccagcagagggagttggcccggaagcgggagcaggagcgaagacgccgggaagccatggcagctaccattgacatgaatttccagagtgatctattgtcaatatttgaagaaaatcttttctgagcgcacctaggtggcttctgactttgattttctggcaaaacattgactttccatagtgttaggggcggtggtggaggtgggatcagcggccaggggatgcctcagggcctggccctcctgcatgctatgcccggggcaggcctgacgggcagctgaggattgcagagcctgtctgccttacggccagtcggacagacgtcccgccacccaccacccctcacaggacgtccgctcagcacacgccttgttacgagcaagtgccggctggacccaagccctgcatccccacatgcggggcagaggcccttctctccgccaaatgtctacacagtatacacaggacatcgttgctgccgccgtgactggttttctgtccccaagaacgtgacgttcgtgatgtcctgcccgccgggagtctttccccacaccccagccatcgccgcccgctcccaggaggccagggcaggcctgcgtgggctggaggcgggcgaggccggcccaccccctcgctggcactgactttgccttgaacagaccccccgaccctcccccacaagcctttaattgagagccgctctctgtaagtgtttgcttgtgcaaaagggaatagtgccgtggaggtgtgtgtgtccatggcatccggagcgaggcgactgtcctgcgtgggtagccctcggccggggagtgaggccaccaaccaaagtcagttccttcccacctgtgtttctgtttcgtttttttttttcttttttttctatatatattttttgttgaattctattttatttttaattctctcttctcctccagacacaatggcactgcttatctccgaaatggtgtgatcgtctcctcattgagcagcggctgccaccgcgctgtgggtagtgtgtgaccgtggctgtactgtatagtgaacatagttggcatatctttgtttgaagtttgttggtgactccaccaaactggtgtgaaaaaagaaaaaagctcaaaaaaatccacaaaaagacaaaacacacaaaaaaaatcctgcctatattttactcagtttcaaactttattagtctatttttaattataaaaccagaaagctacaatttcttttctttcccctccaccccccccccctgaaagattagagatctttaatttatcagcagtatattttagnttcgctgcactgcgtaaagccactcttggagaaaaataatgtggaaaaagtggtggttgttattttggataaagagcaccgccc

SEQ ID NO: 434909 - DNA, 1940 bp, Homo sapiens
gccatcccaggagctgcgtgctgcctccgtggtccagccccagcccctcgtggtggtgaaggaggagaagatccactcacccatcatccgcagcgagcccttcagcccctcgctgcggccggagccccccaagcacccggagagcatcaaggcccccgtccacctgccccagcggccggaaatgaagcctgtggatgtcgggaggcctgtgatccggcccccagagcagaacgcaccgccaccaggggcccctgacaaggacaaacagaaacaggagccgaagactccagttgcgcccaaaaaggacctgaaaatcaagaacatgggctcctgggccagcctagtgcagaagcatccgaccaccccctcctccacagccaagtcatccagcgacagcttcgagcagttccgccgcgccgctcgggagaaagaggagcgtgagaaggccctgaaggctcaggccgagcacgctgagaaggagaaggagcggctgcggcaggagcgcatgaggagccgagaggacgaggatgcgctggagcaggcccggcgggcccatgaggaggcacgtcggcgccaggagcagcagcagcagcagcgccaggagcaacagcagcagcagcaacagcaagcagctgcggtggctgccgccgccaccccacaggcccagagctcccagccccagtccatgctggaccagcagagggagttggcccggaagcgggagcaggagcgaagacgccgggaagccatggcagctaccattgacatgaatttccagagtgatctattgtcaatatttgaagaaaatcttttctgagcgcacctaggtggcttctgactttgattttctggcaaaacattgactttccatagtgttaggggcggtggtggaggtgggatcagcggccaggggatgcctcagggcctggccctcctgcatgctatgcccggggcaggcctgacgggcagctgaggattgcagagcctgtctgccttacggccagtcggacagacgtcccgccacccaccacccctcacaggacgtccgctcagcacacgccttgttacgagcaagtgccggctggacccaagccctgcatccccacatgcggggcagaggcccttctctccgccaaatgtctacacagtatacacaggacatcgttgctgccgccgtgactggttttctgtccccaagaacgtgacgttcgtgatgtcctgcccgccgggagtctttccccacaccccagccatcgccgcccgctcccaggaggccagggcaggcctgcgtgggctggaggcgggcgaggccggcccaccccctcgctggcactgactttgccttgaacagaccccccgaccctcccccacaagcctttaattgagagccgctctctgtaagtgtttgcttgtgcaaaagggaatagtgccgtggaggtgtgtgtgtccatggcatccggagcgaggcgactgtcctgcgtgggtagccctcggccggggagtgaggccaccaaccaaagtcagttccttcccacctgtgtttctgtttcgtttttttttttcttttttttctatatatattttttgttgaattctattttatttttaattctctcttctcctccagacacaatggcactgcttatctccgaaatggtgtgatcgtctcctcattgagcagcggctgccaccgcgctgtgggtagtgtgtgaccgtggctgtactgtatagtgaacatagttggcatatctttgtttgaagtttgttggtgactccaccaaactggtgaggttacgcgtgccatgagaacccactctacaccacgacgctggtgcctcagtgttggccaaactctggagtcactgactggtttgactttcatacggtgaatatgcatttggtctgtactgatcatggaataaacacatctctcttttttt

SEQ ID NO: 434910 - DNA, 519 bp, Homo sapiens
cagagcctttgctggctcctagtgggctctcaccacctcactctgcctcctctgttggtttgtggtctcctccctgctggagggtaagtctttggggagaggagacattggaaccctttcagtcaaagcatggggtggtccctctggccaacttggctagctaccgccagggaactcagtccttggagaccacagccagagggacttgtcattctgagcggtgcccatctgctgactgatatctcacgggggctcttctcttcctttgtagagtgcctggtgaagaatgtgatgggatcactagcatgtctgcggagagcggccctgggacgagattgagaaatctgccagtaatgggggatggactagaaacttcccaaatgtctacaacacaggcccaggcccaaccccagccagccaacgcagccagcaccaaccccccgcccccagagacctccaggcgggagccacaccaatggagaagtggtcatcatcatctccacctcattgccatcccgg

SEQ ID NO: 434911 - DNA, 1113 bp, Homo sapiens
catgtatttgatcacattatataaaactgtaatgtcagtgctgctagggaaagtgagctgccatattgtaggttgcccacatagaggatcacatgacaggaactggggatgccttccagacaccagccagtgagaaactgagacccttggtctgaaagtctacaagaaactgaattctgtcaacaaccatgtgagcttagaagagaatgcttccccactgcagcctcaggagagacaccagacctggctgacacctggagtccacccttgcagaggacctagcagagtcaggtccaggctcctgacgcacagaaactgtacaacaataattgtgttttttaagccaataagtttgtattaataatgttatacagcaatagaaaatacaaaatccttatgaaaattccactatttttacaaatccaagagagaaaagtagtatcatatctttttctattaccttctcaataaccttaacaaacaaaagccagaattttaacggggtattttattttcagagatgagatcttgctatgttgcctaggctggactcgaactcctgggctcaagtgatcgtcccaggcattaacaatgtattttagaacaacaataagagcttatatgagatggactgactgtcgtaaatttttcatcagagcctcatattatagctgccagaggcatttcattattcttaccggtttttgaaggggagtatatttccacctctgtcaagtatgcaccctctattattcaaaaaaatatggaataatgtgattatgatagtgtcttacactatcaattgctaggcatgtaattcacactcaaaaattcttaccagtttattagtgacttctactataataaagtatataagcaacagatgcctcaatatgaatggatcaaaacgttaagtgcaaatgtatcttaatcaagatgtgtttataagagcttttgtgctaatattcggcaatactctcaattatttcaatgcaatttcattactcaattatatctcactcacttataccttattttgtagaaagagaaaccaaccacaaactattggcccaggcttgcaaatttaaaataaaaactgctttgctagtagca

SEQ ID NO: 434912 - DNA, 788 bp, Homo sapiens
caatttctacacctttctctccagtcctccaaccagccatacacagctacccctgtttacttcaggatacaatgaaagtggcctaggaatttttcaaatatgctacccatgggaggagccgttttcattcctacctgtcaactagaaaaaatacaatagcaacataggattatgcatgcttcttattaaccgaaaatgataataccatttagtttagtgatcagtatgagaagcaatacctaatcctatgttgctattgtattttttcctagttggtgtgcctgctcagaaaaacatatactgtatgtgtatacatacctgtgtatatataaaaggtcaatttatatatttttctataggaaaatggagtaacaagttccctatctcccatatttatttgtccatagtaaaatggccacattgatgataatttctagaactagtttctgagattgtcagccctttgtctaaaataatggcagtattaatgattgacttctgtcactgccatagttacctggattgtcagccttggtagcctttgtctaaagtcctaaagagttccaaaaaaaatgtgttgaaatttaattgctaaatagtggttggtgattctttacagtaggaattgtaataattttcttgcaaataagttatttactgctattgatattgaataatttgtcttttattcagatatatttcaaaaagcatgaatatatgattattcataaattgtatactttaccagtaagttttcagaggaaataaagacttttaaatccttttca

SEQ ID NO: 434913 - DNA, 1905 bp, Homo sapiens
ataggcagcaaactaagctgcagtgatgttgcctatatttaaattttctcaaatggccaagctctgatggtctactttatttgagcaatagttgagacttataattgcctataaataaacaaacaaatgaactatttgtttttttttctcacaacatctggcctatattgtctgtcaggaagccatggctccaatgtaaagtacatagttcttacatacttcaactgcagctggtccctgacctcaccaggtttcagagatgttcttaaaggaagccagctgtggcaggtcacagattcatgggaaatggaaagaaccaaggaatatagctcttgcctcacctttctacccactgcagatatagttcaagccagagtaatggaagaacttaacttactagcctctcaggctgctcctatccctacctcccagtgtacagcccctccccatctctttagtcccctttccctcacttccccttttataatgtcacacaaatcagggacagtaggatcacattataacctactttgtcatagggattcgatttttcttatatcaaatcatgtttcctgaaacccagctggggcatatgcactcaatgtctaatacatacttattaatgtaccggatattggccttgcccctggatatcagcaatatattataaaaggttccagtagatgagacgattgagtctgaatacaattgcagtaaattgtgccaataaagatattgtactgttacggtcttagagttaaagccgcttgaatgcagcatgcacattcatgtaaacagacaatcagggtaggcctagaataaccacaaaaattctattggccttactgcagccacctatatgtagaacaatggaggagatagtttgtggtccattattgtaccctgtttcatccattagcatcagaatctctctttcaggtcatttattaaatatgattgaaatgtttaaaagttcctgaacatgattcatgatgattaaaatatcatacaactgataaaagactttaagaactttatatatttcctgttgcctcaaaatgtaacagaaattattcttagagctttgattttagctatcctaattactgcaaataaatatttgttcttatagttttaaatcaaaaagaaaagtcttgttataaaaccttaagcttgaaatcatattaataaaatatattgtacatagtggaaaattttcagtagctaatttaaaatttcagaaaatgctattaaagaattttgattcaagtatttaaactgtttagttatgcatgcttcttattaaccgaaaatgataataccatttagtttagtgatcagtatgagaagcaatacctaatcctatgttgctattgtattttttcctagttggtgtgcctgctcagaaaaacatatactgtatgtgtatacatacctgtgtatatataaaaggtcaatttatatatttttctataggaaaatggagtaacaagttccctatctcccatatttatttgtccatagtaaaatggccacattgatgataatttctagaactagtttctgagattgtcagccctttgtctaaaataatggcagtattaatgattgacttctgtcactgccatagttacctggattgtcagccttggtagcctttgtctaaagtcctaaagagttccaaaaaaaatgtgttgaaatttaattgctaaatagtggttggtgattctttacagtaggaattgtaataattttcttgcaaataagttatttactgctattgatattgaataatttgtcttttattcagatatatttcaaaaagcatgaatatatgattattcataaattgtatactttaccagtaagttttcagaggaaataaagacttttaaatccttttca

SEQ ID NO: 434914 - DNA, 1851 bp, Homo sapiens
ataggcagcaaactaagctgcagtgatgttgcctatatttaaattttctcaaatggccaagctctgatggtctactttatttgagcaatagttgagacttataattgcctataaataaacaaacaaatgaactatttgtttttttttctcacaacatctggcctatattgtctgtcaggaagccatggctccaatgtaaagtacatagttcttacatacttcaactgcagctggtccctgacctcaccaggtttcagagatgttcttaaaggaagccagctgtggcaggtcacagattcatgggaaatggaaagaaccaaggaatatagctcttgcctcacctttctacccactgcagatatagttcaagccagagtaatggaagaacttaacttactagcctctcaggctgctcctatccctacctcccagtgtacagcccctccccatctctttagtcccctttccctcacttccccttttataatgtcacacaaatcagggacagtaggatcacattataacctactttgtcatagggattcgatttttcttatatcaaatcatgtttcctgaaacccagctggggcatatgcactcaatgtctaatacatacttattaatgtaccggatattggccttgcccctggatatcagcaatatattataaaaggttccagtagatgagacgattgagtctgaatacaattgcagtaaattgtgccaataaagatattgtactgttacggtcttagagttaaagccgcttgaatgcagcatgcacattcatgtaaacagacaatcagggtaggcctagaataaccacaatttgtggtccattattgtaccctgtttcatccattagcatcagaatctctctttcaggtcatttattaaatatgattgaaatgtttaaaagttcctgaacatgattcatgatgattaaaatatcatacaactgataaaagactttaagaactttatatatttcctgttgcctcaaaatgtaacagaaattattcttagagctttgattttagctatcctaattactgcaaataaatatttgttcttatagttttaaatcaaaaagaaaagtcttgttataaaaccttaagcttgaaatcatattaataaaatatattgtacatagtggaaaattttcagtagctaatttaaaatttcagaaaatgctattaaagaattttgattcaagtatttaaactgtttagttatgcatgcttcttattaaccgaaaatgataataccatttagtttagtgatcagtatgagaagcaatacctaatcctatgttgctattgtattttttcctagttggtgtgcctgctcagaaaaacatatactgtatgtgtatacatacctgtgtatatataaaaggtcaatttatatatttttctataggaaaatggagtaacaagttccctatctcccatatttatttgtccatagtaaaatggccacattgatgataatttctagaactagtttctgagattgtcagccctttgtctaaaataatggcagtattaatgattgacttctgtcactgccatagttacctggattgtcagccttggtagcctttgtctaaagtcctaaagagttccaaaaaaaatgtgttgaaatttaattgctaaatagtggttggtgattctttacagtaggaattgtaataattttcttgcaaataagttatttactgctattgatattgaataatttgtcttttattcagatatatttcaaaaagcatgaatatatgattattcataaattgtatactttaccagtaagttttcagaggaaataaagacttttaaatccttttca

SEQ ID NO: 434915 - DNA, 1351 bp, Homo sapiens
ataggcagcaaactaagctgcagtgatgttgcctatatttaaattttctcaaatggccaagctctgatggtctactttatttgagcaatagttgagacttataattgcctataaataaacaaacaaatgaactatttgtttttttttctcacaacatctggcctatattgtctgtcaggaagccatggctccaatgtaaagtacatagttcttacatacttcaactgcagctggtccctgacctcaccaggtttcagagatgttcttaaaggaagccagctgtggcaggtcacagattcatgggaaatggaaagaaccaaggaatatagctcttgcctcacctttctacccactgcagatatagttcaagccagagtaatggaagaacttaacttactagcctctcaggctgctcctatccctacctcccagtgtacagcccctccccatctctttagtcccctttccctcacttccccttttataatgtcacacaaatcagggacagtaggatcacattataacctactttgtcatagggattcgatttttcttatatcaaatcatgtttcctgaaacccagctggggcatatgcactcaatgtctaatacatacttattaatgtaccggatattggccttgcccctggatatcagcaatatattataaaaggttccagtagatgagacgattgagtctgaatacaattgcagtaaattgtgccaataaagatattgtactgttacggtcttagagttaaagccgcttgaatgcagcatgcacattcatgtaaacagacaatcagggtaggcctagaataaccacaaaaattctattggccttactgcagccacctatatgtagaacaatggaggagatagtttgtggtccattattgtaccctgtttcatccattagcatcagaatctctctttcaggtcatttattaaatatgattgaaatgtttaaaagttcctgaacatgattcatgatgattaaaatatcatacaactgataaaagactttaagaactttatatatttcctgttgcctcaaaatgtaacagaaattattcttagagctttgattttagctatcctaattactgcaaataaatatttgttcttatagttttaaatcaaaaagaaaagtcttgttataaaaccttaagcttgaaatcatattaataaaatatattgtacatagtggaaaattttcagtagctaatttaaaatttcagaaaatgctgttttaaaatattgtgatccaggtttttacagctgaatatttccggttgcttttttttccccccaaaatgattccccctcatttatttaggcccatcttatt

SEQ ID NO: 434916 - DNA, 3725 bp, Homo sapiens
tttttctttcctggctgatgatttgtcattctagtcacttcctgccttgtgaccacacacccaggcttgacaaagctgttctgcagatcagaaagaaggggttcctggtcatacaccagtactaccaaggacagcttttttcctgcaagatctgttacctaaagcaataaaaaatggccagaggatcagtgtccgatgaggaaatgatggagctcagagaagcttttgccaaagttgatactgatggcaatggatacatcagcttcaatgagttgaatgacttgttcaaggctgcttgcttgcctttgcctgggtatagagtacgagaaattacagaaaacctgatggctacaggtgatctggaccaagatggaaggatcagctttgatgagtttatcaagattttccatggcctaaaaagcacagatgttgccaagacctttagaaaagcaatcaataagaaggaagggatttgtgcaatcggtggtacttcagagcagtctagcgttggcacccaacactcctattcagaggaagaaaagtatgcctttgtcaactggataaacaaagccctggaaaatgatcctgattgtcggcatgtcatcccaatgaacccaaacacgaatgatctctttaatgctgttggagatggcattgtcctttgtaaaatgatcaacctgtcagtgccagacacaattgatgaaagaacaatcaacaaaaagaagctaacccctttcaccattcaggaaaatctgaacttggctctgaactctgcctcagccatcgggtgccatgtggtcaacataggggctgaggacctgaaggaggggaagccttatctggtcctgggacttctgtggcaagtcatcaagattgggttgtttgctgacattgaactcagcagaaatgaagctctgattgctcttttgagagaaggtgagagcctggaggatttgatgaaactctcccctgaagagctcttgctgaggtgggctaattaccacctggaaaatgcaggctgcaacaaaattggcaacttcagtactgacatcaaggactcaaaagcttattaccacctgcttgagcaggtggctccaaaaggagatgaagaaggtgttcctgctgttgttattgacatgtcaggactgcgggagaaggatgacatccagagggcagaatgcatgctgcagcaggcggagaggctgggctgccggcagtttgtcacagccacagatgttgtccgagggaaccccaagttgaacttggcttttattgccaacctctttaacagataccctgccctgcacaaaccagagaaccaggacattgactggggggctcttgaaggtgagacgagagaagagcggacatttaggaactggatgaactccctgggtgttaaccctcgagtcaatcatttgtacagtgacttatcagatgccctggtcatcttccagctctatgaaaagatcaaagttcctgttgactggaacagagtaaacaaaccgccataccccaaactgggaggcaatatgaagaagcttgagaattgtaactacgcggtagaattggggaagaatcaagcgaagttctccctggttggcatcggtggacaagatctcaatgaaggaaaccgcactctcacactggccttgatttggcagctaatgagaaggtatacactgaatatcctcgaagaaattggtggtggccagaaggtcaatgatgacattattgtcaactgggtgaatgaaacattgagggaagcagagaaaagttcatccatctctagtttcaaggacccgaagattagtacaagtctgcctgttctggacctcatcgatgccatccaaccaggttccattaactatgaccttctgaagacagaaaatctgaatgatgatgagaaactcaacaatgcaaaatatgccatctctatggcccgaaaaattggagcaagagtgtatgccctgccagaagacctggttgaagtgaaccccaaaatggtcatgaccgtgtttgcctgcctcatggggaaaggaatgaagagggtgtgaggcccaatggggctgggtgggaggcggtgcactcactcctgactgcccggcacagatgctccagggatgattcaagccattccaaagttcaacttggtgacactctataagattccaaaaagcacatattagtgcagccaagtagcctctcctgtatttaacaaaaagtgcttcattctttgcaggaggcccaacctcctatatataggtttctattcttgatttatttgcttcttcgaaaatctagaggaaaagaaagaagttattttccaggtacccttctcgcttttgccattagccaaggatagaagctgcagtggtattaattttgatataatctttcaaaccagcttcatgtggcttcccttttctttgttcaagatgagggccaggaggggaaacatcacacctgccctaaaccctgttcctggaggtcagcatttgatctgttgcaagcccctctttctgtcccctcttcctaccctgcctcccatgactttgctcctcacacttttggaaccatgccttccgggggggcccatctcttctggccgtccttgtctctgggccacttggagtgtgtgataaatcagtcaagctgttgaagtctcaggagtctctggtagcctgcagaagtaagcctcatcatcagagcctttcctcaaaactggagtcccaaatgtcatcaggttttgttttttttcagccactaagaacccctctgcttttaactctagaatttgggcttggaccagatctaacatcttgaatactctgccctctagagccttcagccttaatggaaggttggatccaaggagggtgtaatggagcatcaagccactcggcggcagcatggagctataactaagcatcctttagggttctgcctctccaggcatttagccctcacattagatctagttactgtggtatggctaatacctgtcaacatttggaggcaatcctaccttgcttttgcttctagagcttagcatatctgattgttgtcaggccatattatcaatgtttacttttttggtactataaaagctttctgccacccctaaactccaggggggaaaatatgtgccaatcaatagcacccctactcacatacacacacacctagccagctgtcaagggcagaatgaatctatgctggataagaaatggtggaactgcgttatgaagagctaatttactggacaaagaattccaaagcaaaaccagaacagtatgaatttgagcaggtctcataggttgagcaatttccccctaaaccaactgaaggctaaaaagcaacaggccattgtgaaccaatgcaagacgccctctatcatggtgaaaagctccatcaatgaggtatcttctttagtggtggtatgtaatggaacttagccatttttcaaagcaattgaaatgcattgctctggatctgttccttggcagtggactcagaaagccaacatgtggctcctcccagcccataaccagtatttttgctgcttctgaatacaaattggttggttttgacttcagattgaacttactgtagcctcagatgatttcccccctccgcctccaggaagaaagaatgttactgccttaataaaaaatgaaaagagaatgatgctcaaaatctttccaaataaaatgttccctata

SEQ ID NO: 434917 - DNA, 862 bp, Homo sapiens
  misc_feature (824)..(824): n is a, c, g, or t
  misc_feature (831)..(831): n is a, c, g, or t
  misc_feature (845)..(845): n is a, c, g, or t
  misc_feature (849)..(849): n is a, c, g, or t
  misc_feature (855)..(855): n is a, c, g, or t
tggctagtagggccggtgtgaatcggccgagggcacttttccctggctctttcactaaaaatgaaaaattgtgatcttgcttcacttcctgccttgtgaccacacacccaggcttgacaaagctgttctgcagatcagaaagaaggggttcctggtcatacaccagtactaccaaggacagcttttttcctgcaagatctgttacctaaagcaataaaaaatggccagaggatcagtgtccgatgaggaaatgatggagctcagagaagcttttgccaaagttgatactgatggcaatggatacatcagcttcaatgagttgaatgacttgttcaaggctgcttgcttgcctttgcctgggtatagagtacgagaaattacagaaaacctgatggctacaggtgatctggaccaagatggaaggatcagctttgatgagtttatcaagattttccatggcctaaaaagcacagatgttgccaagacctttagaaaagcaatcaataagaaggaagggatttgtgcaatcggtggtacttcagagcagtctagcgttggcacccaacactcctattcagaggaagaaaagtatgcctttgtcaactggataaacaaagccctggaaaatgatcctgattgtcggcatgtcatcccaatgaacccaaacacgaatgatctctttaatgctgttggagatggcattgtcctttgtaaaatgatcaacctgtcagtgccagacacaattgatgaaagaacaatcaacaaaaagaagctaacccctttcaccattcagcggaaatctgactggtctgaattgctcagcntcgggcntgtgtcactagggntggncctganggggagc

SEQ ID NO: 434918 - DNA, 837 bp, Homo sapiens
ccttaggcataggtacgaggcctgggtgtacatgactcaaaagcttattaccacctgcttgagcaggtggctccaaaaggagatgaagaaggtgttcctgctgttgttattgacatgtcaggactgcgggagaaggatgacatccagagggcagaatgcatgctgcagcaggcggagaggctgggctgccggcagtttgtcacagccacagatgttgtccgagggaaccccaagttgaacttggcttttattgccaacctctttaacagataccctgccctgcacaaaccagagaaccaggacattgactggggggctcttgaaggtgagacgagagaagagcggacatttaggaactggatgaactccctgggtgttaaccctcgagtcaatcatttgtacagtgacttatcagatgccctggtcatcttccagctctatgaaaagatcaaagttcctgttgactggaacagagtaaacaaaccgccataccccaaactgggaggcaatatgaagaagcttgagaattgtaactacgcggtagaattggggaagaatcaagcgaagttctccctggttggcatcggtggacaagatctcaatgaaggaaaccgcactctcacactggccttgatttggcagctaatgagaaggtatacactgaatatcctcgaagaaattggtggtggccagaaggtcaatgatgacattattgtcaactgggtgaatgaaacattgagggaagcagagaaaagttcatccatctctagtttcaaggaccgaatagaagtctgcggtctggactctgtgccccaccggtccttcttttctctgagc

SEQ ID NO: 434919 - DNA, 668 bp, Homo sapiens
  misc_feature (16)..(16): n is a, c, g, or t
  misc_feature (19)..(19): n is a, c, g, or t
  misc_feature (24)..(24): n is a, c, g, or t
taggctaggtgcgagnccnggtgntgagactcaaaagcttattaccacctgcttgagcaggtggctccaaaaggagatgaagaaggtgttcctgctgttgttattgacatgtcaggactgcgggagaaggatgacatccagagggcagaatgcatgctgcagcaggcggagaggctgggctgccggcagtttgtcacagccacagatgttgtccgagggaaccccaagttgaacttggcttttattgccaacctctttaacagataccctgccctgcacaaaccagagaaccaggacattgactggggggctcttgaaggtgagacgagagaagagcggacatttaggaactggatgaactccctgggtgttaaccctcgagtcaatcatttgtacagtgacttatcagatgccctggtcatcttccagctctatgaaaagatcaaagttcctgttgactggaacagagtaaacaaaccgccataccccaaactgggaggcaatatgaagaagcttgagaattgtaactacgcggtagaattggggaagaatcaagcgaagttctccctggttggcatcggtggacaagatctcaatgaaggaaaccgcactctcacactggccttgatttggcagctaatgagaaggtagtatagcttatggaagtg

SEQ ID NO: 434920 - DNA, 4113 bp, Homo sapiens
aggcgaggcgggcgccgggaggggcaggcccagcccacggtgcagcgcgcgcggagccctcgccttcctccgacgcactgtggggctgcaggggaagctgcgggccgtgggggccggaggagaagccggctccacgcgcagctgctggcgaatgaggaaagatccagctctgacagaataatgagttgtgcaaagtgaaggccaaatgacatcaccggagatagcagtagttcaaagaaagcaaagcagaggaattgaactgctgcaaaatgcacgagtctcaaacattgtctcagcagcagcatcatatcttacaaaagttgaggaaatactgtatttccagcttaggaaactgaagattcctccggcctcagatgaccaggcaccactagatacagaacactgtgctttccttctccaagtcacttcctgccttgtgaccacacacccaggcttgacaaagctgttctgcagatcagaaagaaggggttcctggtcatacaccagtactaccaaggacagcttttttcctgcaagatctgttacctaaagcaataaaaaatggccagaggatcagtgtccgatgaggaaatgatggagctcagagaagcttttgccaaagttgatactgatggcaatggatacatcagcttcaatgagttgaatgacttgttcaaggctgcttgcttgcctttgcctgggtatagagtacgagaaattacagaaaacctgatggctacaggtgatctggaccaagatggaaggatcagctttgatgagtttatcaagattttccatggcctaaaaagcacagatgttgccaagacctttagaaaagcaatcaataagaaggaagggatttgtgcaatcggtggtacttcagagcagtctagcgttggcacccaacactcctattcagaggaagaaaagtatgcctttgtcaactggataaacaaagccctggaaaatgatcctgattgtcggcatgtcatcccaatgaacccaaacacgaatgatctctttaatgctgttggagatggcattgtcctttgtaaaatgatcaacctgtcagtgccagacacaattgatgaaagaacaatcaacaaaaagaagctaacccctttcaccattcaggaaaatctgaacttggctctgaactctgcctcagccatcgggtgccatgtggtcaacataggggctgaggacctgaaggaggggaagccttatctggtcctgggacttctgtggcaagtcatcaagattgggttgtttgctgacattgaactcagcagaaatgaagctctgattgctcttttgagagaaggtgagagcctggaggatttgatgaaactctcccctgaagagctcttgctgaggtgggctaattaccacctggaaaatgcaggctgcaacaaaattggcaacttcagtactgacatcaaggactcaaaagcttattaccacctgcttgagcaggtggctccaaaaggagatgaagaaggtgttcctgctgttgttattgacatgtcaggactgcgggagaaggatgacatccagagggcagaatgcatgctgcagcaggcggagaggctgggctgccggcagtttgtcacagccacagatgttgtccgagggaaccccaagttgaacttggcttttattgccaacctctttaacagataccctgccctgcacaaaccagagaaccaggacattgactggggggctcttgaaggtgagacgagagaagagcggacatttaggaactggatgaactccctgggtgttaaccctcgagtcaatcatttgtacagtgacttatcagatgccctggtcatcttccagctctatgaaaagatcaaagttcctgttgactggaacagagtaaacaaaccgccataccccaaactgggaggcaatatgaagaagcttgagaattgtaactacgcggtagaattggggaagaatcaagcgaagttctccctggttggcatcggtggacaagatctcaatgaaggaaaccgcactctcacactggccttgatttggcagctaatgagaaggtatacactgaatatcctcgaagaaattggtggtggccagaaggtcaatgatgacattattgtcaactgggtgaatgaaacattgagggaagcagagaaaagttcatccatctctagtttcaaggacccgaagattagtacaagtctgcctgttctggacctcatcgatgccatccaaccaggttccattaactatgaccttctgaagacagaaaatctgaatgatgatgagaaactcaacaatgcaaaatatgccatctctatggcccgaaaaattggagcaagagtgtatgccctgccagaagacctggttgaagtgaaccccaaaatggtcatgaccgtgtttgcctgcctcatggggaaaggaatgaagagggtgtgaggcccaatggggctgggtgggaggcggtgcactcactcctgactgcccggcacagatgctccagggatgattcaagccattccaaagttcaacttggtgacactctataagattccaaaaagcacatattagtgcagccaagtagcctctcctgtatttaacaaaaagtgcttcattctttgcaggaggcccaacctcctatatataggtttctattcttgatttatttgcttcttcgaaaatctagaggaaaagaaagaagttattttccaggtacccttctcgcttttgccattagccaaggatagaagctgcagtggtattaattttgatataatctttcaaaccagcttcatgtggcttcccttttctttgttcaagatgagggccaggaggggaaacatcacacctgccctaaaccctgttcctggaggtcagcatttgatctgttgcaagcccctctttctgtcccctcttcctaccctgcctcccatgactttgctcctcacacttttggaaccatgccttccgggggggcccatctcttctggccgtccttgtctctgggccacttggagtgtgtgataaatcagtcaagctgttgaagtctcaggagtctctggtagcctgcagaagtaagcctcatcatcagagcctttcctcaaaactggagtcccaaatgtcatcaggttttgttttttttcagccactaagaacccctctgcttttaactctagaatttgggcttggaccagatctaacatcttgaatactctgccctctagagccttcagccttaatggaaggttggatccaaggagggtgtaatggagcatcaagccactcggcggcagcatggagctataactaagcatcctttagggttctgcctctccaggcatttagccctcacattagatctagttactgtggtatggctaatacctgtcaacatttggaggcaatcctaccttgcttttgcttctagagcttagcatatctgattgttgtcaggccatattatcaatgtttacttttttggtactataaaagctttctgccacccctaaactccaggggggaaaatatgtgccaatcaatagcacccctactcacatacacacacacctagccagctgtcaagggcagaatgaatctatgctggataagaaatggtggaactgcgttatgaagagctaatttactggacaaagaattccaaagcaaaaccagaacagtatgaatttgagcaggtctcataggttgagcaatttccccctaaaccaactgaaggctaaaaagcaacaggccattgtgaaccaatgcaagacgccctctatcatggtgaaaagctccatcaatgaggtatcttctttagtggtggtatgtaatggaacttagccatttttcaaagcaattgaaatgcattgctctggatctgttccttggcagtggactcagaaagccaacatgtggctcctcccagcccataaccagtatttttgctgcttctgaatacaaattggttggttttgacttcagattgaacttactgtagcctcagatgatttcccccctccgcctccaggaagaaagaatgttactgccttaataaaaaatgaaaagagaatgatgctcaaaatctttccaaataaaatgttccctata

SEQ ID NO: 434921 - DNA, 3943 bp, Homo sapiens
atggtgttgatgaacctgtgtgtgcagtcatagatacatcgtgtgtgtttgcaaaaatggcgaatgaggaaagatccagctctgacagaataatgagttgtgcaaagtgaaggccaaatgacatcaccggagatagcagtagttcaaagaaagcaaagcagaggaattgaactgctgcaaaatgcacgattcctccggcctcagatgaccaggcaccactagatacagaacactgtgctttccttctccaagtcacttcctgccttgtgaccacacacccaggcttgacaaagctgttctgcagatcagaaagaaggggttcctggtcatacaccagtactaccaaggacagcttttttcctgcaagatctgttacctaaagcaataaaaaatggccagaggatcagtgtccgatgaggaaatgatggagctcagagaagcttttgccaaagttgatactgatggcaatggatacatcagcttcaatgagttgaatgacttgttcaaggctgcttgcttgcctttgcctgggtatagagtacgagaaattacagaaaacctgatggctacaggtgatctggaccaagatggaaggatcagctttgatgagtttatcaagattttccatggcctaaaaagcacagatgttgccaagacctttagaaaagcaatcaataagaaggaagggatttgtgcaatcggtggtacttcagagcagtctagcgttggcacccaacactcctattcagaggaagaaaagtatgcctttgtcaactggataaacaaagccctggaaaatgatcctgattgtcggcatgtcatcccaatgaacccaaacacgaatgatctctttaatgctgttggagatggcattgtcctttgtaaaatgatcaacctgtcagtgccagacacaattgatgaaagaacaatcaacaaaaagaagctaacccctttcaccattcaggaaaatctgaacttggctctgaactctgcctcagccatcgggtgccatgtggtcaacataggggctgaggacctgaaggaggggaagccttatctggtcctgggacttctgtggcaagtcatcaagattgggttgtttgctgacattgaactcagcagaaatgaagctctgattgctcttttgagagaaggtgagagcctggaggatttgatgaaactctcccctgaagagctcttgctgaggtgggctaattaccacctggaaaatgcaggctgcaacaaaattggcaacttcagtactgacatcaaggactcaaaagcttattaccacctgcttgagcaggtggctccaaaaggagatgaagaaggtgttcctgctgttgttattgacatgtcaggactgcgggagaaggatgacatccagagggcagaatgcatgctgcagcaggcggagaggctgggctgccggcagtttgtcacagccacagatgttgtccgagggaaccccaagttgaacttggcttttattgccaacctctttaacagataccctgccctgcacaaaccagagaaccaggacattgactggggggctcttgaaggtgagacgagagaagagcggacatttaggaactggatgaactccctgggtgttaaccctcgagtcaatcatttgtacagtgacttatcagatgccctggtcatcttccagctctatgaaaagatcaaagttcctgttgactggaacagagtaaacaaaccgccataccccaaactgggaggcaatatgaagaagcttgagaattgtaactacgcggtagaattggggaagaatcaagcgaagttctccctggttggcatcggtggacaagatctcaatgaaggaaaccgcactctcacactggccttgatttggcagctaatgagaaggtatacactgaatatcctcgaagaaattggtggtggccagaaggtcaatgatgacattattgtcaactgggtgaatgaaacattgagggaagcagagaaaagttcatccatctctagtttcaaggacccgaagattagtacaagtctgcctgttctggacctcatcgatgccatccaaccaggttccattaactatgaccttctgaagacagaaaatctgaatgatgatgagaaactcaacaatgcaaaatatgccatctctatggcccgaaaaattggagcaagagtgtatgccctgccagaagacctggttgaagtgaaccccaaaatggtcatgaccgtgtttgcctgcctcatggggaaaggaatgaagagggtgtgaggcccaatggggctgggtgggaggcggtgcactcactcctgactgcccggcacagatgctccagggatgattcaagccattccaaagttcaacttggtgacactctataagattccaaaaagcacatattagtgcagccaagtagcctctcctgtatttaacaaaaagtgcttcattctttgcaggaggcccaacctcctatatataggtttctattcttgatttatttgcttcttcgaaaatctagaggaaaagaaagaagttattttccaggtacccttctcgcttttgccattagccaaggatagaagctgcagtggtattaattttgatataatctttcaaaccagcttcatgtggcttcccttttctttgttcaagatgagggccaggaggggaaacatcacacctgccctaaaccctgttcctggaggtcagcatttgatctgttgcaagcccctctttctgtcccctcttcctaccctgcctcccatgactttgctcctcacacttttggaaccatgccttccgggggggcccatctcttctggccgtccttgtctctgggccacttggagtgtgtgataaatcagtcaagctgttgaagtctcaggagtctctggtagcctgcagaagtaagcctcatcatcagagcctttcctcaaaactggagtcccaaatgtcatcaggttttgttttttttcagccactaagaacccctctgcttttaactctagaatttgggcttggaccagatctaacatcttgaatactctgccctctagagccttcagccttaatggaaggttggatccaaggagggtgtaatggagcatcaagccactcggcggcagcatggagctataactaagcatcctttagggttctgcctctccaggcatttagccctcacattagatctagttactgtggtatggctaatacctgtcaacatttggaggcaatcctaccttgcttttgcttctagagcttagcatatctgattgttgtcaggccatattatcaatgtttacttttttggtactataaaagctttctgccacccctaaactccaggggggaaaatatgtgccaatcaatagcacccctactcacatacacacacacctagccagctgtcaagggcagaatgaatctatgctggataagaaatggtggaactgcgttatgaagagctaatttactggacaaagaattccaaagcaaaaccagaacagtatgaatttgagcaggtctcataggttgagcaatttccccctaaaccaactgaaggctaaaaagcaacaggccattgtgaaccaatgcaagacgccctctatcatggtgaaaagctccatcaatgaggtatcttctttagtggtggtatgtaatggaacttagccatttttcaaagcaattgaaatgcattgctctggatctgttccttggcagtggactcagaaagccaacatgtggctcctcccagcccataaccagtatttttgctgcttctgaatacaaattggttggttttgacttcagattgaacttactgtagcctcagatgatttcccccctccgcctccaggaagaaagaatgttactgccttaataaaaaatgaaaagagaatgatgctcaaaatctttccaaataaaatgttccctata

SEQ ID NO: 434922 - DNA, 3901 bp, Homo sapiens
aggcgaggcgggcgccgggaggggcaggcccagcccacggtgcagcgcgcgcggagccctcgccttcctccgacgcactgtggggctgcaggggaagctgcgggccgtgggggccggaggagaagccggctccacgcgcagctgctattcctccggcctcagatgaccaggcaccactagatacagaacactgtgctttccttctccaagtcacttcctgccttgtgaccacacacccaggcttgacaaagctgttctgcagatcagaaagaaggggttcctggtcatacaccagtactaccaaggacagcttttttcctgcaagatctgttacctaaagcaataaaaaatggccagaggatcagtgtccgatgaggaaatgatggagctcagagaagcttttgccaaagttgatactgatggcaatggatacatcagcttcaatgagttgaatgacttgttcaaggctgcttgcttgcctttgcctgggtatagagtacgagaaattacagaaaacctgatggctacaggtgatctggaccaagatggaaggatcagctttgatgagtttatcaagattttccatggcctaaaaagcacagatgttgccaagacctttagaaaagcaatcaataagaaggaagggatttgtgcaatcggtggtacttcagagcagtctagcgttggcacccaacactcctattcagaggaagaaaagtatgcctttgtcaactggataaacaaagccctggaaaatgatcctgattgtcggcatgtcatcccaatgaacccaaacacgaatgatctctttaatgctgttggagatggcattgtcctttgtaaaatgatcaacctgtcagtgccagacacaattgatgaaagaacaatcaacaaaaagaagctaacccctttcaccattcaggaaaatctgaacttggctctgaactctgcctcagccatcgggtgccatgtggtcaacataggggctgaggacctgaaggaggggaagccttatctggtcctgggacttctgtggcaagtcatcaagattgggttgtttgctgacattgaactcagcagaaatgaagctctgattgctcttttgagagaaggtgagagcctggaggatttgatgaaactctcccctgaagagctcttgctgaggtgggctaattaccacctggaaaatgcaggctgcaacaaaattggcaacttcagtactgacatcaaggactcaaaagcttattaccacctgcttgagcaggtggctccaaaaggagatgaagaaggtgttcctgctgttgttattgacatgtcaggactgcgggagaaggatgacatccagagggcagaatgcatgctgcagcaggcggagaggctgggctgccggcagtttgtcacagccacagatgttgtccgagggaaccccaagttgaacttggcttttattgccaacctctttaacagataccctgccctgcacaaaccagagaaccaggacattgactggggggctcttgaaggtgagacgagagaagagcggacatttaggaactggatgaactccctgggtgttaaccctcgagtcaatcatttgtacagtgacttatcagatgccctggtcatcttccagctctatgaaaagatcaaagttcctgttgactggaacagagtaaacaaaccgccataccccaaactgggaggcaatatgaagaagcttgagaattgtaactacgcggtagaattggggaagaatcaagcgaagttctccctggttggcatcggtggacaagatctcaatgaaggaaaccgcactctcacactggccttgatttggcagctaatgagaaggtatacactgaatatcctcgaagaaattggtggtggccagaaggtcaatgatgacattattgtcaactgggtgaatgaaacattgagggaagcagagaaaagttcatccatctctagtttcaaggacccgaagattagtacaagtctgcctgttctggacctcatcgatgccatccaaccaggttccattaactatgaccttctgaagacagaaaatctgaatgatgatgagaaactcaacaatgcaaaatatgccatctctatggcccgaaaaattggagcaagagtgtatgccctgccagaagacctggttgaagtgaaccccaaaatggtcatgaccgtgtttgcctgcctcatggggaaaggaatgaagagggtgtgaggcccaatggggctgggtgggaggcggtgcactcactcctgactgcccggcacagatgctccagggatgattcaagccattccaaagttcaacttggtgacactctataagattccaaaaagcacatattagtgcagccaagtagcctctcctgtatttaacaaaaagtgcttcattctttgcaggaggcccaacctcctatatataggtttctattcttgatttatttgcttcttcgaaaatctagaggaaaagaaagaagttattttccaggtacccttctcgcttttgccattagccaaggatagaagctgcagtggtattaattttgatataatctttcaaaccagcttcatgtggcttcccttttctttgttcaagatgagggccaggaggggaaacatcacacctgccctaaaccctgttcctggaggtcagcatttgatctgttgcaagcccctctttctgtcccctcttcctaccctgcctcccatgactttgctcctcacacttttggaaccatgccttccgggggggcccatctcttctggccgtccttgtctctgggccacttggagtgtgtgataaatcagtcaagctgttgaagtctcaggagtctctggtagcctgcagaagtaagcctcatcatcagagcctttcctcaaaactggagtcccaaatgtcatcaggttttgttttttttcagccactaagaacccctctgcttttaactctagaatttgggcttggaccagatctaacatcttgaatactctgccctctagagccttcagccttaatggaaggttggatccaaggagggtgtaatggagcatcaagccactcggcggcagcatggagctataactaagcatcctttagggttctgcctctccaggcatttagccctcacattagatctagttactgtggtatggctaatacctgtcaacatttggaggcaatcctaccttgcttttgcttctagagcttagcatatctgattgttgtcaggccatattatcaatgtttacttttttggtactataaaagctttctgccacccctaaactccaggggggaaaatatgtgccaatcaatagcacccctactcacatacacacacacctagccagctgtcaagggcagaatgaatctatgctggataagaaatggtggaactgcgttatgaagagctaatttactggacaaagaattccaaagcaaaaccagaacagtatgaatttgagcaggtctcataggttgagcaatttccccctaaaccaactgaaggctaaaaagcaacaggccattgtgaaccaatgcaagacgccctctatcatggtgaaaagctccatcaatgaggtatcttctttagtggtggtatgtaatggaacttagccatttttcaaagcaattgaaatgcattgctctggatctgttccttggcagtggactcagaaagccaacatgtggctcctcccagcccataaccagtatttttgctgcttctgaatacaaattggttggttttgacttcagattgaacttactgtagcctcagatgatttcccccctccgcctccaggaagaaagaatgttactgccttaataaaaaatgaaaagagaatgatgctcaaaatctttccaaataaaatgttccctata

SEQ ID NO: 434923 - DNA, 3683 bp, Homo sapiens
gactagaacccaatcttacggctaggtacgaggcctgggtggtgaatcccttagaggggttcctggtcatacaccagtactaccaaggacagcttttttcctgcaagatctgttacctaaagcaataaaaaatggccagaggatcagtgtccgatgaggaaatgatggagctcagagaagcttttgccaaagttgatactgatggcaatggatacatcagcttcaatgagttgaatgacttgttcaaggctgcttgcttgcctttgcctgggtatagagtacgagaaattacagaaaacctgatggctacaggtgatctggaccaagatggaaggatcagctttgatgagtttatcaagattttccatggcctaaaaagcacagatgttgccaagacctttagaaaagcaatcaataagaaggaagggatttgtgcaatcggtggtacttcagagcagtctagcgttggcacccaacactcctattcagaggaagaaaagtatgcctttgtcaactggataaacaaagccctggaaaatgatcctgattgtcggcatgtcatcccaatgaacccaaacacgaatgatctctttaatgctgttggagatggcattgtcctttgtaaaatgatcaacctgtcagtgccagacacaattgatgaaagaacaatcaacaaaaagaagctaacccctttcaccattcaggaaaatctgaacttggctctgaactctgcctcagccatcgggtgccatgtggtcaacataggggctgaggacctgaaggaggggaagccttatctggtcctgggacttctgtggcaagtcatcaagattgggttgtttgctgacattgaactcagcagaaatgaagctctgattgctcttttgagagaaggtgagagcctggaggatttgatgaaactctcccctgaagagctcttgctgaggtgggctaattaccacctggaaaatgcaggctgcaacaaaattggcaacttcagtactgacatcaaggactcaaaagcttattaccacctgcttgagcaggtggctccaaaaggagatgaagaaggtgttcctgctgttgttattgacatgtcaggactgcgggagaaggatgacatccagagggcagaatgcatgctgcagcaggcggagaggctgggctgccggcagtttgtcacagccacagatgttgtccgagggaaccccaagttgaacttggcttttattgccaacctctttaacagataccctgccctgcacaaaccagagaaccaggacattgactggggggctcttgaaggtgagacgagagaagagcggacatttaggaactggatgaactccctgggtgttaaccctcgagtcaatcatttgtacagtgacttatcagatgccctggtcatcttccagctctatgaaaagatcaaagttcctgttgactggaacagagtaaacaaaccgccataccccaaactgggaggcaatatgaagaagcttgagaattgtaactacgcggtagaattggggaagaatcaagcgaagttctccctggttggcatcggtggacaagatctcaatgaaggaaaccgcactctcacactggccttgatttggcagctaatgagaaggtatacactgaatatcctcgaagaaattggtggtggccagaaggtcaatgatgacattattgtcaactgggtgaatgaaacattgagggaagcagagaaaagttcatccatctctagtttcaaggacccgaagattagtacaagtctgcctgttctggacctcatcgatgccatccaaccaggttccattaactatgaccttctgaagacagaaaatctgaatgatgatgagaaactcaacaatgcaaaatatgccatctctatggcccgaaaaattggagcaagagtgtatgccctgccagaagacctggttgaagtgaaccccaaaatggtcatgaccgtgtttgcctgcctcatggggaaaggaatgaagagggtgtgaggcccaatggggctgggtgggaggcggtgcactcactcctgactgcccggcacagatgctccagggatgattcaagccattccaaagttcaacttggtgacactctataagattccaaaaagcacatattagtgcagccaagtagcctctcctgtatttaacaaaaagtgcttcattctttgcaggaggcccaacctcctatatataggtttctattcttgatttatttgcttcttcgaaaatctagaggaaaagaaagaagttattttccaggtacccttctcgcttttgccattagccaaggatagaagctgcagtggtattaattttgatataatctttcaaaccagcttcatgtggcttcccttttctttgttcaagatgagggccaggaggggaaacatcacacctgccctaaaccctgttcctggaggtcagcatttgatctgttgcaagcccctctttctgtcccctcttcctaccctgcctcccatgactttgctcctcacacttttggaaccatgccttccgggggggcccatctcttctggccgtccttgtctctgggccacttggagtgtgtgataaatcagtcaagctgttgaagtctcaggagtctctggtagcctgcagaagtaagcctcatcatcagagcctttcctcaaaactggagtcccaaatgtcatcaggttttgttttttttcagccactaagaacccctctgcttttaactctagaatttgggcttggaccagatctaacatcttgaatactctgccctctagagccttcagccttaatggaaggttggatccaaggagggtgtaatggagcatcaagccactcggcggcagcatggagctataactaagcatcctttagggttctgcctctccaggcatttagccctcacattagatctagttactgtggtatggctaatacctgtcaacatttggaggcaatcctaccttgcttttgcttctagagcttagcatatctgattgttgtcaggccatattatcaatgtttacttttttggtactataaaagctttctgccacccctaaactccaggggggaaaatatgtgccaatcaatagcacccctactcacatacacacacacctagccagctgtcaagggcagaatgaatctatgctggataagaaatggtggaactgcgttatgaagagctaatttactggacaaagaattccaaagcaaaaccagaacagtatgaatttgagcaggtctcataggttgagcaatttccccctaaaccaactgaaggctaaaaagcaacaggccattgtgaaccaatgcaagacgccctctatcatggtgaaaagctccatcaatgaggtatcttctttagtggtggtatgtaatggaacttagccatttttcaaagcaattgaaatgcattgctctggatctgttccttggcagtggactcagaaagccaacatgtggctcctcccagcccataaccagtatttttgctgcttctgaatacaaattggttggttttgacttcagattgaacttactgtagcctcagatgatttcccccctccgcctccaggaagaaagaatgttactgccttaataaaaaatgaaaagagaatgatgctcaaaatctttccaaataaaatgttccctata

SEQ ID NO: 434924 - DNA, 3718 bp, Homo sapiens
aagacggacgacttacgctaggtacgaggcctgggtgtgctggtgacacacacccaggcttgacaaagctgttctgcagatcagaaagaaggggttcctggtcatacaccagtactaccaaggacagcttttttcctgcaagatctgttacctaaagcaataaaaaatggccagaggatcagtgtccgatgaggaaatgatggagctcagagaagcttttgccaaagttgatactgatggcaatggatacatcagcttcaatgagttgaatgacttgttcaaggctgcttgcttgcctttgcctgggtatagagtacgagaaattacagaaaacctgatggctacaggtgatctggaccaagatggaaggatcagctttgatgagtttatcaagattttccatggcctaaaaagcacagatgttgccaagacctttagaaaagcaatcaataagaaggaagggatttgtgcaatcggtggtacttcagagcagtctagcgttggcacccaacactcctattcagaggaagaaaagtatgcctttgtcaactggataaacaaagccctggaaaatgatcctgattgtcggcatgtcatcccaatgaacccaaacacgaatgatctctttaatgctgttggagatggcattgtcctttgtaaaatgatcaacctgtcagtgccagacacaattgatgaaagaacaatcaacaaaaagaagctaacccctttcaccattcaggaaaatctgaacttggctctgaactctgcctcagccatcgggtgccatgtggtcaacataggggctgaggacctgaaggaggggaagccttatctggtcctgggacttctgtggcaagtcatcaagattgggttgtttgctgacattgaactcagcagaaatgaagctctgattgctcttttgagagaaggtgagagcctggaggatttgatgaaactctcccctgaagagctcttgctgaggtgggctaattaccacctggaaaatgcaggctgcaacaaaattggcaacttcagtactgacatcaaggactcaaaagcttattaccacctgcttgagcaggtggctccaaaaggagatgaagaaggtgttcctgctgttgttattgacatgtcaggactgcgggagaaggatgacatccagagggcagaatgcatgctgcagcaggcggagaggctgggctgccggcagtttgtcacagccacagatgttgtccgagggaaccccaagttgaacttggcttttattgccaacctctttaacagataccctgccctgcacaaaccagagaaccaggacattgactggggggctcttgaaggtgagacgagagaagagcggacatttaggaactggatgaactccctgggtgttaaccctcgagtcaatcatttgtacagtgacttatcagatgccctggtcatcttccagctctatgaaaagatcaaagttcctgttgactggaacagagtaaacaaaccgccataccccaaactgggaggcaatatgaagaagcttgagaattgtaactacgcggtagaattggggaagaatcaagcgaagttctccctggttggcatcggtggacaagatctcaatgaaggaaaccgcactctcacactggccttgatttggcagctaatgagaaggtatacactgaatatcctcgaagaaattggtggtggccagaaggtcaatgatgacattattgtcaactgggtgaatgaaacattgagggaagcagagaaaagttcatccatctctagtttcaaggacccgaagattagtacaagtctgcctgttctggacctcatcgatgccatccaaccaggttccattaactatgaccttctgaagacagaaaatctgaatgatgatgagaaactcaacaatgcaaaatatgccatctctatggcccgaaaaattggagcaagagtgtatgccctgccagaagacctggttgaagtgaaccccaaaatggtcatgaccgtgtttgcctgcctcatggggaaaggaatgaagagggtgtgaggcccaatggggctgggtgggaggcggtgcactcactcctgactgcccggcacagatgctccagggatgattcaagccattccaaagttcaacttggtgacactctataagattccaaaaagcacatattagtgcagccaagtagcctctcctgtatttaacaaaaagtgcttcattctttgcaggaggcccaacctcctatatataggtttctattcttgatttatttgcttcttcgaaaatctagaggaaaagaaagaagttattttccaggtacccttctcgcttttgccattagccaaggatagaagctgcagtggtattaattttgatataatctttcaaaccagcttcatgtggcttcccttttctttgttcaagatgagggccaggaggggaaacatcacacctgccctaaaccctgttcctggaggtcagcatttgatctgttgcaagcccctctttctgtcccctcttcctaccctgcctcccatgactttgctcctcacacttttggaaccatgccttccgggggggcccatctcttctggccgtccttgtctctgggccacttggagtgtgtgataaatcagtcaagctgttgaagtctcaggagtctctggtagcctgcagaagtaagcctcatcatcagagcctttcctcaaaactggagtcccaaatgtcatcaggttttgttttttttcagccactaagaacccctctgcttttaactctagaatttgggcttggaccagatctaacatcttgaatactctgccctctagagccttcagccttaatggaaggttggatccaaggagggtgtaatggagcatcaagccactcggcggcagcatggagctataactaagcatcctttagggttctgcctctccaggcatttagccctcacattagatctagttactgtggtatggctaatacctgtcaacatttggaggcaatcctaccttgcttttgcttctagagcttagcatatctgattgttgtcaggccatattatcaatgtttacttttttggtactataaaagctttctgccacccctaaactccaggggggaaaatatgtgccaatcaatagcacccctactcacatacacacacacctagccagctgtcaagggcagaatgaatctatgctggataagaaatggtggaactgcgttatgaagagctaatttactggacaaagaattccaaagcaaaaccagaacagtatgaatttgagcaggtctcataggttgagcaatttccccctaaaccaactgaaggctaaaaagcaacaggccattgtgaaccaatgcaagacgccctctatcatggtgaaaagctccatcaatgaggtatcttctttagtggtggtatgtaatggaacttagccatttttcaaagcaattgaaatgcattgctctggatctgttccttggcagtggactcagaaagccaacatgtggctcctcccagcccataaccagtatttttgctgcttctgaatacaaattggttggttttgacttcagattgaacttactgtagcctcagatgatttcccccctccgcctccaggaagaaagaatgttactgccttaataaaaaatgaaaagagaatgatgctcaaaatctttccaaataaaatgttccctata

SEQ ID NO: 434925 - DNA, 3788 bp, Homo sapiens
tttttctttcctggctgatgatttgtcattctagtcacttcctgccttgtgaccacacacccaggcttgacaaagctgttctgcagatcagaaagaaggggttcctggtcatacaccagtactaccaaggacagcttttttcctgcaagatctgttacctaaagcaataaaaaatggccagaggatcagtgtccgatgaggaaatgatggagctcagagaagcttttgccaaagttgatactgatggcaatggatacatcagcttcaatgagttgaatgacttgttcaaggctgcttgcttgcctttgcctgggtatagagtacgagaaattacagaaaacctgatggctacaggtgatctggaccaagatggaaggatcagctttgatgagtttatcaagattttccatggcctaaaaagcacagatgttgccaagacctttagaaaagcaatcaataagaaggaagggatttgtgcaatcggtggtacttcagagcagtctagcgttggcacccaacactcctattcagaggaagaaaagtatgcctttgtcaactggataaacaaagccctggaaaatgatcctgattgtcggcatgtcatcccaatgaacccaaacacgaatgatctctttaatgctgttggagatggcattgtcctttgtaaaatgatcaacctgtcagtgccagacacaattgatgaaagaacaatcaacaaaaagaagctaacccctttcaccattcaggaaaatctgaacttggctctgaactctgcctcagccatcgggtgccatgtggtcaacataggggctgaggacctgaaggaggggaagccttatctggtcctgggacttctgtggcaagtcatcaagattgggttgtttgctgacattgaactcagcagaaatgaagctctgattgctcttttgagagaaggtgagagcctggaggatttgatgaaactctcccctgaagagctcttgctgaggtgggctaattaccacctggaaaatgcaggctgcaacaaaattggcaacttcagtactgacatcaaggactcaaaagcttattaccacctgcttgagcaggtggctccaaaaggagatgaagaaggtgttcctgctgttgttattgacatgtcaggactgcgggagaaggatgacatccagagggcagaatgcatgctgcagcaggcggagaggctgggctgccggcagtttgtcacagccacagatgttgtccgagggaaccccaagttgaacttggcttttattgccaacctctttaacagataccctgccctgcacaaaccagagaaccaggacattgactggggggctcttgaaggtgagacgagagaagagcggacatttaggaactggatgaactccctgggtgttaaccctcgagtcaatcatttgtacagtgacttatcagatgccctggtcatcttccagctctatgaaaagatcaaagttcctgttgactggaacagagtaaacaaaccgccataccccaaactgggaggcaatatgaagaagcttgagaattgtaactacgcggtagaattggggaagaatcaagcgaagttctccctggttggcatcggtggacaagatctcaatgaaggaaaccgcactctcacactggccttgatttggcagctaatgagaaggtatacactgaatatcctcgaagaaattggtggtggccagaaggtcaatgatgacattattgtcaactgggtgaatgaaacattgagggaagcagagaaaagttcatccatctctagtttcaaggacccgaagattagtacaagtctgcctgttctggacctcatcgatgccatccaaccaggttccattaactatgaccttctgaagacagaaaatctgaatgatgatgagaaactcaacaatgcaaaatatgccatctctatggcccgaaaaattggagcaagagtgtatgccctgccagaagacctggttgaagtgaaccccaaaatggtcatgaccgtgtttgcctgcctcatggggaaaggaatgaagagggtgtgaggcccaatggggctgggtgggaggcggtgcactcactcctgactgcccggcacagatgctccagggatgattcaagccattccaaagttcaacttggtgacactctataagattccaaaaagcacatattagtgcagccaagtagcctctcctgtatttaacaaaaagtgcttcattctttgcaggaggcccaacctcctatatataggtttctattcttgatttatttgcttcttcgaaaatctagaggaaaagaaagaagttattttccaggtacccttctcgcttttgccattagccaaggatagaagctgcagtggtattaattttgatataatctttcaaaccagcttcatgtggcttcccttttctttgttcaagatgagggccaggaggggaaacatcacacctgccctaaaccctgttcctggaggtcagcatttgatctgttgcaagcccctctttctgtcccctcttcctaccctgcctcccatgactttgctcctcacacttttggaaccatgccttccgggggggcccatctcttctggccgtccttgtctctgggccacttggagtgtgtgataaatcagtcaagctgttgaagtctcaggagtctctggtagcctgcagaagtaagcctcatcatcagagcctttcctcaaaactggagtcccaaatgtcatcaggttttgttttttttcagccactaagaacccctctgcttttaactctagaatttgggcttggaccagatctaacatcttgaatactctgccctctagagccttcagccttaatggaaggttggatccaaggagggtgtaatggagcatcaagccactcggcggcagcatggagctataactaagcatcctttagggttctgcctctccaggcatttagccctcacattagatctagttactgtggtatggctaatacctgtcaacatttggaggcaatcctaccttgcttttgcttctagagcttagcatatctgattgttgtcaggccatattatcaatgtttacttttttggtactataaaagctttctgccacccctaaactccaggggggaaaatatgtgccaatcaatagcacccctactcacatacacacacacctagccagctgtcaagggcagaatgaatctatgctggataagaaatggtggaactgcgttatgaagagctaatttactggacaaagaattccaaagcaaaaccagaacagtatgaatttgagcaggtctcataggttgagcaatttccccctaaaccaactgaaggctaaaaagcaacaggccattgtgaaccaatgcaagacgccctctatcatggtgaaaagctccatcaatgaggtatcttctttagtggtggtatgtaatggaacttagccatttttcaaagcaattgaaatgcattgctctggatctgttccttggcagtggactcagaaagccaacatgtggctcctcccagcccataaccagtatttttgctgcttctgaatacaaattggttggttttgacttcagattgaacttactgtagcctcagatgatttcccccctccgcctccaggaagaaagaatgttactgccttaataaaaaatgaaaagagaatgatgctcaaaatctttccaaataaaatgttccctataaaaaaaaaaaaaaaaaaaaaaaaaaaaaagggggggggcaaaaagaaccccggggggggccca

SEQ ID NO: 434926 - DNA, 3841 bp, Homo sapiens
tttttctttcctggctgatgatttgtcattctagtcacttcctgccttgtgaccacacacccaggcttgacaaagctgttctgcagatcagaaagaaggggttcctggtcatacaccagtactaccaaggacagcttttttcctgcaagatctgttacctaaagcaataaaaaatggccagaggatcagtgtccgatgaggaaatgatggagctcagagaagcttttgccaaagttgatactgatggcaatggatacatcagcttcaatgagttgaatgacttgttcaaggctgcttgcttgcctttgcctgggtatagagtacgagaaattacagaaaacctgatggctacaggtgatctggaccaagatggaaggatcagctttgatgagtttatcaagattttccatggcctaaaaagcacagatgttgccaagacctttagaaaagcaatcaataagaaggaagggatttgtgcaatcggtggtacttcagagcagtctagcgttggcacccaacactcctattcagaggaagaaaagtatgcctttgtcaactggataaacaaagccctggaaaatgatcctgattgtcggcatgtcatcccaatgaacccaaacacgaatgatctctttaatgctgttggagatggcattgtcctttgtaaaatgatcaacctgtcagtgccagacacaattgatgaaagaacaatcaacaaaaagaagctaacccctttcaccattcaggaaaatctgaacttggctctgaactctgcctcagccatcgggtgccatgtggtcaacataggggctgaggacctgaaggaggggaagccttatctggtcctgggacttctgtggcaagtcatcaagattgggttgtttgctgacattgaactcagcagaaatgaagctctgattgctcttttgagagaaggtgagagcctggaggatttgatgaaactctcccctgaagagctcttgctgaggtgggctaattaccacctggaaaatgcaggctgcaacaaaattggcaacttcagtactgacatcaaggactcaaaagcttattaccacctgcttgagcaggtggctccaaaaggagatgaagaaggtgttcctgctgttgttattgacatgtcaggactgcgggagaaggatgacatccagagggcagaatgcatgctgcagcaggcggagaggctgggctgccggcagtttgtcacagccacagatgttgtccgagggaaccccaagttgaacttggcttttattgccaacctctttaacagataccctgccctgcacaaaccagagaaccaggacattgactggggggctcttgaaggtgagacgagagaagagcggacatttaggaactggatgaactccctgggtgttaaccctcgagtcaatcatttgtacagtgacttatcagatgccctggtcatcttccagctctatgaaaagatcaaagttcctgttgactggaacagagtaaacaaaccgccataccccaaactgggaggcaatatgaagaagcttgagaattgtaactacgcggtagaattggggaagaatcaagcgaagttctccctggttggcatcggtggacaagatctcaatgaaggaaaccgcactctcacactggccttgatttggcagctaatgagaaggtatacactgaatatcctcgaagaaattggtggtggccagaaggtcaatgatgacattattgtcaactgggtgaatgaaacattgagggaagcagagaaaagttcatccatctctagtttcaaggacccgaagattagtacaagtctgcctgttctggacctcatcgatgccatccaaccaggttccattaactatgaccttctgaagacagaaaatctgaatgatgatgagaaactcaacaatgcaaaatatgccatctctatggcccgaaaaattggagcaagagtgtatgccctgccagaagacctggttgaagtgaaccccaaaatggtcatgaccgtgtttgcctgcctcatggggaaaggaatgaagagggtgtgaggcccaatggggctgggtgggaggcggtgcactcactcctgactgcccggcacagatgctccagggatgattcaagccattccaaagttcaacttggtgacactctataagattccaaaaagcacatattagtgcagccaagtagcctctcctgtatttaacaaaaagtgcttcattctttgcaggaggcccaacctcctatatataggtttctattcttgatttatttgcttcttcgaaaatctagaggaaaagaaagaagttattttccaggtacccttctcgcttttgccattagccaaggatagaagctgcagtggtattaattttgatataatctttcaaaccagcttcatgtggcttcccttttctttgttcaagatgagggccaggaggggaaacatcacacctgccctaaaccctgttcctggaggtcagcatttgatctgttgcaagcccctctttctgtcccctcttcctaccctgcctcccatgactttgctcctcacacttttggaaccatgccttccgggggggcccatctcttctggccgtccttgtctctgggccacttggagtgtgtgataaatcagtcaagctgttgaagtctcaggagtctctggtagcctgcagaagtaagcctcatcatcagagcctttcctcaaaactggagtcccaaatgtcatcaggttttgttttttttcagccactaagaacccctctgcttttaactctagaatttgggcttggaccagatctaacatcttgaatactctgccctctagagccttcagccttaatggaaggttggatccaaggagggtgtaatggagcatcaagccactcggcggcagcatggagctataactaagcatcctttagggttctgcctctccaggcatttagccctcacattagatctagttactgtggtatggctaatacctgtcaacatttggaggcaatcctaccttgcttttgcttctagagcttagcatatctgattgttgtcaggccatattatcaatgtttacttttttggtactataaaagctttctgccacccctaaactccaggggggaaaatatgtgccaatcaatagcacccctactcacatacacacacacctagccagctgtcaagggcagaatgaatctatgctggataagaaatggtggaactgcgttatgaagagctaatttactggacaaagaattccaaagcaaaaccagaacagtatgaatttgagcaggtctcataggttgagcaatttccccctaaaccaactgaaggctaaaaagcaacaggccattgtgaaccaatgcaagacgccctctatcatggtgaaaagctccatcaatgaggtatcttctttagtggtggtatgtaatggaacttagccatttttcaaagcaattgaaatgcattgctctggatctgttccttggcagtggactcagaaagccaacatgtggctcctcccagcccataaccagtatttttgctgcttctgaatacaaattggttggttttgacttcagattgaacttactgtagcctcagatgatttcccccctccgcctccaggaagaaagaatgttactgccttaataaaaaatgaaaagagaatgatgctcaaaatctttccaaataaaatgttccctataaaaaaaaaaaaaaaaaaaaaaaaaaaaaaggaaaaaaaaaaaaaaaaaaaaaaaaaaaaaaaaaaaaaaaaaaaaaaaaagggggggggggcaaaaagaaccccggggggggccca

SEQ ID NO: 434927 - DNA, 3810 bp, Homo sapiens
tttttctttcctggctgatgatttgtcattctagtcacttcctgccttgtgaccacacacccaggcttgacaaagctgttctgcagatcagaaagaaggggttcctggtcatacaccagtactaccaaggacagcttttttcctgcaagatctgttacctaaagcaataaaaaatggccagaggatcagtgtccgatgaggaaatgatggagctcagagaagcttttgccaaagttgatactgatggcaatggatacatcagcttcaatgagttgaatgacttgttcaaggctgcttgcttgcctttgcctgggtatagagtacgagaaattacagaaaacctgatggctacaggtgatctggaccaagatggaaggatcagctttgatgagtttatcaagattttccatggcctaaaaagcacagatgttgccaagacctttagaaaagcaatcaataagaaggaagggatttgtgcaatcggtggtacttcagagcagtctagcgttggcacccaacactcctattcagaggaagaaaagtatgcctttgtcaactggataaacaaagccctggaaaatgatcctgattgtcggcatgtcatcccaatgaacccaaacacgaatgatctctttaatgctgttggagatggcattgtcctttgtaaaatgatcaacctgtcagtgccagacacaattgatgaaagaacaatcaacaaaaagaagctaacccctttcaccattcaggaaaatctgaacttggctctgaactctgcctcagccatcgggtgccatgtggtcaacataggggctgaggacctgaaggaggggaagccttatctggtcctgggacttctgtggcaagtcatcaagattgggttgtttgctgacattgaactcagcagaaatgaagctctgattgctcttttgagagaaggtgagagcctggaggatttgatgaaactctcccctgaagagctcttgctgaggtgggctaattaccacctggaaaatgcaggctgcaacaaaattggcaacttcagtactgacatcaaggactcaaaagcttattaccacctgcttgagcaggtggctccaaaaggagatgaagaaggtgttcctgctgttgttattgacatgtcaggactgcgggagaaggatgacatccagagggcagaatgcatgctgcagcaggcggagaggctgggctgccggcagtttgtcacagccacagatgttgtccgagggaaccccaagttgaacttggcttttattgccaacctctttaacagataccctgccctgcacaaaccagagaaccaggacattgactggggggctcttgaaggtgagacgagagaagagcggacatttaggaactggatgaactccctgggtgttaaccctcgagtcaatcatttgtacagtgacttatcagatgccctggtcatcttccagctctatgaaaagatcaaagttcctgttgactggaacagagtaaacaaaccgccataccccaaactgggaggcaatatgaagaagcttgagaattgtaactacgcggtagaattggggaagaatcaagcgaagttctccctggttggcatcggtggacaagatctcaatgaaggaaaccgcactctcacactggccttgatttggcagctaatgagaaggtatacactgaatatcctcgaagaaattggtggtggccagaaggtcaatgatgacattattgtcaactgggtgaatgaaacattgagggaagcagagaaaagttcatccatctctagtttcaaggacccgaagattagtacaagtctgcctgttctggacctcatcgatgccatccaaccaggttccattaactatgaccttctgaagacagaaaatctgaatgatgatgagaaactcaacaatgcaaaatatgccatctctatggcccgaaaaattggagcaagagtgtatgccctgccagaagacctggttgaagtgaaccccaaaatggtcatgaccgtgtttgcctgcctcatggggaaaggaatgaagagggtgtgaggcccaatggggctgggtgggaggcggtgcactcactcctgactgcccggcacagatgctccagggatgattcaagccattccaaagttcaacttggtgacactctataagattccaaaaagcacatattagtgcagccaagtagcctctcctgtatttaacaaaaagtgcttcattctttgcaggaggcccaacctcctatatataggtttctattcttgatttatttgcttcttcgaaaatctagaggaaaagaaagaagttattttccaggtacccttctcgcttttgccattagccaaggatagaagctgcagtggtattaattttgatataatctttcaaaccagcttcatgtggcttcccttttctttgttcaagatgagggccaggaggggaaacatcacacctgccctaaaccctgttcctggaggtcagcatttgatctgttgcaagcccctctttctgtcccctcttcctaccctgcctcccatgactttgctcctcacacttttggaaccatgccttccgggggggcccatctcttctggccgtccttgtctctgggccacttggagtgtgtgataaatcagtcaagctgttgaagtctcaggagtctctggtagcctgcagaagtaagcctcatcatcagagcctttcctcaaaactggagtcccaaatgtcatcaggttttgttttttttcagccactaagaacccctctgcttttaactctagaatttgggcttggaccagatctaacatcttgaatactctgccctctagagccttcagccttaatggaaggttggatccaaggagggtgtaatggagcatcaagccactcggcggcagcatggagctataactaagcatcctttagggttctgcctctccaggcatttagccctcacattagatctagttactgtggtatggctaatacctgtcaacatttggaggcaatcctaccttgcttttgcttctagagcttagcatatctgattgttgtcaggccatattatcaatgtttacttttttggtactataaaagctttctgccacccctaaactccaggggggaaaatatgtgccaatcaatagcacccctactcacatacacacacacctagccagctgtcaagggcagaatgaatctatgctggataagaaatggtggaactgcgttatgaagagctaatttactggacaaagaattccaaagcaaaaccagaacagtatgaatttgagcaggtctcataggttgagcaatttccccctaaaccaactgaaggctaaaaagcaacaggccattgtgaaccaatgcaagacgccctctatcatggtgaaaagctccatcaatgaggtatcttctttagtggtggtatgtaatggaacttagccatttttcaaagcaattgaaatgcattgctctggatctgttccttggcagtggactcagaaagccaacatgtggctcctcccagcccataaccagtatttttgctgcttctgaatacaaattggttggttttgacttcagattgaacttactgtagcctcagatgatttcccccctccgcctccaggaagaaagaatgttactgccttaataaaaaatgaaaagagaatgatgctcaaaatctttccaaataaaatgttccctataaaaaaaaaaaaaaaaaaaaaaaaaaaaaaaaaaaaaaaaaaaaaaaaaagggggggggggcaaaaagaaccccggggggggccca

SEQ ID NO: 434928 - DNA, 3598 bp, Homo sapiens
tttttctttcctggctgatgatttgtcattctagtcacttcctgccttgtgaccacacacccaggcttgacaaagctgttctgcagatcagaaagaaggggttcctggtcatacaccagtactaccaaggacagcttttttcctgcaagatctgttacctaaagcaataaaaaatggccagaggatcagtgtccgatgaggaaatgatggagctcagagaagcttttgccaaagttgatactgatggcaatggatacatcagcttcaatgagttgaatgacttgttcaaggctgcttgcttgcctttgcctgggtatagagtacgagaaattacagaaaacctgatggctacaggtgatctggaccaagatggaaggatcagctttgatgagtttatcaagattttccatggcctaaaaagcacagatgttgccaagacctttagaaaagcaatcaataagaaggaagggatttgtgcaatcggtggtacttcagagcagtctagcgttggcacccaacactcctattcagaggaagaaaagtatgcctttgtcaactggataaacaaagccctggaaaatgatcctgattgtcggcatgtcatcccaatgaacccaaacacgaatgatctctttaatgctgttggagatggcattgtcctttgtaaaatgatcaacctgtcagtgccagacacaattgatgaaagaacaatcaacaaaaagaagctaacccctttcaccattcaggaaaatctgaacttggctctgaactctgcctcagccatcgggtgccatgtggtcaacataggggctgaggacctgaaggaggggaagccttatctggtcctgggacttctgtggcaagtcatcaagattgggttgtttgctgacattgaactcagcagaaatgaagctctgattgctcttttgagagaaggtgagagcctggaggatttgatgaaactctcccctgaagagctcttgctgaggtgggctaattaccacctggaaaatgcaggctgcaacaaaattggcaacttcagtactgacatcaaggactcaaaagcttattaccacctgcttgagcaggtggctccaaaaggagatgaagaaggtgttcctgctgttgttattgacatgtcaggactgcgggagaaggatgacatccagagggcagaatgcatgctgcagcaggcggagaggctgggctgccggcagtttgtcacagccacagatgttgtccgagggaaccccaagttgaacttggcttttattgccaacctctttaacagataccctgccctgcacaaaccagagaaccaggacattgactggggggctcttgaaggtgagacgagagaagagcggacatttaggaactggatgaactccctgggtgttaaccctcgagtcaatcatttgtacagtgacttatcagatgccctggtcatcttccagctctatgaaaagatcaaagttcctgttgactggaacagagtaaacaaaccgccattctcacactggccttgatttggcagctaatgagaaggtatacactgaatatcctcgaagaaattggtggtggccagaaggtcaatgatgacattattgtcaactgggtgaatgaaacattgagggaagcagagaaaagttcatccatctctagtttcaaggacccgaagattagtacaagtctgcctgttctggacctcatcgatgccatccaaccaggttccattaactatgaccttctgaagacagaaaatctgaatgatgatgagaaactcaacaatgcaaaatatgccatctctatggcccgaaaaattggagcaagagtgtatgccctgccagaagacctggttgaagtgaaccccaaaatggtcatgaccgtgtttgcctgcctcatggggaaaggaatgaagagggtgtgaggcccaatggggctgggtgggaggcggtgcactcactcctgactgcccggcacagatgctccagggatgattcaagccattccaaagttcaacttggtgacactctataagattccaaaaagcacatattagtgcagccaagtagcctctcctgtatttaacaaaaagtgcttcattctttgcaggaggcccaacctcctatatataggtttctattcttgatttatttgcttcttcgaaaatctagaggaaaagaaagaagttattttccaggtacccttctcgcttttgccattagccaaggatagaagctgcagtggtattaattttgatataatctttcaaaccagcttcatgtggcttcccttttctttgttcaagatgagggccaggaggggaaacatcacacctgccctaaaccctgttcctggaggtcagcatttgatctgttgcaagcccctctttctgtcccctcttcctaccctgcctcccatgactttgctcctcacacttttggaaccatgccttccgggggggcccatctcttctggccgtccttgtctctgggccacttggagtgtgtgataaatcagtcaagctgttgaagtctcaggagtctctggtagcctgcagaagtaagcctcatcatcagagcctttcctcaaaactggagtcccaaatgtcatcaggttttgttttttttcagccactaagaacccctctgcttttaactctagaatttgggcttggaccagatctaacatcttgaatactctgccctctagagccttcagccttaatggaaggttggatccaaggagggtgtaatggagcatcaagccactcggcggcagcatggagctataactaagcatcctttagggttctgcctctccaggcatttagccctcacattagatctagttactgtggtatggctaatacctgtcaacatttggaggcaatcctaccttgcttttgcttctagagcttagcatatctgattgttgtcaggccatattatcaatgtttacttttttggtactataaaagctttctgccacccctaaactccaggggggaaaatatgtgccaatcaatagcacccctactcacatacacacacacctagccagctgtcaagggcagaatgaatctatgctggataagaaatggtggaactgcgttatgaagagctaatttactggacaaagaattccaaagcaaaaccagaacagtatgaatttgagcaggtctcataggttgagcaatttccccctaaaccaactgaaggctaaaaagcaacaggccattgtgaaccaatgcaagacgccctctatcatggtgaaaagctccatcaatgaggtatcttctttagtggtggtatgtaatggaacttagccatttttcaaagcaattgaaatgcattgctctggatctgttccttggcagtggactcagaaagccaacatgtggctcctcccagcccataaccagtatttttgctgcttctgaatacaaattggttggttttgacttcagattgaacttactgtagcctcagatgatttcccccctccgcctccaggaagaaagaatgttactgccttaataaaaaatgaaaagagaatgatgctcaaaatctttccaaataaaatgttccctata

SEQ ID NO: 434929 - DNA, 3633 bp, Homo sapiens
atctgcctggggccagtgaggagaatgcatctagacagagcttttcgtgctgctgagatctgttacctaaagcaataaaaaatggccagaggatcagtgtccgatgaggaaatgatggagctcagagaagcttttgccaaagttgatactgatggcaatggatacatcagcttcaatgagttgaatgacttgttcaaggctgcttgcttgcctttgcctgggtatagagtacgagaaattacagaaaacctgatggctacaggtgatctggaccaagatggaaggatcagctttgatgagtttatcaagattttccatggcctaaaaagcacagatgttgccaagacctttagaaaagcaatcaataagaaggaagggatttgtgcaatcggtggtacttcagagcagtctagcgttggcacccaacactcctattcagaggaagaaaagtatgcctttgtcaactggataaacaaagccctggaaaatgatcctgattgtcggcatgtcatcccaatgaacccaaacacgaatgatctctttaatgctgttggagatggcattgtcctttgtaaaatgatcaacctgtcagtgccagacacaattgatgaaagaacaatcaacaaaaagaagctaacccctttcaccattcaggaaaatctgaacttggctctgaactctgcctcagccatcgggtgccatgtggtcaacataggggctgaggacctgaaggaggggaagccttatctggtcctgggacttctgtggcaagtcatcaagattgggttgtttgctgacattgaactcagcagaaatgaagctctgattgctcttttgagagaaggtgagagcctggaggatttgatgaaactctcccctgaagagctcttgctgaggtgggctaattaccacctggaaaatgcaggctgcaacaaaattggcaacttcagtactgacatcaaggactcaaaagcttattaccacctgcttgagcaggtggctccaaaaggagatgaagaaggtgttcctgctgttgttattgacatgtcaggactgcgggagaaggatgacatccagagggcagaatgcatgctgcagcaggcggagaggctgggctgccggcagtttgtcacagccacagatgttgtccgagggaaccccaagttgaacttggcttttattgccaacctctttaacagataccctgccctgcacaaaccagagaaccaggacattgactggggggctcttgaaggtgagacgagagaagagcggacatttaggaactggatgaactccctgggtgttaaccctcgagtcaatcatttgtacagtgacttatcagatgccctggtcatcttccagctctatgaaaagatcaaagttcctgttgactggaacagagtaaacaaaccgccataccccaaactgggaggcaatatgaagaagcttgagaattgtaactacgcggtagaattggggaagaatcaagcgaagttctccctggttggcatcggtggacaagatctcaatgaaggaaaccgcactctcacactggccttgatttggcagctaatgagaaggtatacactgaatatcctcgaagaaattggtggtggccagaaggtcaatgatgacattattgtcaactgggtgaatgaaacattgagggaagcagagaaaagttcatccatctctagtttcaaggacccgaagattagtacaagtctgcctgttctggacctcatcgatgccatccaaccaggttccattaactatgaccttctgaagacagaaaatctgaatgatgatgagaaactcaacaatgcaaaatatgccatctctatggcccgaaaaattggagcaagagtgtatgccctgccagaagacctggttgaagtgaaccccaaaatggtcatgaccgtgtttgcctgcctcatggggaaaggaatgaagagggtgtgaggcccaatggggctgggtgggaggcggtgcactcactcctgactgcccggcacagatgctccagggatgattcaagccattccaaagttcaacttggtgacactctataagattccaaaaagcacatattagtgcagccaagtagcctctcctgtatttaacaaaaagtgcttcattctttgcaggaggcccaacctcctatatataggtttctattcttgatttatttgcttcttcgaaaatctagaggaaaagaaagaagttattttccaggtacccttctcgcttttgccattagccaaggatagaagctgcagtggtattaattttgatataatctttcaaaccagcttcatgtggcttcccttttctttgttcaagatgagggccaggaggggaaacatcacacctgccctaaaccctgttcctggaggtcagcatttgatctgttgcaagcccctctttctgtcccctcttcctaccctgcctcccatgactttgctcctcacacttttggaaccatgccttccgggggggcccatctcttctggccgtccttgtctctgggccacttggagtgtgtgataaatcagtcaagctgttgaagtctcaggagtctctggtagcctgcagaagtaagcctcatcatcagagcctttcctcaaaactggagtcccaaatgtcatcaggttttgttttttttcagccactaagaacccctctgcttttaactctagaatttgggcttggaccagatctaacatcttgaatactctgccctctagagccttcagccttaatggaaggttggatccaaggagggtgtaatggagcatcaagccactcggcggcagcatggagctataactaagcatcctttagggttctgcctctccaggcatttagccctcacattagatctagttactgtggtatggctaatacctgtcaacatttggaggcaatcctaccttgcttttgcttctagagcttagcatatctgattgttgtcaggccatattatcaatgtttacttttttggtactataaaagctttctgccacccctaaactccaggggggaaaatatgtgccaatcaatagcacccctactcacatacacacacacctagccagctgtcaagggcagaatgaatctatgctggataagaaatggtggaactgcgttatgaagagctaatttactggacaaagaattccaaagcaaaaccagaacagtatgaatttgagcaggtctcataggttgagcaatttccccctaaaccaactgaaggctaaaaagcaacaggccattgtgaaccaatgcaagacgccctctatcatggtgaaaagctccatcaatgaggtatcttctttagtggtggtatgtaatggaacttagccatttttcaaagcaattgaaatgcattgctctggatctgttccttggcagtggactcagaaagccaacatgtggctcctcccagcccataaccagtatttttgctgcttctgaatacaaattggttggttttgacttcagattgaacttactgtagcctcagatgatttcccccctccgcctccaggaagaaagaatgttactgccttaataaaaaatgaaaagagaatgatgctcaaaatctttccaaataaaatgttccctata

SEQ ID NO: 434930 - DNA, 3551 bp, Homo sapiens
gagaatcgcgtgtccgattgaggatgatcgatgactctcaaacccacgcgtctgccaaagttgatactgatggcaatggatacatcagcttcaatgagttgaatgacttgttcaaggctgcttgcttgcctttgcctgggtatagagtacgagaaattacagaaaacctgatggctacaggtgatctggaccaagatggaaggatcagctttgatgagtttatcaagattttccatggcctaaaaagcacagatgttgccaagacctttagaaaagcaatcaataagaaggaagggatttgtgcaatcggtggtacttcagagcagtctagcgttggcacccaacactcctattcagaggaagaaaagtatgcctttgtcaactggataaacaaagccctggaaaatgatcctgattgtcggcatgtcatcccaatgaacccaaacacgaatgatctctttaatgctgttggagatggcattgtcctttgtaaaatgatcaacctgtcagtgccagacacaattgatgaaagaacaatcaacaaaaagaagctaacccctttcaccattcaggaaaatctgaacttggctctgaactctgcctcagccatcgggtgccatgtggtcaacataggggctgaggacctgaaggaggggaagccttatctggtcctgggacttctgtggcaagtcatcaagattgggttgtttgctgacattgaactcagcagaaatgaagctctgattgctcttttgagagaaggtgagagcctggaggatttgatgaaactctcccctgaagagctcttgctgaggtgggctaattaccacctggaaaatgcaggctgcaacaaaattggcaacttcagtactgacatcaaggactcaaaagcttattaccacctgcttgagcaggtggctccaaaaggagatgaagaaggtgttcctgctgttgttattgacatgtcaggactgcgggagaaggatgacatccagagggcagaatgcatgctgcagcaggcggagaggctgggctgccggcagtttgtcacagccacagatgttgtccgagggaaccccaagttgaacttggcttttattgccaacctctttaacagataccctgccctgcacaaaccagagaaccaggacattgactggggggctcttgaaggtgagacgagagaagagcggacatttaggaactggatgaactccctgggtgttaaccctcgagtcaatcatttgtacagtgacttatcagatgccctggtcatcttccagctctatgaaaagatcaaagttcctgttgactggaacagagtaaacaaaccgccataccccaaactgggaggcaatatgaagaagcttgagaattgtaactacgcggtagaattggggaagaatcaagcgaagttctccctggttggcatcggtggacaagatctcaatgaaggaaaccgcactctcacactggccttgatttggcagctaatgagaaggtatacactgaatatcctcgaagaaattggtggtggccagaaggtcaatgatgacattattgtcaactgggtgaatgaaacattgagggaagcagagaaaagttcatccatctctagtttcaaggacccgaagattagtacaagtctgcctgttctggacctcatcgatgccatccaaccaggttccattaactatgaccttctgaagacagaaaatctgaatgatgatgagaaactcaacaatgcaaaatatgccatctctatggcccgaaaaattggagcaagagtgtatgccctgccagaagacctggttgaagtgaaccccaaaatggtcatgaccgtgtttgcctgcctcatggggaaaggaatgaagagggtgtgaggcccaatggggctgggtgggaggcggtgcactcactcctgactgcccggcacagatgctccagggatgattcaagccattccaaagttcaacttggtgacactctataagattccaaaaagcacatattagtgcagccaagtagcctctcctgtatttaacaaaaagtgcttcattctttgcaggaggcccaacctcctatatataggtttctattcttgatttatttgcttcttcgaaaatctagaggaaaagaaagaagttattttccaggtacccttctcgcttttgccattagccaaggatagaagctgcagtggtattaattttgatataatctttcaaaccagcttcatgtggcttcccttttctttgttcaagatgagggccaggaggggaaacatcacacctgccctaaaccctgttcctggaggtcagcatttgatctgttgcaagcccctctttctgtcccctcttcctaccctgcctcccatgactttgctcctcacacttttggaaccatgccttccgggggggcccatctcttctggccgtccttgtctctgggccacttggagtgtgtgataaatcagtcaagctgttgaagtctcaggagtctctggtagcctgcagaagtaagcctcatcatcagagcctttcctcaaaactggagtcccaaatgtcatcaggttttgttttttttcagccactaagaacccctctgcttttaactctagaatttgggcttggaccagatctaacatcttgaatactctgccctctagagccttcagccttaatggaaggttggatccaaggagggtgtaatggagcatcaagccactcggcggcagcatggagctataactaagcatcctttagggttctgcctctccaggcatttagccctcacattagatctagttactgtggtatggctaatacctgtcaacatttggaggcaatcctaccttgcttttgcttctagagcttagcatatctgattgttgtcaggccatattatcaatgtttacttttttggtactataaaagctttctgccacccctaaactccaggggggaaaatatgtgccaatcaatagcacccctactcacatacacacacacctagccagctgtcaagggcagaatgaatctatgctggataagaaatggtggaactgcgttatgaagagctaatttactggacaaagaattccaaagcaaaaccagaacagtatgaatttgagcaggtctcataggttgagcaatttccccctaaaccaactgaaggctaaaaagcaacaggccattgtgaaccaatgcaagacgccctctatcatggtgaaaagctccatcaatgaggtatcttctttagtggtggtatgtaatggaacttagccatttttcaaagcaattgaaatgcattgctctggatctgttccttggcagtggactcagaaagccaacatgtggctcctcccagcccataaccagtatttttgctgcttctgaatacaaattggttggttttgacttcagattgaacttactgtagcctcagatgatttcccccctccgcctccaggaagaaagaatgttactgccttaataaaaaatgaaaagagaatgatgctcaaaatctttccaaataaaatgttccctata

SEQ ID NO: 434931 - DNA, 3727 bp, Homo sapiens
tttttctttcctggctgatgatttgtcattctagtcacttcctgccttgtgaccacacacccaggcttgacaaagctgttctgcagatcagaaagaaggggttcctggtcatacaccagtactaccaaggacagcttttttcctgcaagatctgttacctaaagcaataaaaaatggccagaggatcagtgtccgatgaggaaatgatggagctcagagaagcttttgccaaagttgatactgatggcaatggatacatcagcttcaatgagttgaatgacttgttcaaggctgcttgcttgcctttgcctgggtatagagtacgagaaattacagaaaacctgatggctacaggtgatctggaccaagatggaaggatcagctttgatgagtttatcaagattttccatggcctaaaaagcacagatgttgccaagacctttagaaaagcaatcaataagaaggaagggatttgtgcaatcggtggtacttcagagcagtctagcgttggcacccaacactcctattcagaggaagaaaagtatgcctttgtcaactggataaacaaagccctggaaaatgatcctgattgtcggcatgtcatcccaatgaacccaaacacgaatgatctctttaatgctgttggagatggcattgtcctttgtaaaatgatcaacctgtcagtgccagacacaattgatgaaagaacaatcaacaaaaagaagctaacccctttcaccattcaggaaaatctgaacttggctctgaactctgcctcagccatcgggtgccatgtggtcaacataggggctgaggacctgaaggaggggaagccttatctggtcctgggacttctgtggcaagtcatcaagattgggttgtttgctgacattgaactcagcagaaatgaagctctgattgctcttttgagagaaggtgagagcctggaggatttgatgaaactctcccctgaagagctcttgctgaggtgggctaattaccacctggaaaatgcaggctgcaacaaaattggcaacttcagtactgacatcaaggactcaaaagcttattaccacctgcttgagcaggtggctccaaaaggagatgaagaaggtgttcctgctgttgttattgacatgtcaggactgcgggagaaggatgacatccagagggcagaatgcatgctgcagcaggcggagaggctgggctgccggcagtttgtcacagccacagatgttgtccgagggaaccccaagttgaacttggcttttattgccaacctctttaacagataccctgccctgcacaaaccagagaaccaggacattgactggggggctcttgaaggtgagacgagagaagagcggacatttaggaactggatgaactccctgggtgttaaccctcgagtcaatcatttgtacagtgacttatcagatgccctggtcatcttccagctctatgaaaagatcaaagttcctgttgactggaacagagtaaacaaaccgccataccccaaactgggaggcaatatgaagaagcttgagaattgtaactacgcggtagaattggggaagaatcaagcgaagttctccctggttggcatcggtggacaagatctcaatgaaggaaaccgcactctcacactggccttgatttggcagctaatgagaaggtatacactgaatatcctcgaagaaattggtggtggccagaaggtcaatgatgacattattgtcaactgggtgaatgaaacattgagggaagcagagaaaagttcatccatctctagtttcaaggacccgaagattagtacaagtctgcctgttctggacctcatcgatgccatccaaccaggttccattaactatgaccttctgaagacagaaaatctgaatgatgatgagaaactcaacaatgcaaaatatgccatctctatggcccgaaaaattggagcaagagtgtatgccctgccagaagacctggttgaagtgaaccccaaaatggtcatgaccgtgtttgcctgcctcatggggaaaggaatgaagagggtgtgaggcccaatggggctgggtgggaggcggtgcactcactcctgactgcccggcacagatgctccagggatgattcaagccattccaaagttcaacttggtgacactctataagattccaaaaagcacatattagtgcagccaagtagcctctcctgtatttaacaaaaagtgcttcattctttgcaggaggcccaacctcctatatataggtttctattcttgatttatttgcttcttcgaaaatctagaggaaaagaaagaagttattttccaggtacccttctcgcttttgccattagccaaggatagaagctgcagtggtattaattttgatataatctttcaaaccagcttcatgtggcttcccttttctttgttcaagatgagggccaggaggggaaacatcacacctgccctaaaccctgttcctggaggtcagcatttgatctgttgcaagcccctctttctgtcccctcttcctaccctgcctcccatgactttgctcctcacacttttggaaccatgccttccgggggggcccatctcttctggccgtccttgtctctgggccacttggagtgtgtgataaatcagtcaagctgttgaagtctcaggagtctctggtagcctgcagaagtaagcctcatcatcagagcctttcctcaaaactggagtcccaaatgtcatcaggttttgttttttttcagccactaagaacccctctgcttttaactctagaatttgggcttggaccagatctaacatcttgaatactctgccctctagagccttcagccttaatggaaggttggatccaaggagggtgtaatggagcatcaagccactcggcggcagcatggagctataactaagcatcctttagggttctgcctctccaggcatttagccctcacattagatctagttactgtggtatggctaatacctgtcaacatttggaggcaatcctaccttgcttttgcttctagagcttagcatatctgattgttgtcaggccatattatcaatgtttacttttttggtactataaaagctttctgccacccctaaactccaggggggaaaatatgtgccaatcaatagcacccctactcacatacacacacacctagccagctgtcaagggcagaatgaatctatgctggataagaaatggtggaactgcgttatgaagagctaatttactggacaaagaattccaaagcaaaaccagaacagtatgaatttgagcaggtctcataggttgagcaatttccccctaaaccaactgaaggctaaaaagcaacaggccattgtgaaccaatgcaagacgccctctatcatggtgaaaagctccatcaatgaggtatcttctttagtggtggtatgtaatggaacttagccatttttcaaagcaattgaaatgcattgctctggatctgttccttggcagtggactcagaaagccaacatgtggctcctcccagcccataaccagtatttttgctgcttctgaatacaaattggttggttttctactagactatggtgagctcaggtgagttgatactcctgatgcgagtaatacggatgtgttataggagtgggacttctgaggggataaagcggggtgatgcctgttggcttaatgtacggggatactctagagcc

SEQ ID NO: 434932 - DNA, 3109 bp, Homo sapiens
agagatgttttgtgtgtcagcttcatcacagagcaagatggaaaaatataggcctcatcagtctcatgccaaccagaatgggccttcaacttatggtgctggtttgattgaatggaccactgcatgagtggaaaatctgaacttggctctgaactctgcctcagccatcgggtgccatgtggtcaacataggggctgaggacctgaaggaggggaagccttatctggtcctgggacttctgtggcaagtcatcaagattgggttgtttgctgacattgaactcagcagaaatgaagctctgattgctcttttgagagaaggtgagagcctggaggatttgatgaaactctcccctgaagagctcttgctgaggtgggctaattaccacctggaaaatgcaggctgcaacaaaattggcaacttcagtactgacatcaaggactcaaaagcttattaccacctgcttgagcaggtggctccaaaaggagatgaagaaggtgttcctgctgttgttattgacatgtcaggactgcgggagaaggatgacatccagagggcagaatgcatgctgcagcaggcggagaggctgggctgccggcagtttgtcacagccacagatgttgtccgagggaaccccaagttgaacttggcttttattgccaacctctttaacagataccctgccctgcacaaaccagagaaccaggacattgactggggggctcttgaaggtgagacgagagaagagcggacatttaggaactggatgaactccctgggtgttaaccctcgagtcaatcatttgtacagtgacttatcagatgccctggtcatcttccagctctatgaaaagatcaaagttcctgttgactggaacagagtaaacaaaccgccataccccaaactgggaggcaatatgaagaagcttgagaattgtaactacgcggtagaattggggaagaatcaagcgaagttctccctggttggcatcggtggacaagatctcaatgaaggaaaccgcactctcacactggccttgatttggcagctaatgagaaggtatacactgaatatcctcgaagaaattggtggtggccagaaggtcaatgatgacattattgtcaactgggtgaatgaaacattgagggaagcagagaaaagttcatccatctctagtttcaaggacccgaagattagtacaagtctgcctgttctggacctcatcgatgccatccaaccaggttccattaactatgaccttctgaagacagaaaatctgaatgatgatgagaaactcaacaatgcaaaatatgccatctctatggcccgaaaaattggagcaagagtgtatgccctgccagaagacctggttgaagtgaaccccaaaatggtcatgaccgtgtttgcctgcctcatggggaaaggaatgaagagggtgtgaggcccaatggggctgggtgggaggcggtgcactcactcctgactgcccggcacagatgctccagggatgattcaagccattccaaagttcaacttggtgacactctataagattccaaaaagcacatattagtgcagccaagtagcctctcctgtatttaacaaaaagtgcttcattctttgcaggaggcccaacctcctatatataggtttctattcttgatttatttgcttcttcgaaaatctagaggaaaagaaagaagttattttccaggtacccttctcgcttttgccattagccaaggatagaagctgcagtggtattaattttgatataatctttcaaaccagcttcatgtggcttcccttttctttgttcaagatgagggccaggaggggaaacatcacacctgccctaaaccctgttcctggaggtcagcatttgatctgttgcaagcccctctttctgtcccctcttcctaccctgcctcccatgactttgctcctcacacttttggaaccatgccttccgggggggcccatctcttctggccgtccttgtctctgggccacttggagtgtgtgataaatcagtcaagctgttgaagtctcaggagtctctggtagcctgcagaagtaagcctcatcatcagagcctttcctcaaaactggagtcccaaatgtcatcaggttttgttttttttcagccactaagaacccctctgcttttaactctagaatttgggcttggaccagatctaacatcttgaatactctgccctctagagccttcagccttaatggaaggttggatccaaggagggtgtaatggagcatcaagccactcggcggcagcatggagctataactaagcatcctttagggttctgcctctccaggcatttagccctcacattagatctagttactgtggtatggctaatacctgtcaacatttggaggcaatcctaccttgcttttgcttctagagcttagcatatctgattgttgtcaggccatattatcaatgtttacttttttggtactataaaagctttctgccacccctaaactccaggggggaaaatatgtgccaatcaatagcacccctactcacatacacacacacctagccagctgtcaagggcagaatgaatctatgctggataagaaatggtggaactgcgttatgaagagctaatttactggacaaagaattccaaagcaaaaccagaacagtatgaatttgagcaggtctcataggttgagcaatttccccctaaaccaactgaaggctaaaaagcaacaggccattgtgaaccaatgcaagacgccctctatcatggtgaaaagctccatcaatgaggtatcttctttagtggtggtatgtaatggaacttagccatttttcaaagcaattgaaatgcattgctctggatctgttccttggcagtggactcagaaagccaacatgtggctcctcccagcccataaccagtatttttgctgcttctgaatacaaattggttggttttgacttcagattgaacttactgtagcctcagatgatttcccccctccgcctccaggaagaaagaatgttactgccttaataaaaaatgaaaagagaatgatgctcaaaatctttccaaataaaatgttccctata

SEQ ID NO: 434933 - DNA, 3674 bp, Homo sapiens
tttttctttcctggctgatgatttgtcattctagtcacttcctgccttgtgaccacacacccaggcttgacaaagctgttctgcagatcagaaagaaggggttcctggtcatacaccagtactaccaaggacagcttttttcctgcaagatctgttacctaaagcaataaaaaatggccagaggatcagtgtccgatgaggaaatgatggagctcagagaagcttttgccaaagttgatactgatggcaatggatacatcagcttcaatgagttgaatgacttgttcaaggctgcttgcttgcctttgcctgggtatagagtacgagaaattacagaaaacctgatggctacaggtgatctggaccaagatggaaggatcagctttgatgagtttatcaagattttccatggcctaaaaagcacagatgttgccaagacctttagaaaagcaatcaataagaaggaagggatttgtgcaatcggtggtacttcagagcagtctagcgttggcacccaacactcctattcagaggaagaaaagtatgcctttgtcaactggataaacaaagccctggaaaatgatcctgattgtcggcatgtcatcccaatgaacccaaacacgaatgatctctttaatgctgttggagatggcattgtcctttgtaaaatgatcaacctgtcagtgccagacacaattgatgaaagaacaatcaacaaaaagaagctaacccctttcaccattcaggaaaatctgaacttggctctgaactctgcctcagccatcgggtgccatgtggtcaacataggggctgaggacctgaaggaggggaagccttatctggtcctgggacttctgtggcaagtcatcaagattgggttgtttgctgacattgaactcagcagaaatgaagctctgattgctcttttgagagaaggtgagagcctggaggatttgatgaaactctcccctgaagagctcttgctgaggtgggctaattaccacctggaaaatgcaggctgcaacaaaattggcaacttcagtactgacatcaaggactcaaaagcttattaccacctgcttgagcaggtggctccaaaaggagatgaagaaggtgttcctgctgttgttattgacatgtcaggactgcgggagaaggatgacatccagagggcagaatgcatgctgcagcaggcggagaggctgggctgccggcagtttgtcacagccacagatgttgtccgagggaaccccaagttgaacttggcttttattgccaacctctttaacagataccctgccctgcacaaaccagagaaccaggacattgactggggggctcttgaaggtgagacgagagaagagcggacatttaggaactggatgaactccctgggtgttaaccctcgagtcaatcatttgtacagtgacttatcagatgccctggtcatcttccagctctatgaaaagatcaaagttcctgttgactggaacagagtaaacaaaccgccataccccaaactgggaggcaatatgaagaagcttgagaattgtaactacgcggtagaattggggaagaatcaagcgaagttctccctggttggcatcggtggacaagatctcaatgaaggaaaccgcactctcacactggccttgatttggcagctaatgagaaggtatacactgaatatcctcgaagaaattggtggtggccagaaggtcaatgatgacattattgtcaactgggtgaatgaaacattgagggaagcagagaaaagttcatccatctctagtttcaaggacccgaagattagtacaagtctgcctgttctggacctcatcgatgccatccaaccaggttccattaactatgaccttctgaagacagaaaatctgaatgatgatgagaaactcaacaatgcaaaatatgccatctctatggcccgaaaaattggagcaagagtgtatgccctgccagaagacctggttgaagtgaaccccaaaatggtcatgaccgtgtttgcctgcctcatggggaaaggaatgaagagggtgtgaggcccaatggggctgggtgggaggcggtgcactcactcctgactgcccggcacagatgctccagggatgattcaagccattccaaagttcaacttggtgacactctataagattccaaaaagcacatattagtgcagccaagtagcctctcctgtatttaacaaaaagtgcttcattctttgcaggaggcccaacctcctatatataggtttctattcttgatttatttgcttcttcgaaaatctagaggaaaagaaagaagttattttccaggtacccttctcgcttttgccattagccaaggatagaagctgcagtggtattaattttgatataatctttcaaaccagcttcatgtggcttcccttttctttgttcaagatgagggccaggaggggaaacatcacacctgccctaaaccctgttcctggaggtcagcatttgatctgttgcaagcccctctttctgtcccctcttcctaccctgcctcccatgactttgctcctcacacttttggaaccatgccttccgggggggcccatctcttctggccgtccttgtctctgggccacttggagtgtgtgataaatcagtcaagctgttgaagtctcaggagtctctggtagcctgcagaagtaagcctcatcatcagagcctttcctcaaaactggagtcccaaatgtcatcaggttttgttttttttcagccactaagaacccctctgcttttaactctagaatttgggcttggaccagatctaacatcttgaatactctgccctctagagccttcagccttaatggaaggttggatccaaggagggtgtaatggagcatcaagccactcggcggcagcatggagctataactaagcatcctttagggttctgcctctccaggcatttagccctcacattagatctagttactgtggtatggctaatacctgtcaacatttggaggcaatcctaccttgcttttgcttctagagcttagcatatctgattgttgtcaggccatattatcaatgtttacttttttggtactataaaagctttctgccacccctaaactccaggggggaaaatatgtgccaatcaatagcacccctactcacatacacacacacctagccagctgtcaagggcagaatgaatctatgctggataagaaatggtggaactgcgttatgaagagctaatttactggacaaagaattccaaagcaaaaccagaacatgaaggctaaaaagcaacaggccattgtgaaccaatgcaagacgccctctatcatggtgaaaagctccatcaatgaggtatcttctttagtggtggtatgtaatggaacttagccatttttcaaagcaattgaaatgcattgctctggatctgttccttggcagtggactcagaaagccaacatgtggctcctcccagcccataaccagtatttttgctgcttctgaatacaaattggttggttttgacttcagattgaacttactgtagcctcagatgatttcccccctccgcctccaggaagaaagaatgttactgccttaataaaaaatgaaaagagaatgatgctcaaaatctttccaaataaaatgttccctata

SEQ ID NO: 434934 - DNA, 2703 bp, Homo sapiens
ccttaggcataggtacgaggcctgggtgtacatgactcaaaagcttattaccacctgcttgagcaggtggctccaaaaggagatgaagaaggtgttcctgctgttgttattgacatgtcaggactgcgggagaaggatgacatccagagggcagaatgcatgctgcagcaggcggagaggctgggctgccggcagtttgtcacagccacagatgttgtccgagggaaccccaagttgaacttggcttttattgccaacctctttaacagataccctgccctgcacaaaccagagaaccaggacattgactggggggctcttgaaggtgagacgagagaagagcggacatttaggaactggatgaactccctgggtgttaaccctcgagtcaatcatttgtacagtgacttatcagatgccctggtcatcttccagctctatgaaaagatcaaagttcctgttgactggaacagagtaaacaaaccgccataccccaaactgggaggcaatatgaagaagcttgagaattgtaactacgcggtagaattggggaagaatcaagcgaagttctccctggttggcatcggtggacaagatctcaatgaaggaaaccgcactctcacactggccttgatttggcagctaatgagaaggtatacactgaatatcctcgaagaaattggtggtggccagaaggtcaatgatgacattattgtcaactgggtgaatgaaacattgagggaagcagagaaaagttcatccatctctagtttcaaggacccgaagattagtacaagtctgcctgttctggacctcatcgatgccatccaaccaggttccattaactatgaccttctgaagacagaaaatctgaatgatgatgagaaactcaacaatgcaaaatatgccatctctatggcccgaaaaattggagcaagagtgtatgccctgccagaagacctggttgaagtgaaccccaaaatggtcatgaccgtgtttgcctgcctcatggggaaaggaatgaagagggtgtgaggcccaatggggctgggtgggaggcggtgcactcactcctgactgcccggcacagatgctccagggatgattcaagccattccaaagttcaacttggtgacactctataagattccaaaaagcacatattagtgcagccaagtagcctctcctgtatttaacaaaaagtgcttcattctttgcaggaggcccaacctcctatatataggtttctattcttgatttatttgcttcttcgaaaatctagaggaaaagaaagaagttattttccaggtacccttctcgcttttgccattagccaaggatagaagctgcagtggtattaattttgatataatctttcaaaccagcttcatgtggcttcccttttctttgttcaagatgagggccaggaggggaaacatcacacctgccctaaaccctgttcctggaggtcagcatttgatctgttgcaagcccctctttctgtcccctcttcctaccctgcctcccatgactttgctcctcacacttttggaaccatgccttccgggggggcccatctcttctggccgtccttgtctctgggccacttggagtgtgtgataaatcagtcaagctgttgaagtctcaggagtctctggtagcctgcagaagtaagcctcatcatcagagcctttcctcaaaactggagtcccaaatgtcatcaggttttgttttttttcagccactaagaacccctctgcttttaactctagaatttgggcttggaccagatctaacatcttgaatactctgccctctagagccttcagccttaatggaaggttggatccaaggagggtgtaatggagcatcaagccactcggcggcagcatggagctataactaagcatcctttagggttctgcctctccaggcatttagccctcacattagatctagttactgtggtatggctaatacctgtcaacatttggaggcaatcctaccttgcttttgcttctagagcttagcatatctgattgttgtcaggccatattatcaatgtttacttttttggtactataaaagctttctgccacccctaaactccaggggggaaaatatgtgccaatcaatagcacccctactcacatacacacacacctagccagctgtcaagggcagaatgaatctatgctggataagaaatggtggaactgcgttatgaagagctaatttactggacaaagaattccaaagcaaaaccagaacagtatgaatttgagcaggtctcataggttgagcaatttccccctaaaccaactgaaggctaaaaagcaacaggccattgtgaaccaatgcaagacgccctctatcatggtgaaaagctccatcaatgaggtatcttctttagtggtggtatgtaatggaacttagccatttttcaaagcaattgaaatgcattgctctggatctgttccttggcagtggactcagaaagccaacatgtggctcctcccagcccataaccagtatttttgctgcttctgaatacaaattggttggttttgacttcagattgaacttactgtagcctcagatgatttcccccctccgcctccaggaagaaagaatgttactgccttaataaaaaatgaaaagagaatgatgctcaaaatctttccaaataaaatgttccctata

SEQ ID NO: 434935 - DNA, 3136 bp, Homo sapiens
agagatgttttgtgtgtcagcttcatcacagagcaagatggaaaaatataggcctcatcagtctcatgccaaccagaatgggccttcaacttatggtgctggtttgattgaatggaccactgcatgagtggaaaatctgaacttggctctgaactctgcctcagccatcgggtgccatgtggtcaacataggggctgaggacctgaaggaggggaagccttatctggtcctgggacttctgtggcaagtcatcaagattgggttgtttgctgacattgaactcagcagaaatgaagctctgattgctcttttgagagaaggtgagagcctggaggatttgatgaaactctcccctgaagagctcttgctgaggtgggctaattaccacctggaaaatgcaggctgcaacaaaattggcaacttcagtactgacatcaagctgactgacttctacagcaatataaaggactcaaaagcttattaccacctgcttgagcaggtggctccaaaaggagatgaagaaggtgttcctgctgttgttattgacatgtcaggactgcgggagaaggatgacatccagagggcagaatgcatgctgcagcaggcggagaggctgggctgccggcagtttgtcacagccacagatgttgtccgagggaaccccaagttgaacttggcttttattgccaacctctttaacagataccctgccctgcacaaaccagagaaccaggacattgactggggggctcttgaaggtgagacgagagaagagcggacatttaggaactggatgaactccctgggtgttaaccctcgagtcaatcatttgtacagtgacttatcagatgccctggtcatcttccagctctatgaaaagatcaaagttcctgttgactggaacagagtaaacaaaccgccataccccaaactgggaggcaatatgaagaagcttgagaattgtaactacgcggtagaattggggaagaatcaagcgaagttctccctggttggcatcggtggacaagatctcaatgaaggaaaccgcactctcacactggccttgatttggcagctaatgagaaggtatacactgaatatcctcgaagaaattggtggtggccagaaggtcaatgatgacattattgtcaactgggtgaatgaaacattgagggaagcagagaaaagttcatccatctctagtttcaaggacccgaagattagtacaagtctgcctgttctggacctcatcgatgccatccaaccaggttccattaactatgaccttctgaagacagaaaatctgaatgatgatgagaaactcaacaatgcaaaatatgccatctctatggcccgaaaaattggagcaagagtgtatgccctgccagaagacctggttgaagtgaaccccaaaatggtcatgaccgtgtttgcctgcctcatggggaaaggaatgaagagggtgtgaggcccaatggggctgggtgggaggcggtgcactcactcctgactgcccggcacagatgctccagggatgattcaagccattccaaagttcaacttggtgacactctataagattccaaaaagcacatattagtgcagccaagtagcctctcctgtatttaacaaaaagtgcttcattctttgcaggaggcccaacctcctatatataggtttctattcttgatttatttgcttcttcgaaaatctagaggaaaagaaagaagttattttccaggtacccttctcgcttttgccattagccaaggatagaagctgcagtggtattaattttgatataatctttcaaaccagcttcatgtggcttcccttttctttgttcaagatgagggccaggaggggaaacatcacacctgccctaaaccctgttcctggaggtcagcatttgatctgttgcaagcccctctttctgtcccctcttcctaccctgcctcccatgactttgctcctcacacttttggaaccatgccttccgggggggcccatctcttctggccgtccttgtctctgggccacttggagtgtgtgataaatcagtcaagctgttgaagtctcaggagtctctggtagcctgcagaagtaagcctcatcatcagagcctttcctcaaaactggagtcccaaatgtcatcaggttttgttttttttcagccactaagaacccctctgcttttaactctagaatttgggcttggaccagatctaacatcttgaatactctgccctctagagccttcagccttaatggaaggttggatccaaggagggtgtaatggagcatcaagccactcggcggcagcatggagctataactaagcatcctttagggttctgcctctccaggcatttagccctcacattagatctagttactgtggtatggctaatacctgtcaacatttggaggcaatcctaccttgcttttgcttctagagcttagcatatctgattgttgtcaggccatattatcaatgtttacttttttggtactataaaagctttctgccacccctaaactccaggggggaaaatatgtgccaatcaatagcacccctactcacatacacacacacctagccagctgtcaagggcagaatgaatctatgctggataagaaatggtggaactgcgttatgaagagctaatttactggacaaagaattccaaagcaaaaccagaacagtatgaatttgagcaggtctcataggttgagcaatttccccctaaaccaactgaaggctaaaaagcaacaggccattgtgaaccaatgcaagacgccctctatcatggtgaaaagctccatcaatgaggtatcttctttagtggtggtatgtaatggaacttagccatttttcaaagcaattgaaatgcattgctctggatctgttccttggcagtggactcagaaagccaacatgtggctcctcccagcccataaccagtatttttgctgcttctgaatacaaattggttggttttgacttcagattgaacttactgtagcctcagatgatttcccccctccgcctccaggaagaaagaatgttactgccttaataaaaaatgaaaagagaatgatgctcaaaatctttccaaataaaatgttccctata

SEQ ID NO: 434936 - DNA, 2697 bp, Homo sapiens
  misc_feature (16)..(16): n is a, c, g, or t
  misc_feature (19)..(19): n is a, c, g, or t
  misc_feature (24)..(24): n is a, c, g, or t
taggctaggtgcgagnccnggtgntgagactcaaaagcttattaccacctgcttgagcaggtggctccaaaaggagatgaagaaggtgttcctgctgttgttattgacatgtcaggactgcgggagaaggatgacatccagagggcagaatgcatgctgcagcaggcggagaggctgggctgccggcagtttgtcacagccacagatgttgtccgagggaaccccaagttgaacttggcttttattgccaacctctttaacagataccctgccctgcacaaaccagagaaccaggacattgactggggggctcttgaaggtgagacgagagaagagcggacatttaggaactggatgaactccctgggtgttaaccctcgagtcaatcatttgtacagtgacttatcagatgccctggtcatcttccagctctatgaaaagatcaaagttcctgttgactggaacagagtaaacaaaccgccataccccaaactgggaggcaatatgaagaagcttgagaattgtaactacgcggtagaattggggaagaatcaagcgaagttctccctggttggcatcggtggacaagatctcaatgaaggaaaccgcactctcacactggccttgatttggcagctaatgagaaggtatacactgaatatcctcgaagaaattggtggtggccagaaggtcaatgatgacattattgtcaactgggtgaatgaaacattgagggaagcagagaaaagttcatccatctctagtttcaaggacccgaagattagtacaagtctgcctgttctggacctcatcgatgccatccaaccaggttccattaactatgaccttctgaagacagaaaatctgaatgatgatgagaaactcaacaatgcaaaatatgccatctctatggcccgaaaaattggagcaagagtgtatgccctgccagaagacctggttgaagtgaaccccaaaatggtcatgaccgtgtttgcctgcctcatggggaaaggaatgaagagggtgtgaggcccaatggggctgggtgggaggcggtgcactcactcctgactgcccggcacagatgctccagggatgattcaagccattccaaagttcaacttggtgacactctataagattccaaaaagcacatattagtgcagccaagtagcctctcctgtatttaacaaaaagtgcttcattctttgcaggaggcccaacctcctatatataggtttctattcttgatttatttgcttcttcgaaaatctagaggaaaagaaagaagttattttccaggtacccttctcgcttttgccattagccaaggatagaagctgcagtggtattaattttgatataatctttcaaaccagcttcatgtggcttcccttttctttgttcaagatgagggccaggaggggaaacatcacacctgccctaaaccctgttcctggaggtcagcatttgatctgttgcaagcccctctttctgtcccctcttcctaccctgcctcccatgactttgctcctcacacttttggaaccatgccttccgggggggcccatctcttctggccgtccttgtctctgggccacttggagtgtgtgataaatcagtcaagctgttgaagtctcaggagtctctggtagcctgcagaagtaagcctcatcatcagagcctttcctcaaaactggagtcccaaatgtcatcaggttttgttttttttcagccactaagaacccctctgcttttaactctagaatttgggcttggaccagatctaacatcttgaatactctgccctctagagccttcagccttaatggaaggttggatccaaggagggtgtaatggagcatcaagccactcggcggcagcatggagctataactaagcatcctttagggttctgcctctccaggcatttagccctcacattagatctagttactgtggtatggctaatacctgtcaacatttggaggcaatcctaccttgcttttgcttctagagcttagcatatctgattgttgtcaggccatattatcaatgtttacttttttggtactataaaagctttctgccacccctaaactccaggggggaaaatatgtgccaatcaatagcacccctactcacatacacacacacctagccagctgtcaagggcagaatgaatctatgctggataagaaatggtggaactgcgttatgaagagctaatttactggacaaagaattccaaagcaaaaccagaacagtatgaatttgagcaggtctcataggttgagcaatttccccctaaaccaactgaaggctaaaaagcaacaggccattgtgaaccaatgcaagacgccctctatcatggtgaaaagctccatcaatgaggtatcttctttagtggtggtatgtaatggaacttagccatttttcaaagcaattgaaatgcattgctctggatctgttccttggcagtggactcagaaagccaacatgtggctcctcccagcccataaccagtatttttgctgcttctgaatacaaattggttggttttgacttcagattgaacttactgtagcctcagatgatttcccccctccgcctccaggaagaaagaatgttactgccttaataaaaaatgaaaagagaatgatgctcaaaatctttccaaataaaatgttccctata

SEQ ID NO: 434937 - DNA, 2858 bp, Homo sapiens
accaaaacaaacaactgtgtatagactgctgttttctttggatttgaaatgaggcatttgggtgttctttcccctaccatacggcctgtctgcccttccctccccacattggctccagcagagtagccgaaggtcctgccgccgccgccaccaccaccaccactgcagcaacttcagtactgacatcagactcaaaagcttattaccacctgcttgagcaggtggctccaaaaggagatgaagaaggtgttcctgctgttgttattgacatgtcaggactgcgggagaaggatgacatccagagggcagaatgcatgctgcagcaggcggagaggctgggctgccggcagtttgtcacagccacagatgttgtccgagggaaccccaagttgaacttggcttttattgccaacctctttaacagataccctgccctgcacaaaccagagaaccaggacattgactggggggctcttgaaggtgagacgagagaagagcggacatttaggaactggatgaactccctgggtgttaaccctcgagtcaatcatttgtacagtgacttatcagatgccctggtcatcttccagctctatgaaaagatcaaagttcctgttgactggaacagagtaaacaaaccgccataccccaaactgggaggcaatatgaagaagcttgagaattgtaactacgcggtagaattggggaagaatcaagcgaagttctccctggttggcatcggtggacaagatctcaatgaaggaaaccgcactctcacactggccttgatttggcagctaatgagaaggtatacactgaatatcctcgaagaaattggtggtggccagaaggtcaatgatgacattattgtcaactgggtgaatgaaacattgagggaagcagagaaaagttcatccatctctagtttcaaggacccgaagattagtacaagtctgcctgttctggacctcatcgatgccatccaaccaggttccattaactatgaccttctgaagacagaaaatctgaatgatgatgagaaactcaacaatgcaaaatatgccatctctatggcccgaaaaattggagcaagagtgtatgccctgccagaagacctggttgaagtgaaccccaaaatggtcatgaccgtgtttgcctgcctcatggggaaaggaatgaagagggtgtgaggcccaatggggctgggtgggaggcggtgcactcactcctgactgcccggcacagatgctccagggatgattcaagccattccaaagttcaacttggtgacactctataagattccaaaaagcacatattagtgcagccaagtagcctctcctgtatttaacaaaaagtgcttcattctttgcaggaggcccaacctcctatatataggtttctattcttgatttatttgcttcttcgaaaatctagaggaaaagaaagaagttattttccaggtacccttctcgcttttgccattagccaaggatagaagctgcagtggtattaattttgatataatctttcaaaccagcttcatgtggcttcccttttctttgttcaagatgagggccaggaggggaaacatcacacctgccctaaaccctgttcctggaggtcagcatttgatctgttgcaagcccctctttctgtcccctcttcctaccctgcctcccatgactttgctcctcacacttttggaaccatgccttccgggggggcccatctcttctggccgtccttgtctctgggccacttggagtgtgtgataaatcagtcaagctgttgaagtctcaggagtctctggtagcctgcagaagtaagcctcatcatcagagcctttcctcaaaactggagtcccaaatgtcatcaggttttgttttttttcagccactaagaacccctctgcttttaactctagaatttgggcttggaccagatctaacatcttgaatactctgccctctagagccttcagccttaatggaaggttggatccaaggagggtgtaatggagcatcaagccactcggcggcagcatggagctataactaagcatcctttagggttctgcctctccaggcatttagccctcacattagatctagttactgtggtatggctaatacctgtcaacatttggaggcaatcctaccttgcttttgcttctagagcttagcatatctgattgttgtcaggccatattatcaatgtttacttttttggtactataaaagctttctgccacccctaaactccaggggggaaaatatgtgccaatcaatagcacccctactcacatacacacacacctagccagctgtcaagggcagaatgaatctatgctggataagaaatggtggaactgcgttatgaagagctaatttactggacaaagaattccaaagcaaaaccagaacagtatgaatttgagcaggtctcataggttgagcaatttccccctaaaccaactgaaggctaaaaagcaacaggccattgtgaaccaatgcaagacgccctctatcatggtgaaaagctccatcaatgaggtatcttctttagtggtggtatgtaatggaacttagccatttttcaaagcaattgaaatgcattgctctggatctgttccttggcagtggactcagaaagccaacatgtggctcctcccagcccataaccagtatttttgctgcttctgaatacaaattggttggttttgacttcagattgaacttactgtagcctcagatgatttcccccctccgcctccaggaagaaagaatgttactgccttaataaaaaatgaaaagagaatgatgctcaaaatctttccaaataaaatgttccctata

SEQ ID NO: 434938 - DNA, 1781 bp, Homo sapiens
cacgaggcccactccaccttactaccatgcaaccttacccaaatcatttaccccccaaaatggtcatgaccgtgtttgcctgcctcatggggaaaggaatgaagagggtgtgaggcccaatggggctgggtgggaggcggtgcactcactcctgactgcccggcacagatgctccagggatgattcaagccattccaaagttcaacttggtgacactctataagattccaaaaagcacatattagtgcagccaagtagcctctcctgtatttaacaaaaagtgcttcattctttgcaggaggcccaacctcctatatataggtttctattcttgatttatttgcttcttcgaaaatctagaggaaaagaaagaagttattttccaggtacccttctcgcttttgccattagccaaggatagaagctgcagtggtattaattttgatataatctttcaaaccagcttcatgtggcttcccttttctttgttcaagatgagggccaggaggggaaacatcacacctgccctaaaccctgttcctggaggtcagcatttgatctgttgcaagcccctctttctgtcccctcttcctaccctgcctcccatgactttgctcctcacacttttggaaccatgccttccgggggggcccatctcttctggccgtccttgtctctgggccacttggagtgtgtgataaatcagtcaagctgttgaagtctcaggagtctctggtagcctgcagaagtaagcctcatcatcagagcctttcctcaaaactggagtcccaaatgtcatcaggttttgttttttttcagccactaagaacccctctgcttttaactctagaatttgggcttggaccagatctaacatcttgaatactctgccctctagagccttcagccttaatggaaggttggatccaaggagggtgtaatggagcatcaagccactcggcggcagcatggagctataactaagcatcctttagggttctgcctctccaggcatttagccctcacattagatctagttactgtggtatggctaatacctgtcaacatttggaggcaatcctaccttgcttttgcttctagagcttagcatatctgattgttgtcaggccatattatcaatgtttacttttttggtactataaaagctttctgccacccctaaactccaggggggaaaatatgtgccaatcaatagcacccctactcacatacacacacacctagccagctgtcaagggcagaatgaatctatgctggataagaaatggtggaactgcgttatgaagagctaatttactggacaaagaattccaaagcaaaaccagaacagtatgaatttgagcaggtctcataggttgagcaatttccccctaaaccaactgaaggctaaaaagcaacaggccattgtgaaccaatgcaagacgccctctatcatggtgaaaagctccatcaatgaggtatcttctttagtggtggtatgtaatggaacttagccatttttcaaagcaattgaaatgcattgctctggatctgttccttggcagtggactcagaaagccaacatgtggctcctcccagcccataaccagtatttttgctgcttctgaatacaaattggttggttttgacttcagattgaacttactgtagcctcagatgatttcccccctccgcctccaggaagaaagaatgttactgccttaataaaaaatgaaaagagaatgatgctcaaaatctttccaaataaaatgttccctata

SEQ ID NO: 434939 - DNA, 1814 bp, Homo sapiens
tttttctttcctggctgatgatttgtcattctagtcacttcctgccttgtgaccacacacccaggcttgacaaagctgttctgcagatcagaaagaaggggttcctggtcatacaccagtactaccaaggacagcttttttcctgcaagatctgttacctaaagcaataaaaaatggccagaggatcagtgtccgatgaggaaatgatggagctcagagaagcttttgccaaagttgatactgatggcaatggatacatcagcttcaatgagttgaatgacttgttcaaggctgcttgcttgcctttgcctgggtatagagtacgagaaattacagaaaacctgatggctacaggtgatctggaccaagatggaaggatcagctttgatgagtttatcaagattttccatggcctaaaaagcacagatgttgccaagacctttagaaaagcaatcaataagaaggaagggatttgtgcaatcggtggtacttcagagcagtctagcgttggcacccaacactcctattcagaggaagaaaagtatgcctttgtcaactggataaacaaagccctggaaaatgatcctgattgtcggcatgtcatcccaatgaacccaaacacgaatgatctctttaatgctgttggagatggcattgtcctttgtaaaatgatcaacctgtcagtgccagacacaattgatgaaagaacaatcaacaaaaagaagctaacccctttcaccattcaggaaaatctgaacttggctctgaactctgcctcagccatcgggtgccatgtggtcaacataggggctgaggacctgaaggaggggaagccttatctggtcctgggacttctgtggcaagtcatcaagattgggttgtttgctgacattgaactcagcagaaatgaagctctgattgctcttttgagagaaggtgagagcctggaggatttgatgaaactctcccctgaagagctcttgctgaggtgggctaattaccacctggaaaatgcaggctgcaacaaaattggcaacttcagtactgacatcaaggactcaaaagcttattaccacctgcttgagcaggtggctccaaaaggagatgaagaaggtgttcctgctgttgttattgacatgtcaggactgcgggagaaggatgacatccagagggcagaatgcatgctgcagcaggcggagaggctgggctgccggcagtttgtcacagccacagatgttgtccgagggaaccccaagttgaacttggcttttattgccaacctctttaacagataccctgccctgcacaaaccagagaaccaggacattgactggggggctcttgaaggtgagacgagagaagagcggacatttaggaactggatgaactccctgggtgttaaccctcgagtcaatcatttgtacagtgacttatcagatgccctggtcatcttccagctctatgaaaagatcaaagttcctgttgactggaacagagtaaacaaaccgccataccccaaactgggaggcaatatgaagaagcttgagaattgtaactacgcggtagaattggggaagaatcaagcgaagttctccctggttggcatcggtggacaagatctcaatgaaggaaaccgcactctcacactggccttgatttggcagctaatgagaaggtatcactgaatatctcgaaagaaattgtggtggccgacagcaatgatgacctttttgtcactggtgacatgaacttgaggagcgaaaaagtctcctctctgttcagacccaatataagcgcggcggcctgacccacgc

SEQ ID NO: 434940 - DNA, 987 bp, Homo sapiens
gaatactccatcagctgttagctctacaatccgagcttgtaccagatcttgagatcttgattactctgacctcaacatggctcctgactaatggtgagaggttgtcaccaataaagggtgtcccggagcatcacgagcagtcgtgagcagatctgaaatcggatgactagagcggatcctctacgggattctagtcatactacgcaagtcctaaaggacctcagcatatacgatacttagtgcctcgtgtggtatggctaatacctgtcaacatttggaggcaatcctaccttgcttttgcttctagagcttagcatatctgattgttgtcaggccatattatcaatgtttacttttttggtactataaaagctttctgccacccctaaactccaggggggaaaatatgtgccaatcaatagcacccctactcacatacacacacacctagccagctgtcaagggcagaatgaatctatgctggataagaaatggtggaactgcgttatgaagagctaatttactggacaaagaattccaaagcaaaaccagaacagtatgaatttgagcaggtctcataggttgagcaatttccccctaaaccaactgaaggctaaaaagcaacaggccattgtgaaccaatgcaagacgccctctatcatggtgaaaagctccatcaatgaggtatcttctttagtggtggtatgtaatggaacttagccatttttcaaagcaattgaaatgcattgctctggatctgttccttggcagtggactcagaaagccaacatgtggctcctcccagcccataaccagtatttttgctgcttctgaatacaaattggttggttttgacttcagattgaacttactgtagcctcagatgatttcccccctccgcctccaggaagaaagaatgttactgccttaataaaaaatgaaaagagaatgatgctcaaaatctttccaaataaaatgttccctata

SEQ ID NO: 434941 - DNA, 801 bp, Homo sapiens
  misc_feature (763)..(763): n is a, c, g, or t
  misc_feature (770)..(770): n is a, c, g, or t
  misc_feature (784)..(784): n is a, c, g, or t
  misc_feature (788)..(788): n is a, c, g, or t
  misc_feature (794)..(794): n is a, c, g, or t
tttttctttcctggctgatgatttgtcattctagtcacttcctgccttgtgaccacacacccaggcttgacaaagctgttctgcagatcagaaagaaggggttcctggtcatacaccagtactaccaaggacagcttttttcctgcaagatctgttacctaaagcaataaaaaatggccagaggatcagtgtccgatgaggaaatgatggagctcagagaagcttttgccaaagttgatactgatggcaatggatacatcagcttcaatgagttgaatgacttgttcaaggctgcttgcttgcctttgcctgggtatagagtacgagaaattacagaaaacctgatggctacaggtgatctggaccaagatggaaggatcagctttgatgagtttatcaagattttccatggcctaaaaagcacagatgttgccaagacctttagaaaagcaatcaataagaaggaagggatttgtgcaatcggtggtacttcagagcagtctagcgttggcacccaacactcctattcagaggaagaaaagtatgcctttgtcaactggataaacaaagccctggaaaatgatcctgattgtcggcatgtcatcccaatgaacccaaacacgaatgatctctttaatgctgttggagatggcattgtcctttgtaaatgatcaccctgtcagtgccagacacattgctgacagaacatcacaaaagaggtaccttcacattcggaaatctgactggtctgaattgctcagcntcgggcntgtgtcactagggntggncctganggggagc

SEQ ID NO: 434942 - DNA, 697 bp, Homo sapiens
gactagaacccaatcttacggctaggtacgaggcctgggtggtgaatcccttagaggggttcctggtcatacaccagtactaccaaggacagcttttttcctgcaagagggcagcagtgatgcacaggaaaagggaaattactcaagcactgtttctcagcaagactgtcgcttttctgagaagaaaacacctagaaagcgcctcagattcccatagctgaattatgagaggatctgttacctaaagcaataaaaaatggccagaggatcagtgtccgatgaggaaatgatggagctcagagaagcttttgccaaagttggtgagtagacctggtaccccaaattgcatcattctcttcttcactgagtagcttcagggtagattcaatgaaatgggaacatgagcaaaatttcagagatgacaagaaaccagtagtatttgtttagaggagctgggagaacttatttttgaaaaatatgcttcaataaaatgactttctctatctaagtctcatcttttatatcttgtcttctgttttgctgtttccttgattttaataccatcacatactttctcttactctttatcactaaacctgtggtttccttaagagtttctataagagttctttgtggaaacagaggtaccttatagaaattatgactcttttactgtggatgttgaaagtaatgctgg

SEQ ID NO: 434943 - DNA, 626 bp, Homo sapiens
gactagaacccaatcttacggctaggtacgaggcctgggtggtgaatcccttagaggggttcctggtcatacaccagtactaccaaggacagcttttttcctgcaagatctgttacctaaagcaataaaaaatggccagaggatcagtgtccgatgaggaaatgatggagctcagagaagcttttgccaaagttggtgagtagacctggtaccccaaattgcatcattctcttcttcactgagtagcttcagggtagattcaatgaaatgggaacatgagcaaaatttcagagatgacaagaaaccagtagtatttgtttagaggagctgggagaacttatttttgaaaaatatgcttcaataaaatgactttctctatcaaaacatggaatatggactctactcttacatagtttgttcctggaaatggtttgtaagtctcatcttttatatcttgtcttctgttttgctgtttccttgattttaataccatcacatactttctcttactctttatcactaaacctgtggtttccttaagagtttctataagagttctttgtggaaacagaggtaccttatagaaattatgactcttttactgtggatgttgaaagtaatgctgg

SEQ ID NO: 434944 - DNA, 749 bp, Homo sapiens
gactagaacccaatcttacggctaggtacgaggcctgggtggtgaatcccttagaggggttcctggtcatacaccagtactaccaaggacagcttttttcctgcaaggtaaatgttcttcatgtgtttttgttggttttaagcgcttgtgatgcacttcggcactgtttctgtggattgtgggttttgccttcaggggaccagagatctgagcatgtcacctgagacctctgtgattcctgccactgtctaactggccaggacatctgccgccacctcgcgtggccatccaagatggagcacctcggctctctgggctgggttcttctcaacttatctgcagttatcacccctgcccaaaattaaggtttctttttccttttaaaaccaaaccatgttctggtttatttctattgctctatttcacggaggctatttactgtgattttatcttctttaaaatgttttcaggaaaagcgcgtattgataatttagattgtatggcttattggcccaatgggggtagtttaattttagttcctgcggttctgtttttctaaaaaacttctttacagtactttagtggataaattatctagagtcatatgttactgaatgtgatactggttatttgagtgatttttggcgccaagggtttttaatgggtgtgctttataaccacatggaattagaggttttctcttttccatttgttctctaaaaataaaagcaatttgtataatgcttaat

SEQ ID NO: 434945 - DNA, 317 bp, Homo sapiens
atgcatacatatacattagtgcagaagtctgaactgtattgttgaatgtggcttcttgtgtagtaatgtagtaatatgtagtaataatactgtgtagtaatcttgggcagtgatgccttgtgaggctgttgagataaggaggaattggctttgtctaaatatctgctattgctgagctagaatgggaagtgacaaacttttcatgtgttatgtcaccatttacctgaaactttggttgaatgcagtgacccatttttctttctcttcttttattttttctttatctttctgtctttctgtctttctttctggcagtg

SEQ ID NO: 434946 - DNA, 1294 bp, Homo sapiens
gcaagtgggagaaaactaatcaatggcacacagggcagggtgtggccctatgggcaaaggataatgtcacctcaggaccaaggtggaaacttacagctgaatccagggcttactaagtagggaagtcagtttacatatttcagttttcctctgatgtttttgaggtactgtgtatttgcagaagtttaagcagaagggttttgtttctattgtaagttaggttctaaaagtgtataatctgatactctagcccaactgaaatattatatcttgggcgttacagcctttgtctttttctttagtcaccttaatacccagtcctatgctgtatctctgatagcctatataaatgacatataggaatattattttccatatgatctgttgtatggtgtatatgctatgtgttcatttcgtgtgcaagttcagagtgtaatagatttacccagagaaggtgtttctatacaatgcccctacctatttgaaattacatgcttgcccaacacactgtgaaatagttaccaaaatttgtacaaatgcagcatcttcattctttctgagaagacaagatggttttctttacatgaacaaatgaacaaaagagatcctagatccataacgtagctaaggcatctaagagtttgctgttgataatcttgctgaccaaaaactactggagagtaacacaggttatatgccatcacaaatacaatgctcatgaagaactgatttgtagagtcaatgaacctgtgtccagaattttaataggctctctattggaaggagaaagaatttcaagttaacagtatctaactttatcatagttgatgttagtaaattttaaaaaatgattttatatgtatgacaaaaatctttgtaaaatgcgcaagtgcaataatttaaagaggtcttaactttgcatttataaattataaatattgtacatgtgtgtaattttttcatgtattcatttgcagtctttgtatttaaaaaacatttactgttatgtttgtataatagaacagtaatcatttattataatctaggcaagttgtaaataaattcataattcaaacagccagtatatatgcatatatgagtgttatattgcaaaatctttgttttacttacatggttaaagcagcaagaattcttttgttgatatgtaattatacacataaaatatatatatgtatgatacatgaaatatatttagaaatgttcataattttaatggatatcctttggtgtgaataattgaatacagagtttttaaaatatctttcacgtatat

SEQ ID NO: 434947 - DNA, 301 bp, Homo sapiens
cttgaatataactgcctaatctaatataaccacctagccatctttagtcacatcattctatttcaatttcctcttaagctctttttactatcagattgtttttgttttttggtcatctgcctttcctttgtagaatgcaggctccatgagagtcgggagcttggctttctgattcaccaccatatcccctgtgggcagctttgatgtgcgcaagacagctgacgactgagccctgcttctgctggggctgtgtacagagtgcaaatgtttatttaaaataaagttctatttatcccttgtg

SEQ ID NO: 434948 - DNA, 352 bp, Homo sapiens
cctgcctcagcctcccaagtacttgggactacaggcgtgcgccaccatgcctggctaatttttttttgtatttttagtggagacggggtttcaccatgttggccaggctggtcttgaactcctgacctcaagtgatccacctgccttggcttcccaaaatgctgggataacaggcatgagccattgcctccagctgaaacatgctttctcaaaggaattgggatcatatgcaggtagaagggcagctggtatgtgtttgcctgaaggatagaatgacaagacgtgaagagcgagagatcacagaaagaatagaacgagttaagaaggctcgagaagagcatgagagagccca

SEQ ID NO: 434949 - DNA, 870 bp, Homo sapiens
cctgcctcagcctcccaagtacttgggactacaggcgtgcgccaccatgcctggctaatttttttttgtatttttagtggagacggggtttcaccatgttggccaggctggtcttgaactcctgacctcaagtgatccacctgccttggcttcccaaaatgctgggataacaggcatgagccattgcctccagctgaaacatgctttctcaaaggaattgggatcatatgcaggtagaagggcagctggtatgtgtttgcctgaaggatagaatgacaagacgtgaagaaagataggaatgactaagagctagtcattcttgccagcctctgacagtgtgagatctgcagcagtgtttactagttcattttctgtgaagtcagtccttgataatttgtggtacaaagaaaggaaataacaagtctgacagtaatcttcctacctttgtagagactccatcatcccttctgaatccctgttggccctaccctgctgaggaagtttatcagggtgggctcccttcctgcacttcctgcgcttggagacattggagagcccacattgaaaatctcttcagttaaccacatttaagtcccttcagtccaaagaggaaatggccactggagtctgctttagttcccacaagctttgggttgctccttcctcctgttcacatgttaatgtctttagaggttcagaggggcatggaagctactgagagactgacttcctggggaaaggaagataacttgtaaccttaagttggtgttttctttttttttttgagacaaagtctcgctctgcagcctgggctatagagccagactccatctcaaaaattaaaataaaataaaataaaataaaataaaa

SEQ ID NO: 434950 - DNA, 1467 bp, Homo sapiens
tcaagtttctctctcagaacaaatgcagtgttaatcccgaagccgcttgcgggacactggcttcttctcctcagtttcctccctaatatatttgttgaggggtaatacaaaatcactgggaaactgattagagcagatttgaagacaaaattgtggcctggtaacttagcaaaagcataatggtgtcatcttgtatgctgatgataacgttctgggcactttgttactttcgttttcttttttccctctgtgtgtctttgtgtgtgtttgtgtgtgtgctcacacccacacgtgtgactttgcacgcatttgtctttgagagagagataatagtttttgtttttctttcagtagccaaagtttaaaccattgctttttctttgattctatcgcttttaaggtgatctttcttaacacaggataagaaagcagtaatgtcctaaagaatgctgttgaattaattagtatcagcctctcctacagttctggaaggatacgtggttaagtaccactcctggatgaatcagaaaaacagccacttgagcaatttcgtgttctgtggttcagatgagaatcccagttgagaaagtaagaaaatatgtgtttattcttcagctttaaattgttatatcacaaacttccttcctccttggcaagctttcttttttgacgagaagaaaattgtaataaacaacagtatgactaatagatagtcacatggttacttccagtttgcaaaatgctatttatactttgagttactcttcaaaagtggtatacctctagtttggagctgtgctgtaaaaacaagagtaacatttttatattaaagttaaataaagttacaactttgaagagagtttctgcaagacatgacacaaagctgctagcagaaaatcaaaacgctgattaaaagaagcacggtatgatgaccaaacataaaaagtgttttataattgttggtgttttaataacaactaatattattactctgatagttaaactaactcgagattctcagagtttatgcccctatgattggattggtttccaaaacaaatgctattatttctctaaagaagaaggagattggaattcaagtaaatacaactgttccactcaacatgccgacctaactataattgacaacatagaagaaatgaattttcttaggcggtataaatgcagttctgatcactggattggactgaagatggcaaaaaatcgaacaggacaatgggtagatggagctacatttaccaaatcgtttggcatgagagggagtgaaggatgtgcctacctcagcgatgatggtgcagcaacagctagatgttacaccgaaagaaaatggatttgcaggaaaagaatacactaagttaatgtctaagataatggggaaaatagaaaataacattattaagtgtaaaaccagcaaagtacttttttaattaaacaaagttcgagttt

SEQ ID NO: 434951 - DNA, 973 bp, Homo sapiens
tttcctgcgtttccctgatcctgtggatattcgttttcctcgcctgacgcttgttgaatcgccggtccttgaggatctgtttatccgactcactttgggctgctagttccctgtcactcgtacggcctgatgcgcagcgaagtcaggtgtggcgaggtatcgcgccgtgcattaactttcggtattagcaatacattattacgtaacgtttctcaggttcgtgcggttccccggcacatatcgcccggggaaattcggcccattacgggcccggtgggtggtatacctctagtttggagctgtgctgtaaaaacaagagtaacatttttatattaaagttaaataaagttacaactttgaagagagtttctgcaagacatgacacaaagctgctagcagaaaatcaaaacgctgattaaaagaagcacggtatgatgaccaaacataaaaagtgttttataattgttggtgttttaataacaactaatattattactctgatagttaaactaactcgagattctcagagtttatgcccctatgattggattggtttccaaaacaaatgctattatttctctaaagaagaaggagattggaattcaagtaaatacaactgttccactcaacatgccgacctaactataattgacaacatagaagaaatgaattttcttaggcggtataaatgcagttctgatcactggattggactgaagatggcaaaaaatcgaacaggacaatgggtagatggagctacatttaccaaatcgtttggcatgagagggagtgaaggatgtgcctacctcagcgatgatggtgcagcaacagctagatgttacaccgaaagaaaatggatttgcaggaaaagaatacactaagttaatgtctaagataatggggaaaatagaaaataacattattaagtgtaaaaccagcaaagtacttttttaattaaacaaagttcgagttt

SEQ ID NO: 434952 - DNA, 1215 bp, Homo sapiens
cgaactgatagctccactgattacatgtaaccaacctaatgccagtttaacatgtacaaattcttggaaaagaaactcttttgatccaaattggtataggtatctcaacattagcaagagagaactgtgccatagtacaccttgcagcactttagacaagtagaatttttgtttaaaggtgtccatgggcaaggaagaaatcacatgactacataatggttaatccctttgttgcaggtttggcatgagagggagtgaaggatgtgcctacctcagcgatgatggtgcagcaacagctagatgttacaccgaaagaaaatggatttgcaggaaaagaatacactaagttaatgtctaagataatggggaaaatagaaaataacattattaagtgtaaaaccagcaaagtacttttttaattaaacaaagttcgagttttgtacctgtctggttaattctgcttacgtgtcaggctacacataaaagccacttcaaagattggcaaaaaatggttacaggtattctgctgagttttttctttctttctttctctctctctctttctttctttctctttctttctttctttctttctttctttttttaactgtaaaccagaaaacaattgtggggatcaaggacagacatagcacttagacaggactttcatgacccaatatggaacaatttgagtaccagaataggagattatggcctattgaacaaaatgtgaaactgggagtccacaaagacataaatggaaagatgaagtacctcctgacagagcaagaatggcactgaacaatgttatatggacaatggctattttattcaagactattacaatagggaaaagagactaggactcagtctgaactgaaatctgtcaaaacaaaggggggtggggctttaagagtgaaggtgaggaggagatcacacaccgtatgtgtttgctaactggctttacccaaaagaaaattaaactttctttgatctgtacaagttgatcaaacaaatggggtcattcttgtcatatgcaactaaaacagggtagacaggccaggggaaaaaggcactcagggcacacagcattgcttcaaaatataattctctacaaacctagttgctaaaactacctgttgtaacctaaaaccagttttatctaacagctattaaaacaacctactgtgactgcaaaactggttttacccacca

SEQ ID NO: 434953 - DNA, 670 bp, Homo sapiens
ggaagtggacaaatagtgtaataaatatgtggtaattggaaatgctgtgcgagagctcaatttcaaacttgtctttctaggagcttacagtttgaaaattgtgaaggaatagatattcaaattgaacatttatcaatttggaatcatatctaaagaaaatgtatctaacatatttgtttcacaaaaaaaactgaaggtcagaggaaaaataaagtactttttcaaaactccatagctattttctagtgaggccaggagttgaacaattgttgccttgcacttcacaacctacgaaacaagaggtacacagtaggttgtcataaaaattggcatgtatgattttgaaattaattttgtctctaaagaattttcttaggcggtataaatgcagttctgatcactggattggactgaagatggcaaaaaatcgaacaggacaatgggtagatggagctacatttaccaaatcgtttggcatgagagggagtgaaggatgtgcctacctcagcgatgatggtgcagcaacagctagatgttacaccgaaagaaaatggatttgcaggaaaagaatacactaagttaatgtctaagataatggggaaaatagaaaataacattattaagtgtaaaaccagcaaagtacttttttaattaaacaaagttcgagttt

SEQ ID NO: 434954 - DNA, 1013 bp, Homo sapiens
  misc_feature (956)..(956): n is a, c, g, or t
  misc_feature (1001)..(1001): n is a, c, g, or t
tcaagtttctctctcagaacaaatgcagtgttaatcccgaagccgcttgcgggacactggcttcttctcctcagtttcctccctaatatatttgttgaggggtaatacaaaatcactgggaaactgattagagcagatttgaagacaaaattgtggcctggtaacttagcaaaagcataatggtgtcatcttgtatgctgatgataacgttctgggcactttgttactttcgttttcttttttccctctgtgtgtctttgtgtgtgtttgtgtgtgtgctcacacccacacgtgtgactttgcacgcatttgtctttgagagagagataatagtttttgtttttctttcagtagccaaagtttaaaccattgctttttctttgattctatcgcttttaaggtgatctttcttaacacaggataagaaagcagtaatgtcctaaagaatgctgttgaattaattagtatcagcctctcctacagttctggaaggatacgtggttaagtaccactcctggatgaatcagaaaaacagccacttgagcaatttcgtgttctgtggttcagatgagaatcccagttgagaaagtaagaaaatatgtgtttattcttcagctttaaattgttatatcacaaacttccttcctccttggcaagctttcttttttgacgagaagaaaattgtaataaacaacagtatgactaatagatagtcacatggttacttccagtttgcaaaatgctatttatactttgagttactcttcaaaagtggtatacctctagtttggagctgtgctgtaaaaacaagagtaacatttttatattaaagttaaataaagttacaactttgaagagagtttctgcaagacatgacacaaagctgctagcagaaaatcaaaacgctgattaaaagaagcacgtatgatgaccaacatagtgtttataatggtggngtttaataacactaatattattacccgataggtctctcgagatcncagggttgcccc

SEQ ID NO: 434955 - DNA, 927 bp, Homo sapiens
tcaagtttctctctcagaacaaatgcagtgttaatcccgaagccgcttgcgggacactggcttcttctcctcagtttcctccctaatatatttgttgaggggtaatacaaaatcactgggaaactgattagagcagatttgaagacaaaattgtggcctggtaacttagcaaaagcataatggtgtcatcttgtatgctgatgataacgttctgggcactttgttactttcgttttcttttttccctctgtgtgtctttgtgtgtgtttgtgtgtgtgctcacacccacacgtgtgactttgcacgcatttgtctttgagagagagataatagtttttgtttttctttcagtagccaaagtttaaaccattgctttttctttgattctatcgcttttaaggtgatctttcttaacacaggataagaaagcagtaatgtcctaaagaatgctgttgaattaattagtatcagcctctcctacagttctggaaggatacgtggttaagtaccactcctggatgaatcagaaaaacagccacttgagcaatttcgtgttctgtggttcagatgagaatcccagttgagaaagtaagaaaatatgtgtttattcttcagctttaaattgttatatcacaaacttccttcctccttggcaagctttcttttttgacgagaagaaaattgtaataaacaacagtatgactaatagatagtcacatggttacttccagtttgcaaaatgctatttatactttgagttactcttcaaaagtggtatacctctagtttggagctgtgctgtaaaaatttctgtcatttggtggtattgagagtgagagatttcttccaaggttatatgaagtttcccaggttgtataagacaccaaagtgttataatggtctccattcatcagtttccactgatta

SEQ ID NO: 434956 - DNA, 1531 bp, Homo sapiens
tcaagtttctctctcagaacaaatgcagtgttaatcccgaagccgcttgcgggacactggcttcttctcctcagtttcctccctaatatatttgttgaggggtaatacaaaatcactgggaaactgattagagcagatttgaagacaaaattgtggcctggtaacttagcaaaagcataatggtgtcatcttgtatgctgatgataacgttctgggcactttgttactttcgttttcttttttccctctgtgtgtctttgtgtgtgtttgtgtgtgtgctcacacccacacgtgtgactttgcacgcatttgtctttgagagagagataatagtttttgtttttctttcagtagccaaagtttaaaccattgctttttctttgattctatcgcttttaaggtgatctttcttaacacaggataagaaagcagtaatgtcctaaagaatgctgttgaattaattagtatcagcctctcctacagttctggaaggatacgtggttaagtaccactcctggatgaatcagaaaaacagccacttgagcaatttcgtgttctgtggttcagatgagaatcccagttgagaaagtaagaaaatatgtgtttattcttcagctttaaattgttatatcacaaacttccttcctccttggcaagctttcttttttgacgagaagaaaattgtaataaacaacagtatgactaatagatagtcacatggttacttccagtttgcaaaatgctatttatactttgagttactcttcaaaagtggtatacctctagtttggagctgtgctgtaaaaacaagagtaacatttttatattaaagttaaataaagttacaactttgaagagagtttctgcaagacatgacacaaagctgctagcagaaaatcaaaacgctgattaaaagaagcacggtatgatgaccaaacataaaaagtgttttataattgttggtgttttaataacaactaatattattactctgatagttaaactaactcgagattctcagagtttatgcccctatgattggattggtttccaaaacaaatgctattatttctctaaagaagaaggagattggaattcaagtaaatacaactgttccactcaacatgccgacctaactataattgacaacatagaagaaatgaattttcttaggcggtataaatgcagttctgatcactggattggactgaagatggcaaaaaatcgaacaggacaatgggtagatggagctacatttaccaaatcgtttggcatgagagggagtgaaggatgtgcctacctcagcgatgatggtgcagcaacagctagatgttacaccgaaagaaaatggatttgcaggaaaagaatacactaagttaatgtctaagataatggggaaaatagaaaataacattattaagtgtaaaaccagcaaagtacttttttaattaaacaaagttcgagttttgtacctgtctggttaattctgcttacgtgtcaggctacacataaaagccacttcaaagattgg

SEQ ID NO: 434957 - DNA, 1037 bp, Homo sapiens
tttcctgcgtttccctgatcctgtggatattcgttttcctcgcctgacgcttgttgaatcgccggtccttgaggatctgtttatccgactcactttgggctgctagttccctgtcactcgtacggcctgatgcgcagcgaagtcaggtgtggcgaggtatcgcgccgtgcattaactttcggtattagcaatacattattacgtaacgtttctcaggttcgtgcggttccccggcacatatcgcccggggaaattcggcccattacgggcccggtgggtggtatacctctagtttggagctgtgctgtaaaaacaagagtaacatttttatattaaagttaaataaagttacaactttgaagagagtttctgcaagacatgacacaaagctgctagcagaaaatcaaaacgctgattaaaagaagcacggtatgatgaccaaacataaaaagtgttttataattgttggtgttttaataacaactaatattattactctgatagttaaactaactcgagattctcagagtttatgcccctatgattggattggtttccaaaacaaatgctattatttctctaaagaagaaggagattggaattcaagtaaatacaactgttccactcaacatgccgacctaactataattgacaacatagaagaaatgaattttcttaggcggtataaatgcagttctgatcactggattggactgaagatggcaaaaaatcgaacaggacaatgggtagatggagctacatttaccaaatcgtttggcatgagagggagtgaaggatgtgcctacctcagcgatgatggtgcagcaacagctagatgttacaccgaaagaaaatggatttgcaggaaaagaatacactaagttaatgtctaagataatggggaaaatagaaaataacattattaagtgtaaaaccagcaaagtacttttttaattaaacaaagttcgagttttgtacctgtctggttaattctgcttacgtgtcaggctacacataaaagccacttcaaagattgg

SEQ ID NO: 434958 - DNA, 1323 bp, Homo sapiens
tcaagtttctctctcagaacaaatgcagtgttaatcccgaagccgcttgcgggacactggcttcttctcctcagtttcctccctaatatatttgttgaggggtaatacaaaatcactgggaaactgattagagcagatttgaagacaaaattgtggcctggtaacttagcaaaagcataatggtgtcatcttgtatgctgatgataacgttctgggcactttgttactttcgttttcttttttccctctgtgtgtctttgtgtgtgtttgtgtgtgtgctcacacccacacgtgtgactttgcacgcatttgtctttgagagagagataatagtttttgtttttctttcagtagccaaagtttaaaccattgctttttctttgattctatcgcttttaaggtgatctttcttaacacaggataagaaagcagtaatgtcctaaagaatgctgttgaattaattagtatcagcctctcctacagttctggaaggatacgtggttaagtaccactcctggatgaatcagaaaaacagccacttgagcaatttcgtgttctgtggttcagatgagaatcccagttgagaaagtaagaaaatatgtgtttattcttcagctttaaattgttatatcacaaacttccttcctccttggcaagctttcttttttgacgagaagaaaattgtaataaacaacagtatgactaatagatagtcacatggttacttccagtttgcaaaatgctatttatactttgagttactcttcaaaagtggtatacctctagtttggagctgtgctgtaaaaacaagagtaacatttttatattaaagttaaataaagttacaactttgaagagagtttctgcaagacatgacacaaagctgctagcagaaaatcaaaacgctgattaaaagaagcacggtatgatgaccaaacataaaaagtgttttataattgttggtgttttaataacaactaatattattactctgatagttaaactaactcgagattctcagagtttatgcccctatgattggattggtttccaaaacaaatgctattatttctctaaagaagaaggagattggaattcaagtaaatacaactgttccactcaacatgccgacctaactataattgacaacatagaagaaatgaattttcttaggcggtataaatgcagttctgatcactggattggactgaagatggcaatgagaggctgtgcacgatgttcctacctaactgatgatggttcccgagcaagtagctgttccccctcagataatgttttgcacgaaagaatcactaactttag

SEQ ID NO: 434959 - DNA, 1455 bp, Homo sapiens
tcaagtttctctctcagaacaaatgcagtgttaatcccgaagccgcttgcgggacactggcttcttctcctcagtttcctccctaatatatttgttgaggggtaatacaaaatcactgggaaactgattagagcagatttgaagacaaaattgtggcctggtaacttagcaaaagcataatggtgtcatcttgtatgctgatgataacgttctgggcactttgttactttcgttttcttttttccctctgtgtgtctttgtgtgtgtttgtgtgtgtgctcacacccacacgtgtgactttgcacgcatttgtctttgagagagagataatagtttttgtttttctttcagtagccaaagtttaaaccattgctttttctttgattctatcgcttttaaggtgatctttcttaacacaggataagaaagcagtaatgtcctaaagaatgctgttgaattaattagtatcagcctctcctacagttctggaaggatacgtggttaagtaccactcctggatgaatcagaaaaacagccacttgagcaatttcgtgttctgtggttcagatgagaatcccagttgagaaagtaagaaaatatgtgtttattcttcagctttaaattgttatatcacaaacttccttcctccttggcaagctttcttttttgacgagaagaaaattgtaataaacaacagtatgactaatagatagtcacatggttacttccagtttgcaaaatgctatttatactttgagttactcttcaaaagtggtatacctctagtttggagctgtgctgtaaaaacaagagtaacatttttatattaaagttaaataaagttacaactttgaagagagtttctgcaagacatgacacaaagctgctagcagaaaatcaaaacgctgattaaaagaagcacggtatgatgaccaaacataaaaagtgttttataattgttggtgttttaataacaactaatattattactctgatagttaaactaactcgagattctcagagtttatgcccctatgattggattggtttccaaaacaaatgctattatttctctaaagaagaaggagattggaattcaagtaaatacaactgttccactcaacatgccgacctaactataattgacaacatagaagaaatggtaagtaatttaatatacattctttgtgaattttcttgagtcggagcattagaaatattcaaacaccattataatcttgaagtcttttcactcatgcctatctatgcagaaaattgaagatgttcagagtatgccatgtgacataaaggtgaaacacctagtgatgctctgtttgaagaatgtaagactaacatcaagtagtagacttaatacctatctttatattttaaagagtgtacacagaagagcttgataatgtttgaaaacgttttaagagccaatactccaccaag

SEQ ID NO: 434960 - DNA, 1392 bp, Homo sapiens
tcaagtttctctctcagaacaaatgcagtgttaatcccgaagccgcttgcgggacactggcttcttctcctcagtttcctccctaatatatttgttgaggggtaatacaaaatcactgggaaactgattagagcagatttgaagacaaaattgtggcctggtaacttagcaaaagcataatggtgtcatcttgtatgctgatgataacgttctgggcactttgttactttcgttttcttttttccctctgtgtgtctttgtgtgtgtttgtgtgtgtgctcacacccacacgtgtgactttgcacgcatttgtctttgagagagagataatagtttttgtttttctttcagtagccaaagtttaaaccattgctttttctttgattctatcgcttttaaggtgatctttcttaacacaggataagaaagcagtaatgtcctaaagaatgctgttgaattaattagtatcagcctctcctacagttctggaaggatacgtggttaagtaccactcctggatgaatcagaaaaacagccacttgagcaatttcgtgttctgtggttcagatgagaatcccagttgagaaagtaagaaaatatgtgtttattcttcagctttaaattgttatatcacaaacttccttcctccttggcaagctttcttttttgacgagaagaaaattgtaataaacaacagtatgactaatagatagtcacatggttacttccagtttgcaaaatgctatttatactttgagttactcttcaaaagtggtatacctctagtttggagctgtgctgtaaaaacaagagtaacatttttatattaaagttaaataaagttacaactttgaagagagtttctgcaagacatgacacaaagctgctagcagaaaatcaaaacgctgattaaaagaagcacgttaaactaactcgagattctcagagtttatgcccctatgattggattggtttccaaaacaaatgctattatttctctaaagaagaaggagattggaattcaagtaaatacaactgttccactcaacatgccgacctaactataattgacaacatagaagaaatgaattttcttaggcggtataaatgcagttctgatcactggattggactgaagatggcaaaaaatcgaacaggacaatgggtagatggagctacatttaccaaatcgtttggcatgagagggagtgaaggatgtgcctacctcagcgatgatggtgcagcaacagctagatgttacaccgaaagaaaatggatttgcaggaaaagaatacactaagttaatgtctaagataatggggaaaatagaaaataacattattaagtgtaaaaccagcaaagtacttttttaattaaacaaagttcgagttt

SEQ ID NO: 434961 - DNA, 2244 bp, Homo sapiens
tcaagtttctctctcagaacaaatgcagtgttaatcccgaagccgcttgcgggacactggcttcttctcctcagtttcctccctaatatatttgttgaggggtaatacaaaatcactgggaaactgattagagcagatttgaagacaaaattgtggcctggtaacttagcaaaagcataatggtgtcatcttgtatgctgatgataacgttctgggcactttgttactttcgttttcttttttccctctgtgtgtctttgtgtgtgtttgtgtgtgtgctcacacccacacgtgtgactttgcacgcatttgtctttgagagagagataatagtttttgtttttctttcagtagccaaagtttaaaccattgctttttctttgattctatcgcttttaaggtgatctttcttaacacaggataagaaagcagtaatgtcctaaagaatgctgttgaattaattagtatcagcctctcctacagttctggaaggatacgtggttaagtaccactcctggatgaatcagaaaaacagccacttgagcaatttcgtgttctgtggttcagatgagaatcccagttgagaaagtaagaaaatatgtgtttattcttcagctttaaattgttatatcacaaacttccttcctccttggcaagctttcttttttgacgagaagaaaattgtaataaacaacagtatgactaatagatagtcacatggttacttccagtttgcaaaatgctatttatactttgagttactcttcaaaagtggtatacctctagtttggagctgtgctgtaaaaacaagagtaacatttttatattaaagttaaataaagttacaactttgaagagagtttctgcaagacatgacacaaagctgctagcagaaaatcaaaacgctgattaaaagaagcacggtatgatgaccaaacataaaaagtgttttataattgttggtgttttaataacaactaatattattactctgatagttaaactaactcgagattctcagagtttatgcccctatgattggattggtttccaaaacaaatgctattatttctctaaagaagaaggagattggaattcaagtaaatacaactgttccactcaacatgccgacctaactataattgacaacatagaagaaatgaattttcttaggcggtataaatgcagttctgatcactggattggactgaagatggcaaaaaatcgaacaggacaatgggtagatggagctacatttaccaaatcgtttggcatgagagggagtgaaggatgtgcctacctcagcgatgatggtgcagcaacagctagatgttacaccgaaagaaaatggatttgcaggaaaagaatacactaagttaatgtctaagataatggggaaaatagaaaataacattattaagtgtaaaaccagcaaagtacttttttaattaaacaaagttcgagttttgtacctgtctggttaattctgcttacgtgtcaggctacacataaaagccacttcaaagattggcaaaaaatggttacaggtattctgctgagttttttctttctttctttctctctctctctttctttctttctctttctttctttctttctttctttctttttttaactgtaaaccagaaaacaattgtggggatcaaggacagacatagcacttagacaggactttcatgacccaatatggaacaatttgagtaccagaataggagattatggcctattgaacaaaatgtgaaactgggagtccacaaagacataaatggaaagatgaagtacctcctgacagagcaagaatggcactgaacaatgttatatggacaatggctattttattcaagactattacaatagggaaaagagactaggactcagtctgaactgaaatctgtcaaaacaaaggggggtggggctttaagagtgaaggtgaggaggagatcacacaccgtatgtgtttgctaactggctttacccaaaagaaaattaaactttctttgatctgtacaagttgatcaaacaaatggggtcattcttgtcatatgcaactaaaacagggtagacaggccaggggaaaaaggcactcagggcacacagcattgcttcaaaatataattctctacaaacctagttgctaaaactacctgttgtaacctaaaaccagttttatctaacagctattaaaacaacctactgtgactgcaaaactggttttacccacca

SEQ ID NO: 434962 - DNA, 1105 bp, Homo sapiens
agcggagttctagaacgttgctgtggtagcgctcgggcgccatgttaggacgaaggggaaggaggagaagcgcttaaagcggcgggagcggtgcgggagaggggttggacccagggctgaggcaggcccccccctccctcccgcctcagtggatcatgcccagggcggcagcggcggcggttgcgggggggaagtgactgggcggtgccggcgccggagacgatgccgtttccagttacaacacagggatcacaacaaacacaaccgccacagaagcactatggcattacttctcctatcagcttagcagcccccaaggagactgactgcgtacttacacagaaactaattgagacattgaaaccctttggggtttttgaagaggaagaggaactgcagcgcaggattttaattttgggaaaactaaataacctggtaaaagagtggatacgagaaatcagtgaaagcaagaatcttccacaatctgtaattgaaaatgttggaggaaaaatttttacatttggatcttacagattaggagtgcatacaaaaggtgctgatattgatgcgttgtgtgttgcaccaagacatgttgatcgaagtgactttttcacctcattctatgataagttgaaattacaggaagaagtaaaagatttaagagctgttgaagaggcattcgtaccagttattaaactctgttttgatgggatagagattgatattttgtttgcaagattagcactgcagacaattcctgaagatttggatctacgagatgacagtctgctaaaaaatttagatataagatgtataagaagtcttaacggttgcagggtaaccgatgaaattttacatctagtaccaaacattgacaacttcaggttaactctgagagctatcaaactatgggccaaacgccacaacatctattccaatatattaggtttcctcggtggtgtttcctgggctatgctagtagcaagaacttgccagctttatccaaatgcaatagcatcaactcttgtacataaatttttcttggtattttctaaatggtatgtgtttagattatattaaaataaaattgattgtagacactgaa

SEQ ID NO: 434963 - DNA, 4520 bp, Homo sapiens
agcggagttctagaacgttgctgtggtagcgctcgggcgccatgttaggacgaaggggaaggaggagaagcgcttaaagcggcgggagcggtgcgggagaggggttggacccagggctgaggcaggcccccccctccctcccgcctcagtggatcatgcccagggcggcagcggcggcggttgcgggggggaagtgactgggcggtgccggcgccggagacgatgccgtttccagttacaacacagggatcacaacaaacacaaccgccacagaagcactatggcattacttctcctatcagcttagcagcccccaaggagactgactgcgtacttacacagaaactaattgagacattgaaaccctttggggtttttgaagaggaagaggaactgcagcgcaggattttaattttgggaaaactaaataacctggtaaaagagtggatacgagaaatcagtgaaagcaagaatcttccacaatctgtaattgaaaatgttggaggaaaaatttttacatttggatcttacagattaggagtgcatacaaaaggtgctgatattgatgcgttgtgtgttgcaccaagacatgttgatcgaagtgactttttcacctcattctatgataagttgaaattacaggaagaagtaaaagatttaagagctgttgaagaggcattcgtaccagttattaaactctgttttgatgggatagagattgatattttgtttgcaagattagcactgcagacaattcctgaagatttggatctacgagatgacagtctgctaaaaaatttagatataagatgtataagaagtcttaacggttgcagggtaaccgatgaaattttacatctagtaccaaacattgacaacttcaggttaactctgagagctatcaaactatgggccaaacgccacaacatctattccaatatattaggtttcctcggtggtgtttcctgggctatgctagtagcaagaacttgccagctttatccaaatgcaatagcatcaactcttgtacataaatttttcttggtattttctaaatgggaatggccaaatccagtgctattgaaacagcctgaagaatgcaatcttaatttgcctgtatgggacccaagggtaaaccccagtgataggtaccatcttatgcctataattacaccagcatacccacaacagaactccacgtacaatgtgtccgtttcaacacggatggtcatggttgaggagtttaaacaaggtcttgctatcacagatgaaattttgctgagtaaggcagagtggtccaaactttttgaagctccaaacttctttcaaaagtacaagcattatattgtacttctagcaagtgcaccaacagaaaaacaacgcctggaatgggtgggcttggtggaatcaaaaatccgaatcctggttggaagcttggagaagaatgaatttattacactggctcatgtgaatccccagtcatttccagcacccaaagaaaatcccgacaaggaagaatttcgcacgatgtgggtgattgggttagtgtttaaaaaaacagaaaactctgaaaacctcagtgttgatctcacctatgatattcagtctttcacagatacagtttataggcaagcaataaacagcaagatgtttgaggtggatatgaaaattgctgcaatgcatgtaaaaagaaagcaactccatcaactactacctaatcatgtgcttcagaaaaagaaaaagcattcaacagaaggtgtcaaattgacagctctcaatgacagcagcctcgacttgtctatggacagtgataacagcatgtctgtgccttcacctactagtgctacgaagaccagtccattgaacagttctggcagctctcagggcagaaacagtcctgctccagctgtaacagcagcatctgtgaccaacatacaggctactgaagtttctgtgccacaagtaaattccagtgaaagctcagggggtacatcgagtgaaagcattcctcaaactgccacacaaccagccatttctccaccaccaaagcctacggtctccagagttgtttcttcaacacgtctggtaaacccaccacctagatcttcaggaaatgcagcaacttcaggaaatgcagcaacaaaaatacctactcctatagtaggagtcaagaggacatcctcacctcataaagaagagagtcccaagaaaaccaaaacagaagaggatgaaacaagtgaagatgctaactgtcttgctttgagtggacatgataaaacagaagcaaaggaacaacttgatacagagacaagtacaactcaatcagaaactattcagacagcggcttctctgttggcctctcagaaaacatccagtacagacctttctgatatccctgctctccctgcaaatcctattcctgttatcaagaattcaataaaactgagattgaatcggtaaaaacaacctcaggggtccataaacaatatctgccaactcaacctgttgtcttcaaatgctaaaaaaggagaatggagggtacaagactagacatgactgaaatggatttgggttttttggtgacctcccttactgggctaatcagcacttgatcggaagtccaggttagtatgtgaagccaggagtactattattattgtgttagcaacagttgcattaactatttcaaaaattactgcctttaaaaaaaacaacctcaagctatatttgtattcataattgacatctggattgggtttatgtttgatgcattgtttggaaaatttgcaatacaaactggcataagaattacttattctgatgatgcacttttatgtatttttcattagaaagtagaactaattttagattttcagcttgatggattttcagtttttcctgaagaattttctttaccattagtcttcaaattggatactgttgtgcagtggtgtactgttatacttcagagaaagggtaagagtacatctagttcagttcctatgaggtagctgtaacccttaaaaatgaaacgtcaactctagggtacatttgacattgaaagaatagttaggaaataacttggttttgatagggtcatgattaagaaatgatatattggttttatttatggaattgttttatagtgcatacaaatcagcgatcagccagcaaatatttttctttgagcttgtgaaagctctgtgttcttttgccttcaatctgttgtcttcaaaacaaacaaacaaaaaaagcttcttgcgcctttccctcccctgttttcttcctttttctttttgcttgtatgcacaaggtaggacttacttcgtaagaaacaaaatgccagtattttcttaagccatgatgtgaaaccaatgaccctgtgaccacatggcacagaacactaaattttggtcccatggctgaaacttgagggtgactaaaagtaatgcctgtgaaacatgatatctatctgggatggccatttgatctctaaaaggaattttgtacactccacagaactcctatctatagtaaaattgattttcagttttaaatgtgggcaaaaaggcattttctccaagattttaaaactaattcttatttttaaatggtttaccaaaatttgtcagtacattttacgtgtagaagcattttaaaaatcatttctagcaagcacttgacatctagtcagctctctactcctttattttgttttatcaaaagattaagagctcctttctttgaataaaataatttctcataattaagcagtagaagatctatcttcacaaagtatgagggatgccagatgttgataaacttactctttctgaatctggacaaagtcgacttaacagatttttctgatgagcatgttttatgaatcctccattgtgctccattctatcacatgtgcatttttcatgttaaactgcaattacttaatctcttcccctatccttctaaattaattttctgaagttggagtgtagtcttttcccccttaggctatgcattaatcgaagctttcttttcaccatgactttataatgtctagtaaacaatatttctacttcccacatctttgctttacacagtcaccttgcccttccttccaccaccgaagaaaaaagatggtcatactaacaggtgaaatgtacaaggtgtctgtgtgttttgtgtagcttcagagttagattgaaattaccaggcacagatttagtcttgtcattttgtttacacattggggaaaacaattcagtttattaaacgtttcatgtaactgcacccaagttttgccaagctggaaacttggaccttttctgtgtagtgactttttaattatagttttcataacctggagatcagactgttgctttcgcatgatgtatgtagtgtctcatgactggagtttgctttgttttatagtatctgtactccttgtatttttcaagagctattttgtaaacagatgatgtatttctccattgaaaacacaataaaaaaaaacagcacaa

SEQ ID NO: 434964 - DNA, 1891 bp, Homo sapiens
aaggtttccgtaggtgaacctgcggaaggatcattaaatatccagcacaaagcgtgtaaataaaataaatagcatgttgtctttatcttcaaaggcattatattgtacttctagcaagtgcaccaacagaaaaacaacgcctggaatggtgagtataagaatagactttacagaaaaagcaaacttcaaaatgaatcacatagccactgaacacagtaggagatgggaggaagtccttaaaacttctagtttggtttgatttgttcacaaatggagctttactgtgtgtagtggaagtacagaaatcaggagatccatatgcaacttatttttttgtttgctttatggagatccgtgcataatttcttaattgtatatttaaagtgcacttatagcttgtttttcttaaaatttttgtgtggataacttttgtaaccttgctggtgtgaatggagtgtttcttggctcttttttccccgttgtttggcaattttgggtagaacataaggcttctggttttatctgtgggagttcagctagttgaaatgccctggtatgtgcattttatttatttatttttaagttaaccaaaactttttgttaatactaagtgacatttgttcagggtgggcttggtggaatcaaaaatccgaatcctggttggaagcttggagaagaatgaatttattacactggctcatgtgaatccccagtcatttccagcacccaaagaaaatcccgacaaggaagaatttcgcacgatgtgggtgattgggttagtgtttaaaaaaacagaaaactctgaaaacctcagtgttgatctcacctatgatattcagtctttcacagatacagcattcaacagaaggtgtcaaattgacagctctcaatgacagcagcctcgacttgtctatggacagtgataacagcatgtctgtgccttcacctactagtgctacgaagaccagtccattgaacagttctggcagctctcaggggtaaggaaaaagagggaaatagaagtggaggggctgtttgctaaatcaatcagatacattctctttttgctattaaagtcatctatttagaatgttattttcattccatctactaatttttttttaaatagcaatttaattcccaggtttggggatagtactttttggttttgtcttgtcatacttaacattttatttttgagactgataatgtcttcagtcagatgtgaatgaatgttagcacataacccctccaaattcatgtatttagatagctactgctacagtgcactgtatggtgtgctgatgagaacagacaaaaggaacaaaaccacctttctgtcccagagctgcttatacctttgtaacagggaatgtgtctatgatagttagggaaacctgttttagaagagctagatatctgtctaacatttacagcagttaaaattttaaaaatttattattattttgagaaatggggtctggctgtgttgtttaggctggccttgagttcctggatttaagcgatcctcctacttcaaccttctgagtagctgagactacaggcgcatgccactgccctgggtatgaagcagtgaaaaattttcagccaggtgcagtgactcacacctgtaatcccaacacttggggaggctgaggtggtaggatcacttgaggccaggagttcaagaccagcctgggcaacgtagtgagactcccatctctagaaaaaagtaaaagaattaggtgtggtggtatgcacctgtagtcgtggccactcaggaggctgaggtgggaggattgcttgaacctgcaaggttgagactacagtgagctgtgatcccactgctgtaccccagcctgggcaaccagagtgagaccctgtcttaaaa

SEQ ID NO: 434965 - DNA, 1019 bp, Homo sapiens
  misc_feature (159)..(159): n is a, c, g, or t
tgagcggtgccttgcttatgactaatagggaaggaggagaagcgcttaaagcgagcggcgagcggattcgggacgaggtgtttgaccctaggtgttgatggtcatggccactaccgcacatctctcatcgcctgccctcacgattcggatcgattgccncgattgcggacagtgtcagccgcgtagtcgtgtatgctcgtgagtgacaaagttgaacttgggccggtcgtctttaccacggagaccgatgccgtttccagttacaacacagggatcacaacaaacacaaccgccacagaagcactatggcattacttctcctatcagcttagcagcccccaaggagactgactgcgtacttacacagaaactaattgagacattgaaaccctttggggtttttgaagaggaagaggaactgcagcgcaggattttaattttgggaaaactaaataacctggtaaaagagtggatacgagaaatcagtgaaagcaaggtgctgatattgatgcgttgtgtgttgcaccaagacatgttgatcgaagtgactttttcacctcattctatgataagttgaaattacaggaagaagtaaaagatttaagagctgttgaagaggcattcgtaccagttattaaactctgttttgatgggatagagattgatattttgtttgcaagattagcactgcagacaattcctgaagatttggatctacgagatgacagtctgctaaaaaatttagatataagatgtataagaagtcttaacggtatgagaaagcctacttccttttgtgtacttcagtttttgtcagatattagttgtttttacacaagttttgtattgaagctttttatagctatattgttaacacagtagtgagttaaataaaatgaactttgcctaataaactacagaagagtatgtagtagtttatttcactctacagtattttatacactgtatttcttctgtcattaatggtatactcaggacacttaaaaagaccatctgac

SEQ ID NO: 434966 - DNA, 359 bp, Homo sapiens
ccggtccatcagcgtccatcagcggatttctatacattgacctcttgttggttatcaaatagcagtcaacgacgtgtcacacaatgatgtggtttgagggactgatgggagaagactgcgccagtcttctcctatcagcttagcagcccccaaggagactgactgcgtacttacacagaaactaattgagacattgaaaccctttggggtttttgaagaggaagaggaactgcagcgcaggtaaatagatattctatatttttttaactcggaaacttttattaatgttgacataaactaattttgaggcattctctacttacttagaagaccagggttatttgcccagatctatatat

SEQ ID NO: 434967 - DNA, 1375 bp, Homo sapiens
aattaatacattttgtgcttttattcagctcatcttgtggtaaaaggagtttgctcaggcaatgaattatgtcagattaggaataggtcttgaccgatctacagatatgcagtattgatggaaaaaggatccctacttagaatagtttctctggagtgagtataactgcctttattaaaatgtttctatttcttgtaacaatttcctaattgtatagtttataggcaagcaataaacagcaagatgtttgaggtggatatgaaaattgctgcaatgcatgtaaaaagaaagcaactccatcaactactacctaatcatgtgcttcagaaaaagaaaaagcattcaacagaaggtgtcaaattgacagctctcaatgacagcagcctcgacttgtctatggacagtgataacagcatgtctgtgccttcacctactagtgctacgaagaccagtccattgaacagttctggcagctctcaggggtaaggaaaaagagggaaatagaagtggaggggctgtttgctaaatcaatcagatacattctctttttgctattaaagtcatctatttagaatgttattttcattccatctactaatttttttttaaatagcaatttaattcccaggtttggggatagtactttttggttttgtcttgtcatacttaacattttatttttgagactgataatgtcttcagtcagatgtgaatgaatgttagcacataacccctccaaattcatgtatttagatagctactgctacagtgcactgtatggtgtgctgatgagaacagacaaaaggaacaaaaccacctttctgtcccagagctgcttatacctttgtaacagggaatgtgtctatgatagttagggaaacctgttttagaagagctagatatctgtctaacatttacagcagttaaaattttaaaaatttattattattttgagaaatggggtctggctgtgttgtttaggctggccttgagttcctggatttaagcgatcctcctacttcaaccttctgagtagctgagactacaggcgcatgccactgccctgggtatgaagcagtgaaaaattttcagccaggtgcagtgactcacacctgtaatcccaacacttggggaggctgaggtggtaggatcacttgaggccaggagttcaagaccagcctgggcaacgtagtgagactcccatctctagaaaaaagtaaaagaattaggtgtggtggtatgcacctgtagtcgtggccactcaggaggctgaggtgggaggattgcttgaacctgcaaggttgagactacagtgagctgtgatcccactgctgtaccccagcctgggcaaccagagtgagaccctgtcttaaaa

SEQ ID NO: 434968 - DNA, 1525 bp, Homo sapiens
gtactctgttgctagtgatttaggtttcatggcctaacccaaattaattttgatcctgttattctttagtaatgctttcagcattgctgagatcagaaggactactttggtacaattttatattagcatagcttgttactgtgctcttgaagagcagttcttggaaactttagtggattaagtcttccgcagtatatgtgggaagttttaattgtgaatctgaagttcaaattggggcaggttacagtttactttggtttctttggtcagtgcttacaataggagataaatgctttagattttttccccctctttattgaattagctttactggttctaccaaataaaaatttatgtttacttttaacttcaatctcagaaaatttggaagcattaccattaaacttttgatgatttaatgttgtttttttttgttttgttttgttttgtgtgtgtgtgtgtgtgtgtgtttttttttacccctattaattaggttgcagggtaaccgatgaaattttacatctagtaccaaacattgacaacttcaggttaactctgagagctatcaaactatgggccaaacgtgagttcagaatttgttggctagcttattaaaaatgttcaaacttttgttcaacactaacttatctttttgcttttcccttatcaacaggccacaacatctattccaatatattaggtttcctcggtggtgtttcctgggctatgctagtagcaagaacttgccagctttatccaaatgcaatagcatcaactcttgtacataaatttttcttggtattttctaaatggtatgtgtttagattatattaaaataaaattgattgtagacactgaagtttagtcttatttctatgacatttctcagcttggtttcagattcaaattttagttcatgatgtagtcatgtaggcagccttggagatcacattgtgtataaaatggcaaactgaaactattttttttccctagtttggccaggatagtaaggcagattctatttgtacttccttgcataaacttaccctctgaataaactctgaattttagcagctaagatccaatttattgataggttgggaaatcagttactatacttttggataaaacttgtacacactacctctttcactcttttaattctctatctataggccattagtttcttgtgattgttttttttttctttttgctttcagcatttatttggcctaatattaaagatacgaattttcataagaagcttttaaagaataaattaacattaagtgcttcgggacaaaaaaggaatttgagattagtcattaacccagatttttttaagtttcttcgtttcatttccacatatgtcaactatgatttaagaaaaagtagaataaaagattactgccattttatattaattgccttggcccaaaaggtgagggttcttggtttttaatcaaattaagatgaaatcgtccgattcctgttcttatgaactcctgctcctccctctgcaaaa

SEQ ID NO: 434969 - DNA, 4650 bp, Homo sapiens
  misc_feature (4545)..(4546): n is a, c, g, or t
  misc_feature (4553)..(4553): n is a, c, g, or t
  misc_feature (4555)..(4555): n is a, c, g, or t
  misc_feature (4560)..(4560): n is a, c, g, or t
  misc_feature (4562)..(4563): n is a, c, g, or t
  misc_feature (4566)..(4567): n is a, c, g, or t
  misc_feature (4578)..(4578): n is a, c, g, or t
  misc_feature (4583)..(4583): n is a, c, g, or t
  misc_feature (4586)..(4586): n is a, c, g, or t
  misc_feature (4590)..(4590): n is a, c, g, or t
  misc_feature (4593)..(4594): n is a, c, g, or t
  misc_feature (4598)..(4598): n is a, c, g, or t
  misc_feature (4600)..(4600): n is a, c, g, or t
  misc_feature (4607)..(4607): n is a, c, g, or t
  misc_feature (4610)..(4610): n is a, c, g, or t
agcggagttctagaacgttgctgtggtagcgctcgggcgccatgttaggacgaaggggaaggaggagaagcgcttaaagcggcgggagcggtgcgggagaggggttggacccagggctgaggcaggcccccccctccctcccgcctcagtggatcatgcccagggcggcagcggcggcggttgcgggggggaagtgactgggcggtgccggcgccggagacgatgccgtttccagttacaacacagggatcacaacaaacacaaccgccacagaagcactatggcattacttctcctatcagcttagcagcccccaaggagactgactgcgtacttacacagaaactaattgagacattgaaaccctttggggtttttgaagaggaagaggaactgcagcgcaggattttaattttgggaaaactaaataacctggtaaaagagtggatacgagaaatcagtgaaagcaagaatcttccacaatctgtaattgaaaatgttggaggaaaaatttttacatttggatcttacagattaggagtgcatacaaaaggtgctgatattgatgcgttgtgtgttgcaccaagacatgttgatcgaagtgactttttcacctcattctatgataagttgaaattacaggaagaagtaaaagatttaagagctgttgaagaggcattcgtaccagttattaaactctgttttgatgggatagagattgatattttgtttgcaagattagcactgcagacaattcctgaagatttggatctacgagatgacagtctgctaaaaaatttagatataagatgtataagaagtcttaacggttgcagggtaaccgatgaaattttacatctagtaccaaacattgacaacttcaggttaactctgagagctatcaaactatgggccaaacgccacaacatctattccaatatattaggtttcctcggtggtgtttcctgggctatgctagtagcaagaacttgccagctttatccaaatgcaatagcatcaactcttgtacataaatttttcttggtattttctaaatgggaatggccaaatccagtgctattgaaacagcctgaagaatgcaatcttaatttgcctgtatgggacccaagggtaaaccccagtgataggtaccatcttatgcctataattacaccagcatacccacaacagaactccacgtacaatgtgtccgtttcaacacggatggtcatggttgaggagtttaaacaaggtcttgctatcacagatgaaattttgctgagtaaggcagagtggtccaaactttttgaagctccaaacttctttcaaaagtacaagcattatattgtacttctagcaagtgcaccaacagaaaaacaacgcctggaatgggtgggcttggtggaatcaaaaatccgaatcctggttggaagcttggagaagaatgaatttattacactggctcatgtgaatccccagtcatttccagcacccaaagaaaatcccgacaaggaagaatttcgcacgatgtgggtgattgggttagtgtttaaaaaaacagaaaactctgaaaacctcagtgttgatctcacctatgatattcagtctttcacagatacagtttataggcaagcaataaacagcaagatgtttgaggtggatatgaaaattgctgcaatgcatgtaaaaagaaagcaactccatcaactactacctaatcatgtgcttcagaaaaagaaaaagcattcaacagaaggtgtcaaattgacagctctcaatgacagcagcctcgacttgtctatggacagtgataacagcatgtctgtgccttcacctactagtgctacgaagaccagtccattgaacagttctggcagctctcagggcagaaacagtcctgctccagctgtaacagcagcatctgtgaccaacatacaggctactgaagtttctgtgccacaagtaaattccagtgaaagctcagggggtacatcgagtgaaagcattcctcaaactgccacacaaccagccatttctccaccaccaaagcctacggtctccagagttgtttcttcaacacgtctggtaaacccaccacctagatcttcaggaaatgcagcaacttcaggaaatgcagcaacaaaaatacctactcctatagtaggagtcaagaggacatcctcacctcataaagaagagagtcccaagaaaaccaaaacagaagaggatgaaacaagtgaagatgctaactgtcttgctttgagtggacatgataaaacagaagcaaaggaacaacttgatacagagacaagtacaactcaatcagaaactattcagacagcggcttctctgttggcctctcagaaaacatccagtacagacctttctgatatccctgctctccctgcaaatcctattcctgttatcaagaattcaataaaactgagattgaatcggtaaaaacaacctcaggggtccataaacaatatctgccaactcaacctgttgtcttcaaatgctaaaaaaggagaatggagggtacaagactagacatgactgaaatggatttgggttttttggtgacctcccttactgggctaatcagcacttgatcggaagtccaggttagtatgtgaagccaggagtactattattattgtgttagcaacagttgcattaactatttcaaaaattactgcctttaaaaaaaacaacctcaagctatatttgtattcataattgacatctggattgggtttatgtttgatgcattgtttggaaaatttgcaatacaaactggcataagaattacttattctgatgatgcacttttatgtatttttcattagaaagtagaactaattttagattttcagcttgatggattttcagtttttcctgaagaattttctttaccattagtcttcaaattggatactgttgtgcagtggtgtactgttatacttcagagaaagggtaagagtacatctagttcagttcctatgaggtagctgtaacccttaaaaatgaaacgtcaactctagggtacatttgacattgaaagaatagttaggaaataacttggttttgatagggtcatgattaagaaatgatatattggttttatttatggaattgttttatagtgcatacaaatcagcgatcagccagcaaatatttttctttgagcttgtgaaagctctgtgttcttttgccttcaatctgttgtcttcaaaacaaacaaacaaaaaaagcttcttgcgcctttccctcccctgttttcttcctttttctttttgcttgtatgcacaaggtaggacttacttcgtaagaaacaaaatgccagtattttcttaagccatgatgtgaaaccaatgaccctgtgaccacatggcacagaacactaaattttggtcccatggctgaaacttgagggtgactaaaagtaatgcctgtgaaacatgatatctatctgggatggccatttgatctctaaaaggaattttgtacactccacagaactcctatctatagtaaaattgattttcagttttaaatgtgggcaaaaaggcattttctccaagattttaaaactaattcttatttttaaatggtttaccaaaatttgtcagtacattttacgtgtagaagcattttaaaaatcatttctagcaagcacttgacatctagtcagctctctactcctttattttgttttatcaaaagattaagagctcctttctttgaataaaataatttctcataattaagcagtagaagatctatcttcacaaagtatgagggatgccagatgttgataaacttactctttctgaatctggacaaagtcgacttaacagatttttctgatgagcatgttttatgaatcctccattgtgctccattctatcacatgtgcatttttcatgttaaactgcaattacttaatctcttcccctatccttctaaattaattttctgaagttggagtgtagtcttttcccccttaggctatgcattaatcgaagctttcttttcaccatgactttataatgtctagtaaacaatatttctacttcccacatctttgctttacacagtcaccttgcccttccttccaccaccgaagaaaaaagatggtcatactaacaggtgaaatgtacaaggtgtctgtgtgttttgtgtagcttcagagttagattgaaattaccaggcacagatttagtcttgtcattttgtttacacattggggaaaacaattcagtttattaaacgtttcatgtaactgcacccaagttttgccaagctggaaacttggaccttttctgtgtagtgactttttaattatagttttcataacctggagatcagactgttgctttcgcatgatgtatgtagtgtctcatgactggagtttgctttgttttatagtatctgtactccttgtatttttcaagagctattttgtaaacagatgatgtatttctccattgaaaacacaataaaaaaaaacagcacaaaaaaaaaaaaaaaaaaagggggggnnaaaatcncngggcncnncgnncctttgaaggnccaanggngtanaannaggngnggaaacnggngaaacctggttgggcccctctggggaaggacaccccaaag

SEQ ID NO: 434970 - DNA, 5077 bp, Homo sapiens
agcggagttctagaacgttgctgtggtagcgctcgggcgccatgttaggacgaaggggaaggaggagaagcgcttaaagcggcgggagcggtgcgggagaggggttggacccagggctgaggcaggcccccccctccctcccgcctcagtggatcatgcccagggcggcagcggcggcggttgcgggggggaagtgactgggcggtgccggcgccggagacgatgccgtttccagttacaacacagggatcacaacaaacacaaccgccacagaagcactatggcattacttctcctatcagcttagcagcccccaaggagactgactgcgtacttacacagaaactaattgagacattgaaaccctttggggtttttgaagaggaagaggaactgcagcgcaggattttaattttgggaaaactaaataacctggtaaaagagtggatacgagaaatcagtgaaagcaagaatcttccacaatctgtaattgaaaatgttggaggaaaaatttttacatttggatcttacagattaggagtgcatacaaaaggtgctgatattgatgcgttgtgtgttgcaccaagacatgttgatcgaagtgactttttcacctcattctatgataagttgaaattacaggaagaagtaaaagatttaagagctgttgaagaggcattcgtaccagttattaaactctgttttgatgggatagagattgatattttgtttgcaagattagcactgcagacaattcctgaagatttggatctacgagatgacagtctgctaaaaaatttagatataagatgtataagaagtcttaacggttgcagggtaaccgatgaaattttacatctagtaccaaacattgacaacttcaggttaactctgagagctatcaaactatgggccaaacgccacaacatctattccaatatattaggtttcctcggtggtgtttcctgggctatgctagtagcaagaacttgccagctttatccaaatgcaatagcatcaactcttgtacataaatttttcttggtattttctaaatgggaatggccaaatccagtgctattgaaacagcctgaagaatgcaatcttaatttgcctgtatgggacccaagggtaaaccccagtgataggtaccatcttatgcctataattacaccagcatacccacaacagaactccacgtacaatgtgtccgtttcaacacggatggtcatggttgaggagtttaaacaaggtcttgctatcacagatgaaattttgctgagtaaggcagagtggtccaaactttttgaagctccaaacttctttcaaaagtacaagcattatattgtacttctagcaagtgcaccaacagaaaaacaacgcctggaatgggtgggcttggtggaatcaaaaatccgaatcctggttggaagcttggagaagaatgaatttattacactggctcatgtgaatccccagtcatttccagcacccaaagaaaatcccgacaaggaagaatttcgcacgatgtgggtgattgggttagtgtttaaaaaaacagaaaactctgaaaacctcagtgttgatctcacctatgatattcagtctttcacagatacagtttataggcaagcaataaacagcaagatgtttgaggtggatatgaaaattgctgcaatgcatgtaaaaagaaagcaactccatcaactactacctaatcatgtgcttcagaaaaagaaaaagcattcaacagaaggtgtcaaattgacagctctcaatgacagcagcctcgacttgtctatggacagtgataacagcatgtctgtgccttcacctactagtgctacgaagaccagtccattgaacagttctggcagctctcagggcagaaacagtcctgctccagctgtaacagcagcatctgtgaccaacatacaggctactgaagtttctgtgccacaagtaaattccagtgaaagctcagggggtacatcgagtgaaagcattcctcaaactgccacacaaccagccatttctccaccaccaaagcctacggtctccagagttgtttcttcaacacgtctggtaaacccaccacctagatcttcaggaaatgcagcaacttcaggaaatgcagcaacaaaaatacctactcctatagtaggagtcaagaggacatcctcacctcataaagaagagagtcccaagaaaaccaaaacagaagaggatgaaacaagtgaagatgctaactgtcttgctttgagtggacatgataaaacagaagcaaaggaacaacttgatacagagacaagtacaactcaatcagaaactattcagacagcggcttctctgttggcctctcagaaaacatccagtacagacctttctgatatccctgctctccctgcaaatcctattcctgttatcaagaattcaataaaactgagattgaatcggtaaaaacaacctcaggggtccataaacaatatctgccaactcaacctgttgtcttcaaatgctaaaaaaggagaatggagggtacaagactagacatgactgaaatggatttgggttttttggtgacctcccttactgggctaatcagcacttgatcggaagtccaggttagtatgtgaagccaggagtactattattattgtgttagcaacagttgcattaactatttcaaaaattactgcctttaaaaaaaacaacctcaagctatatttgtattcataattgacatctggattgggtttatgtttgatgcattgtttggaaaatttgcaatacaaactggcataagaattacttattctgatgatgcacttttatgtatttttcattagaaagtagaactaattttagattttcagcttgatggattttcagtttttcctgaagaattttctttaccattagtcttcaaattggatactgttgtgcagtggtgtactgttatacttcagagaaagggtaagagtacatctagttcagttcctatgaggtagctgtaacccttaaaaatgaaacgtcaactctagggtacatttgacattgaaagaatagttaggaaataacttggttttgatagggtcatgattaagaaatgatatattggttttatttatggaattgttttatagtgcatacaaatcagcgatcagccagcaaatatttttctttgagcttgtgaaagctctgtgttcttttgccttcaatctgttgtcttcaaaacaaacaaacaaaaaaagcttcttgcgcctttccctcccctgttttcttcctttttctttttgcttgtatgcacaaggtaggacttacttcgtaagaaacaaaatgccagtattttcttaagccatgatgtgaaaccaatgaccctgtgaccacatggcacagaacactaaattttggtcccatggctgaaacttgagggtgactaaaagtaatgcctgtgaaacatgatatctatctgggatggccatttgatctctaaaaggaattttgtacactccacagaactcctatctatagtaaaattgattttcagttttaaatgtgggcaaaaaggcattttctccaagattttaaaactaattcttatttttaaatggtttaccaaaatttgtcagtacattttacgtgtagaagcattttaaaaatcatttctagcaagcacttgacatctagtcagctctctactcctttattttgttttatcaaaagattaagagctcctttctttgaataaaataatttctcataattaagcagtagaagatctatcttcacaaagtatgagggatgccagatgttgataaacttactctttctgaatctggacaaagtcgacttaacagatttttctgatgagcatgttttatgaatcctccattgtgctccattctatcacatgtgcatttttcatgttaaactgcaattacttaatctcttcccctatccttctaaattaattttctgaagttggagtgtagtcttttcccccttaggctatgcattaatcgaagctttcttttcaccatgactttataatgtctagtaaacaatatttctacttcccacatctttgctttacacagtcaccttgcccttccttccaccaccgaagaaaaaagatggtcatactaacaggtgaaatgtacaaggtgtctgtgtgttttgtgtagcttcagagttagattgaaattaccaggcacagatttagtcttgtcattttgtttacacattggggaaaacaattcagtttattaaacgtttcatgtaactgcacccaagttttgccaagctggaaacttggaccttttctgtgtagtgactttttaattatagttttcataacctggagatcagactgttgctttcgcatgatgtatgtagtgtctcatgactggagtttgctttgttttatagtatctgtactccttgtatttttcaagagctattttgtaaacagatgatgtatttctccattgaaaacacaataaaaaaaaacagcacaaaaaaaaaaaaaaaaaaaaaaaaaaaaaaaaaaaaaaaaaaaaaaaaaaaaaaaaaaaaaaaaaagaggggggggggcgaaaaaaattcccccggggggcgcgcaccaccacataatcgcgcagatcgcagcccaatattgtgttgaacaacaagaggggccccccaaaatggggggagcgactgtaaaaatataaacaggagcagcgggggccgcgcggagataaacaaccacgagggcagcatgagggagaaaaaaccgcggacgacgacgggaactacatgtgggggagaagaggagaaccaccacacatccgcggggggacgagggaaacaatatgtgtggggaacacaaacttgttctagctgagggaggagtatttataagcggctctgtgagggggagcaaatatataaaagtatttgacgaggaggtttaatgatgttgggtgtcaacacaaaccaggggaaagtttgttggtgtggagggatgtgaagaaaattttgtggacaaagggagagtatattatattagaaacaaatttttatacacgcgggt

SEQ ID NO: 434971 - DNA, 4435 bp, Homo sapiens
agcggagttctagaacgttgctgtggtagcgctcgggcgccatgttaggacgaaggggaaggaggagaagcgcttaaagcggcgggagcggtgcgggagaggggttggacccagggctgaggcaggcccccccctccctcccgcctcagtggatcatgcccagggcggcagcggcggcggttgcgggggggaagtgactgggcggtgccggcgccggagacgatgccgtttccagttacaacacagggatcacaacaaacacaaccgccacagaagcactatggcattacttctcctatcagcttagcagcccccaaggagactgactgcgtacttacacagaaactaattgagacattgaaaccctttggggtttttgaagaggaagaggaactgcagcgcaggattttaattttgggaaaactaaataacctggtaaaagagtggatacgagaaatcagtgaaagcaagaatcttccacaatctgtaattgaaaatgttggaggaaaaatttttacatttggatcttacagattaggagtgcatacaaaaggtgctgatattgatgcgttgtgtgttgcaccaagacatgttgatcgaagtgactttttcacctcattctatgataagttgaaattacaggaagaagtaaaagatttaagagctgttgaagaggcattcgtaccagttattaaactctgttttgatgggatagagattgatattttgtttgcaagattagcactgcagacaattcctgaagatttggatctacgagatgacagtctgctaaaaaatttagatataagatgtataagaagtcttaacggttgcagggtaaccgatgaaattttacatctagtaccaaacattgacaacttcaggttaactctgagagctatcaaactatgggccaaacgccacaacatctattccaatatattaggtttcctcggtggtgtttcctgggctatgctagtagcaagaacttgccagctttatccaaatgcaatagcatcaactcttgtacataaatttttcttggtattttctaaatgggaatggccaaatccagtgctattgaaacagcctgaagaatgcaatcttaatttgcctgtatgggacccaagggtaaaccccagtgataggtaccatcttatgcctataattacaccagcatacccacaacagaactccacgtacaatgtgtccgtttcaacacggatggtcatggttgaggagtttaaacaaggtcttgctatcacagatgaaattttgctgagtaaggcagagtggtccaaactttttgaagctccaaacttctttcaaaagtacaagcattatattgtacttctagcaagtgcaccaacagaaaaacaacgcctggaatgggtgggcttggtggaatcaaaaatccgaatcctggttggaagcttggagaagaatgaatttattacactggctcatgtgaatccccagtcatttccagcacccaaagaaaatcccgacaaggaagaatttcgcacgatgtgggtgattgggttagtgtttaaaaaaacagaaaactctgaaaacctcagtgttgatctcacctatgatattcagtctttcacagatacagtttataggcaagcaataaacagcaagatgtttgaggtggatatgaaaattgctgcaatgcatgtaaaaagaaagcaactccatcaactactacctaatcatgtgcttcagaaaaagaaaaagcattcaacagaaggtgtcaaattgacagctctcaatgacagcagcctcgacttgtctatggacagtgataacagcatgtctgtgccttcacctactagtgctacgaagaccagtccattgaacagttctggcagctctcagggcagaaacagtcctgctccagctgtaacagcagcatctgtgaccaacatacaggctactgaagtttctgtgccacaagtaaattccagtgaaagctcagggggtacatcgagtgaaagcattcctcaaactgccacacaaccagccatttctccaccaccaaagcctacggtctccagagttgtttcttcaacacgtctggtaaacccaccacctagatcttcaggaaatgcagcaacttcaggaaatgcagcaacaaaaatacctactcctatagtaggagtcaagaggacatcctcacctcataaagaagagagtcccaagaaaaccaaaacagaagaggatgaaacaagtgaagatgctaactgtcttgctttgagtggacatgataaaacagaagcaaaggaacaacttgatacagagacaagtacaactcaatcagaaactattcagacagcggcttctctgttggcctctcagaaaacatccagtacagacctttctgatatccctgctctccctgcaaatcctattcctgttatcaagaattcaataaaactgagattgaatcggtaaaaacaacctcaggggtccataaacaatatctgccaactcaacctgttgtcttcaaatgctaaaaaaggagaatggagggtacaagactagacatgactgaaatggatttgggttttttggtgacctcccttactgggctaatcagcacttgatcggaagtccaggttagtatgtgaagccaggagtactattattattgtgttagcaacagttgcattaactatttcaaaaattactgcctttaaaaaaaacaacctcaagctatatttgtattcataattgacatctggattgggtttatgtttgatgcattgtttggaaaatttgcaatacaaactggcataagaattacttattctgatgatgcacttttatgtatttttcattagaaagtagaactaattttagattttcagcttgatggattttcagtttttcctgaagaattttctttaccattagtcttcaaattggatactgttgtgcagtggtgtactgttatacttcagagaaagggtaagagtacatctagttcagttcctatgaggtagctgtaacccttaaaaatgaaacgtcaactctagggtacatttgacattgaaagaatagttaggaaataacttggttttgatagggtcatgattaagaaatgatatattggttttatttatggaattgttttatagtgcatacaaatcagcgatcagccagcaaatatttttctttgagcttgtgaaagctctgtgttcttttgccttcaatctgttgtcttcaaaacaaacaaacaaaaaaagcttcttgcgcctttccctcccctgttttcttcctttttctttttgcttgtatgcacaaggtaggacttacttcgtaagaaacaaaatgccagtattttcttaagccatgatgtgaaaccaatgaccctgtgaccacatggcacagaacactaaattttggtcccatggctgaaacttgagggtgactaaaagtaatgcctgtgaaacatgatatctatctgggatggccatttgatctctaaaaggaattttgtacactccacagaactcctatctatagtaaaattgattttcagttttaaatgtgggcaaaaaggcattttctccaagattttaaaactaattcttatttttaaatggtttaccaaaatttgtcagtacattttacgtgtagaagcattttaaaaatcatttctagcaagcacttgacatctagtcagctctctactcctttattttgttttatcaaaagattaagagctcctttctttgaataaaataatttctcataattaagcagtagaagatctatcttcacaaagtatgagggatgccagatgttgataaacttactctttctgaatctggacaaagtcgacttaacagatttttctgatgagcatgttttatgaatcctccattgtgctccattctatcacatgtgcatttttcatgttaaactgcaattacttaatctcttcccctatccttctaaattaattttctgaagttggagtgtagtcttttcccccttaggctatgcattaatcgaagctttcttttcaccatgactttataatgtctagtaaacaatatttctacttcccacatctttgctttacacagtcaccttgcccttccttccaccaccgaagaaaaaagatggtcatactaacaggtgaaatgtacaaggtgtctgtgtgttttgtgtagcttcagagttagattgaaattaccaggcacagatttagtcttgtcattttgtttacacattggggaaaacaattcagtttattaaacgtttcatgtaactgcacccaagttttgccaagctggaaacttggaccttttctgtgtagtgactttttaattatagttttcataacctggagatcagactgttgctttcgcatgatgtatgtatttctccattgaaaacacaataaaaaaaaacagcacaa

SEQ ID NO: 434972 - DNA, 4457 bp, Homo sapiens
agcggagttctagaacgttgctgtggtagcgctcgggcgccatgttaggacgaaggggaaggaggagaagcgcttaaagcggcgggagcggtgcgggagaggggttggacccagggctgaggcaggcccccccctccctcccgcctcagtggatcatgcccagggcggcagcggcggcggttgcgggggggaagtgactgggcggtgccggcgccggagacgatgccgtttccagttacaacacagggatcacaacaaacacaaccgccacagaagcactatggcattacttctcctatcagcttagcagcccccaaggagactgactgcgtacttacacagaaactaattgagacattgaaaccctttggggtttttgaagaggaagaggaactgcagcgcaggattttaattttgggaaaactaaataacctggtaaaagagtggatacgagaaatcagtgaaagcaagaatcttccacaatctgtaattgaaaatgttggaggaaaaatttttacatttggatcttacagattaggagtgcatacaaaaggtgctgatattgatgcgttgtgtgttgcaccaagacatgttgatcgaagtgactttttcacctcattctatgataagttgaaattacaggaagaagtaaaagatttaagagctgttgaagaggcattcgtaccagttattaaactctgttttgatgggatagagattgatattttgtttgcaagattagcactgcagacaattcctgaagatttggatctacgagatgacagtctgctaaaaaatttagatataagatgtataagaagtcttaacggttgcagggtaaccgatgaaattttacatctagtaccaaacattgacaacttcaggttaactctgagagctatcaaactatgggccaaacgccacaacatctattccaatatattaggtttcctcggtggtgtttcctgggctatgctagtagcaagaacttgccagctttatccaaatgcaatagcatcaactcttgtacataaatttttcttggtattttctaaatgggaatggccaaatccagtgctattgaaacagcctgaagaatgcaatcttaatttgcctgtatgggacccaagggtaaaccccagtgataggtaccatcttatgcctataattacaccagcatacccacaacagaactccacgtacaatgtgtccgtttcaacacggatggtcatggttgaggagtttaaacaaggtcttgctatcacagatgaaattttgctgagtaaggcagagtggtccaaactttttgaagctccaaacttctttcaaaagtacaagcattatattgtacttctagcaagtgcaccaacagaaaaacaacgcctggaatgggtgggcttggtggaatcaaaaatccgaatcctggttggaagcttggagaagaatgaatttattacactggctcatgtgaatccccagtcatttccagcacccaaagaaaatcccgacaaggaagaatttcgcacgatgtgggtgattgggttagtgtttaaaaaaacagaaaactctgaaaacctcagtgttgatctcacctatgatattcagtctttcacagatacagtttataggcaagcaataaacagcaagatgtttgaggtggatatgaaaattgctgcaatgcatgtaaaaagaaagcaactccatcaactactacctaatcatgtgcttcagaaaaagaaaaagcattcaacagaaggtgtcaaattgacagctctcaatgacagcagcctcgacttgtctatggacagtgataacagcatgtctgtgccttcacctactagtgctacgaagaccagtccattgaacagttctggcagctctcagggcagaaacagtcctgctccagctgtaacagcagcatctgtgaccaacatacaggctactgaagtttctgtgccacaagtaaattccagtgaaagctcagggggtacatcgagtgaaagcattcctcaaactgccacacaaccagccatttctccaccaccaaagcctacggtctccagagttgtttcttcaacacgtctggtaaacccaccacctagatcttcaggaaatgcagcaacttcaggaaatgcagcaacaaaaatacctactcctatagtaggagtcaagaggacatcctcacctcataaagaagagagtcccaagaaaaccaaaacagaagaggaacaacttgatacagagacaagtacaactcaatcagaaactattcagacagcggcttctctgttggcctctcagaaaacatccagtacagacctttctgatatccctgctctccctgcaaatcctattcctgttatcaagaattcaataaaactgagattgaatcggtaaaaacaacctcaggggtccataaacaatatctgccaactcaacctgttgtcttcaaatgctaaaaaaggagaatggagggtacaagactagacatgactgaaatggatttgggttttttggtgacctcccttactgggctaatcagcacttgatcggaagtccaggttagtatgtgaagccaggagtactattattattgtgttagcaacagttgcattaactatttcaaaaattactgcctttaaaaaaaacaacctcaagctatatttgtattcataattgacatctggattgggtttatgtttgatgcattgtttggaaaatttgcaatacaaactggcataagaattacttattctgatgatgcacttttatgtatttttcattagaaagtagaactaattttagattttcagcttgatggattttcagtttttcctgaagaattttctttaccattagtcttcaaattggatactgttgtgcagtggtgtactgttatacttcagagaaagggtaagagtacatctagttcagttcctatgaggtagctgtaacccttaaaaatgaaacgtcaactctagggtacatttgacattgaaagaatagttaggaaataacttggttttgatagggtcatgattaagaaatgatatattggttttatttatggaattgttttatagtgcatacaaatcagcgatcagccagcaaatatttttctttgagcttgtgaaagctctgtgttcttttgccttcaatctgttgtcttcaaaacaaacaaacaaaaaaagcttcttgcgcctttccctcccctgttttcttcctttttctttttgcttgtatgcacaaggtaggacttacttcgtaagaaacaaaatgccagtattttcttaagccatgatgtgaaaccaatgaccctgtgaccacatggcacagaacactaaattttggtcccatggctgaaacttgagggtgactaaaagtaatgcctgtgaaacatgatatctatctgggatggccatttgatctctaaaaggaattttgtacactccacagaactcctatctatagtaaaattgattttcagttttaaatgtgggcaaaaaggcattttctccaagattttaaaactaattcttatttttaaatggtttaccaaaatttgtcagtacattttacgtgtagaagcattttaaaaatcatttctagcaagcacttgacatctagtcagctctctactcctttattttgttttatcaaaagattaagagctcctttctttgaataaaataatttctcataattaagcagtagaagatctatcttcacaaagtatgagggatgccagatgttgataaacttactctttctgaatctggacaaagtcgacttaacagatttttctgatgagcatgttttatgaatcctccattgtgctccattctatcacatgtgcatttttcatgttaaactgcaattacttaatctcttcccctatccttctaaattaattttctgaagttggagtgtagtcttttcccccttaggctatgcattaatcgaagctttcttttcaccatgactttataatgtctagtaaacaatatttctacttcccacatctttgctttacacagtcaccttgcccttccttccaccaccgaagaaaaaagatggtcatactaacaggtgaaatgtacaaggtgtctgtgtgttttgtgtagcttcagagttagattgaaattaccaggcacagatttagtcttgtcattttgtttacacattggggaaaacaattcagtttattaaacgtttcatgtaactgcacccaagttttgccaagctggaaacttggaccttttctgtgtagtgactttttaattatagttttcataacctggagatcagactgttgctttcgcatgatgtatgtagtgtctcatgactggagtttgctttgttttatagtatctgtactccttgtatttttcaagagctattttgtaaacagatgatgtatttctccattgaaaacacaataaaaaaaaacagcacaa

SEQ ID NO: 434973 - DNA, 4382 bp, Homo sapiens
agcggagttctagaacgttgctgtggtagcgctcgggcgccatgttaggacgaaggggaaggaggagaagcgcttaaagcggcgggagcggtgcgggagaggggttggacccagggctgaggcaggcccccccctccctcccgcctcagtggatcatgcccagggcggcagcggcggcggttgcgggggggaagtgactgggcggtgccggcgccggagacgatgccgtttccagttacaacacagggatcacaacaaacacaaccgccacagaagcactatggcattacttctcctatcagcttagcagcccccaaggagactgactgcgtacttacacagaaactaattgagacattgaaaccctttggggtttttgaagaggaagaggaactgcagcgcaggattttaattttgggaaaactaaataacctggtaaaagagtggatacgagaaatcagtgaaagcaagaatcttccacaatctgtaattgaaaatgttggaggaaaaatttttacatttggatcttacagattaggagtgcatacaaaaggtgctgatattgatgcgttgtgtgttgcaccaagacatgttgatcgaagtgactttttcacctcattctatgataagttgaaattacaggaagaagtaaaagatttaagagctgttgaagaggcattcgtaccagttattaaactctgttttgatgggatagagattgatattttgtttgcaagattagcactgcagacaattcctgaagatttggatctacgagatgacagtctgctaaaaaatttagatataagatgtataagaagtcttaacggttgcagggtaaccgatgaaattttacatctagtaccaaacattgacaacttcaggttaactctgagagctatcaaactatgggccaaacgccacaacatctattccaatatattaggtttcctcggtggtgtttcctgggctatgctagtagcaagaacttgccagctttatccaaatgcaatagcatcaactcttgtacataaatttttcttggtattttctaaatgggaatggccaaatccagtgctattgaaacagcctgaagaatgcaatcttaatttgcctgtatgggacccaagggtaaaccccagtgataggtaccatcttatgcctataattacaccagcatacccacaacagaactccacgtacaatgtgtccgtttcaacacggatggtcatggttgaggagtttaaacaaggtcttgctatcacagatgaaattttgctgagtaaggcagagtggtccaaactttttgaagctccaaacttctttcaaaagtacaagcattatattgtacttctagcaagtgcaccaacagaaaaacaacgcctggaatgggtgggcttggtggaatcaaaaatccgaatcctggttggaagcttggagaagaatgaatttattacactggctcatgtgaatccccagtcatttccagcacccaaagaaaatcccgacaaggaagaatttcgcacgatgtgggtgattgggttagtgtttaaaaaaacagaaaactctgaaaacctcagtgttgatctcacctatgatattcagtctttcacagatacagtttataggcaagcaataaacagcaagatgtttgaggtggatatgaaaattgctgcaatgcatgtaaaaagaaagcaactccatcaactactacctaatcatgtgcttcagaaaaagaaaaagcattcaacagaaggtgtcaaattgacagctctcaatgacagcagcctcgacttgtctatggacagtgataacagcatgtctgtgccttcacctactagtgctacgaagaccagtccattgaacagttctggcagctctcagggcagaaacagtcctgctccagctgtaacagcagcatctgtgaccaacatacaggctactgaagtttctgtgccacaagtaaattccagtgaaagctcagggggtacatcgagtgaaagcattcctcaaactgccacacaaccagccatttctccaccaccaaagcctacggtctccagagttgtttcttcaacacgtctggtaaacccaccacctagatcttcaggaaatgcagcaacttcaggaaatgcagcaacaaaaatacctactcctatagtaggagtcaagaggacatcctcacctcataaagaagagagtcccaagaaaaccaaaacagaagagaaaacatccagtacagacctttctgatatccctgctctccctgcaaatcctattcctgttatcaagaattcaataaaactgagattgaatcggtaaaaacaacctcaggggtccataaacaatatctgccaactcaacctgttgtcttcaaatgctaaaaaaggagaatggagggtacaagactagacatgactgaaatggatttgggttttttggtgacctcccttactgggctaatcagcacttgatcggaagtccaggttagtatgtgaagccaggagtactattattattgtgttagcaacagttgcattaactatttcaaaaattactgcctttaaaaaaaacaacctcaagctatatttgtattcataattgacatctggattgggtttatgtttgatgcattgtttggaaaatttgcaatacaaactggcataagaattacttattctgatgatgcacttttatgtatttttcattagaaagtagaactaattttagattttcagcttgatggattttcagtttttcctgaagaattttctttaccattagtcttcaaattggatactgttgtgcagtggtgtactgttatacttcagagaaagggtaagagtacatctagttcagttcctatgaggtagctgtaacccttaaaaatgaaacgtcaactctagggtacatttgacattgaaagaatagttaggaaataacttggttttgatagggtcatgattaagaaatgatatattggttttatttatggaattgttttatagtgcatacaaatcagcgatcagccagcaaatatttttctttgagcttgtgaaagctctgtgttcttttgccttcaatctgttgtcttcaaaacaaacaaacaaaaaaagcttcttgcgcctttccctcccctgttttcttcctttttctttttgcttgtatgcacaaggtaggacttacttcgtaagaaacaaaatgccagtattttcttaagccatgatgtgaaaccaatgaccctgtgaccacatggcacagaacactaaattttggtcccatggctgaaacttgagggtgactaaaagtaatgcctgtgaaacatgatatctatctgggatggccatttgatctctaaaaggaattttgtacactccacagaactcctatctatagtaaaattgattttcagttttaaatgtgggcaaaaaggcattttctccaagattttaaaactaattcttatttttaaatggtttaccaaaatttgtcagtacattttacgtgtagaagcattttaaaaatcatttctagcaagcacttgacatctagtcagctctctactcctttattttgttttatcaaaagattaagagctcctttctttgaataaaataatttctcataattaagcagtagaagatctatcttcacaaagtatgagggatgccagatgttgataaacttactctttctgaatctggacaaagtcgacttaacagatttttctgatgagcatgttttatgaatcctccattgtgctccattctatcacatgtgcatttttcatgttaaactgcaattacttaatctcttcccctatccttctaaattaattttctgaagttggagtgtagtcttttcccccttaggctatgcattaatcgaagctttcttttcaccatgactttataatgtctagtaaacaatatttctacttcccacatctttgctttacacagtcaccttgcccttccttccaccaccgaagaaaaaagatggtcatactaacaggtgaaatgtacaaggtgtctgtgtgttttgtgtagcttcagagttagattgaaattaccaggcacagatttagtcttgtcattttgtttacacattggggaaaacaattcagtttattaaacgtttcatgtaactgcacccaagttttgccaagctggaaacttggaccttttctgtgtagtgactttttaattatagttttcataacctggagatcagactgttgctttcgcatgatgtatgtagtgtctcatgactggagtttgctttgttttatagtatctgtactccttgtatttttcaagagctattttgtaaacagatgatgtatttctccattgaaaacacaataaaaaaaaacagcacaa

SEQ ID NO: 434974 - DNA, 4997 bp, Homo sapiens
agcggagttctagaacgttgctgtggtagcgctcgggcgccatgttaggacgaaggggaaggaggagaagcgcttaaagcggcgggagcggtgcgggagaggggttggacccagggctgaggcaggcccccccctccctcccgcctcagtggatcatgcccagggcggcagcggcggcggttgcgggggggaagtgactgggcggtgccggcgccggagacgatgccgtttccagttacaacacagggatcacaacaaacacaaccgccacagaagcactatggcattacttctcctatcagcttagcagcccccaaggagactgactgcgtacttacacagaaactaattgagacattgaaaccctttggggtttttgaagaggaagaggaactgcagcgcaggattttaattttgggaaaactaaataacctggtaaaagagtggatacgagaaatcagtgaaagcaagaatcttccacaatctgtaattgaaaatgttggaggaaaaatttttacatttggatcttacagattaggagtgcatacaaaaggtgctgatattgatgcgttgtgtgttgcaccaagacatgttgatcgaagtgactttttcacctcattctatgataagttgaaattacaggaagaagtaaaagatttaagagctgttgaagaggcattcgtaccagttattaaactctgttttgatgggatagagattgatattttgtttgcaagattagcactgcagacaattcctgaagatttggatctacgagatgacagtctgctaaaaaatttagatataagatgtataagaagtcttaacggttgcagggtaaccgatgaaattttacatctagtaccaaacattgacaacttcaggttaactctgagagctatcaaactatgggccaaacgccacaacatctattccaatatattaggtttcctcggtggtgtttcctgggctatgctagtagcaagaacttgccagctttatccaaatgcaatagcatcaactcttgtacataaatttttcttggtattttctaaatgggaatggccaaatccagtgctattgaaacagcctgaagaatgcaatcttaatttgcctgtatgggacccaagggtaaaccccagtgataggtaccatcttatgcctataattacaccagcatacccacaacagaactccacgtacaatgtgtccgtttcaacacggatggtcatggttgaggagtttaaacaaggtcttgctatcacagatgaaattttgctgagtaaggcagagtggtccaaactttttgaagctccaaacttctttcaaaagtacaagcattatattgtacttctagcaagtgcaccaacagaaaaacaacgcctggaatggtgagtataagaatagactttacagaaaaagcaaacttcaaaatgaatcacatagccactgaacacagtaggagatgggaggaagtccttaaaacttctagtttggtttgatttgttcacaaatggagctttactgtgtgtagtggaagtacagaaatcaggagatccatatgcaacttatttttttgtttgctttatggagatccgtgcataatttcttaattgtatatttaaagtgcacttatagcttgtttttcttaaaatttttgtgtggataacttttgtaaccttgctggtgtgaatggagtgtttcttggctcttttttccccgttgtttggcaattttgggtagaacataaggcttctggttttatctgtgggagttcagctagttgaaatgccctggtatgtgcattttatttatttatttttaagttaaccaaaactttttgttaatactaagtgacatttgttcagggtgggcttggtggaatcaaaaatccgaatcctggttggaagcttggagaagaatgaatttattacactggctcatgtgaatccccagtcatttccagcacccaaagaaaatcccgacaaggaagaatttcgcacgatgtgggtgattgggttagtgtttaaaaaaacagaaaactctgaaaacctcagtgttgatctcacctatgatattcagtctttcacagatacagtttataggcaagcaataaacagcaagatgtttgaggtggatatgaaaattgctgcaatgcatgtaaaaagaaagcaactccatcaactactacctaatcatgtgcttcagaaaaagaaaaagcattcaacagaaggtgtcaaattgacagctctcaatgacagcagcctcgacttgtctatggacagtgataacagcatgtctgtgccttcacctactagtgctacgaagaccagtccattgaacagttctggcagctctcagggcagaaacagtcctgctccagctgtaacagcagcatctgtgaccaacatacaggctactgaagtttctgtgccacaagtaaattccagtgaaagctcagggggtacatcgagtgaaagcattcctcaaactgccacacaaccagccatttctccaccaccaaagcctacggtctccagagttgtttcttcaacacgtctggtaaacccaccacctagatcttcaggaaatgcagcaacttcaggaaatgcagcaacaaaaatacctactcctatagtaggagtcaagaggacatcctcacctcataaagaagagagtcccaagaaaaccaaaacagaagaggatgaaacaagtgaagatgctaactgtcttgctttgagtggacatgataaaacagaagcaaaggaacaacttgatacagagacaagtacaactcaatcagaaactattcagacagcggcttctctgttggcctctcagaaaacatccagtacagacctttctgatatccctgctctccctgcaaatcctattcctgttatcaagaattcaataaaactgagattgaatcggtaaaaacaacctcaggggtccataaacaatatctgccaactcaacctgttgtcttcaaatgctaaaaaaggagaatggagggtacaagactagacatgactgaaatggatttgggttttttggtgacctcccttactgggctaatcagcacttgatcggaagtccaggttagtatgtgaagccaggagtactattattattgtgttagcaacagttgcattaactatttcaaaaattactgcctttaaaaaaaacaacctcaagctatatttgtattcataattgacatctggattgggtttatgtttgatgcattgtttggaaaatttgcaatacaaactggcataagaattacttattctgatgatgcacttttatgtatttttcattagaaagtagaactaattttagattttcagcttgatggattttcagtttttcctgaagaattttctttaccattagtcttcaaattggatactgttgtgcagtggtgtactgttatacttcagagaaagggtaagagtacatctagttcagttcctatgaggtagctgtaacccttaaaaatgaaacgtcaactctagggtacatttgacattgaaagaatagttaggaaataacttggttttgatagggtcatgattaagaaatgatatattggttttatttatggaattgttttatagtgcatacaaatcagcgatcagccagcaaatatttttctttgagcttgtgaaagctctgtgttcttttgccttcaatctgttgtcttcaaaacaaacaaacaaaaaaagcttcttgcgcctttccctcccctgttttcttcctttttctttttgcttgtatgcacaaggtaggacttacttcgtaagaaacaaaatgccagtattttcttaagccatgatgtgaaaccaatgaccctgtgaccacatggcacagaacactaaattttggtcccatggctgaaacttgagggtgactaaaagtaatgcctgtgaaacatgatatctatctgggatggccatttgatctctaaaaggaattttgtacactccacagaactcctatctatagtaaaattgattttcagttttaaatgtgggcaaaaaggcattttctccaagattttaaaactaattcttatttttaaatggtttaccaaaatttgtcagtacattttacgtgtagaagcattttaaaaatcatttctagcaagcacttgacatctagtcagctctctactcctttattttgttttatcaaaagattaagagctcctttctttgaataaaataatttctcataattaagcagtagaagatctatcttcacaaagtatgagggatgccagatgttgataaacttactctttctgaatctggacaaagtcgacttaacagatttttctgatgagcatgttttatgaatcctccattgtgctccattctatcacatgtgcatttttcatgttaaactgcaattacttaatctcttcccctatccttctaaattaattttctgaagttggagtgtagtcttttcccccttaggctatgcattaatcgaagctttcttttcaccatgactttataatgtctagtaaacaatatttctacttcccacatctttgctttacacagtcaccttgcccttccttccaccaccgaagaaaaaagatggtcatactaacaggtgaaatgtacaaggtgtctgtgtgttttgtgtagcttcagagttagattgaaattaccaggcacagatttagtcttgtcattttgtttacacattggggaaaacaattcagtttattaaacgtttcatgtaactgcacccaagttttgccaagctggaaacttggaccttttctgtgtagtgactttttaattatagttttcataacctggagatcagactgttgctttcgcatgatgtatgtagtgtctcatgactggagtttgctttgttttatagtatctgtactccttgtatttttcaagagctattttgtaaacagatgatgtatttctccattgaaaacacaataaaaaaaaacagcacaa

SEQ ID NO: 434975 - DNA, 4420 bp, Homo sapiens
agcggagttctagaacgttgctgtggtagcgctcgggcgccatgttaggacgaaggggaaggaggagaagcgcttaaagcggcgggagcggtgcgggagaggggttggacccagggctgaggcaggcccccccctccctcccgcctcagtggatcatgcccagggcggcagcggcggcggttgcgggggggaagtgactgggcggtgccggcgccggagacgatgccgtttccagttacaacacagggatcacaacaaacacaaccgccacagaagcactatggcattacttctcctatcagcttagcagcccccaaggagactgactgcgtacttacacagaaactaattgagacattgaaaccctttggggtttttgaagaggaagaggaactgcagcgcaggattttaattttgggaaaactaaataacctggtaaaagagtggatacgagaaatcagtgaaagcaagaatcttccacaatctgtaattgaaaatgttggaggaaaaatttttacatttggatcttacagattaggagtgcatacaaaaggtgctgatattgatgcgttgtgtgttgcaccaagacatgttgatcgaagtgactttttcacctcattctatgataagttgaaattacaggaagaagtaaaagatttaagagctgttgaagaggcattcgtaccagttattaaactctgttttgatgggatagagattgatattttgtttgcaagattagcactgcagacaattcctgaagatttggatctacgagatgacagtctgctaaaaaatttagatataagatgtataagaagtcttaacggttgcagggtaaccgatgaaattttacatctagtaccaaacattgacaacttcaggttaactctgagagctatcaaactatgggccaaacgccacaacatctattccaatatattaggtttcctcggtggtgtttcctgggctatgctagtagcaagaacttgccagctttatccaaatgcaatagcatcaactcttgtacataaatttttcttggtattttctaaatgggaatggccaaatccagtgctattgaaacagcctgaagaatgcaatcttaatttgcctgtatgggacccaagggtaaaccccagtgataggtaccatcttatgcctataattacaccagcatacccacaacagaatggtccaaactttttgaagctccaaacttctttcaaaagtacaagcattatattgtacttctagcaagtgcaccaacagaaaaacaacgcctggaatgggtgggcttggtggaatcaaaaatccgaatcctggttggaagcttggagaagaatgaatttattacactggctcatgtgaatccccagtcatttccagcacccaaagaaaatcccgacaaggaagaatttcgcacgatgtgggtgattgggttagtgtttaaaaaaacagaaaactctgaaaacctcagtgttgatctcacctatgatattcagtctttcacagatacagtttataggcaagcaataaacagcaagatgtttgaggtggatatgaaaattgctgcaatgcatgtaaaaagaaagcaactccatcaactactacctaatcatgtgcttcagaaaaagaaaaagcattcaacagaaggtgtcaaattgacagctctcaatgacagcagcctcgacttgtctatggacagtgataacagcatgtctgtgccttcacctactagtgctacgaagaccagtccattgaacagttctggcagctctcagggcagaaacagtcctgctccagctgtaacagcagcatctgtgaccaacatacaggctactgaagtttctgtgccacaagtaaattccagtgaaagctcagggggtacatcgagtgaaagcattcctcaaactgccacacaaccagccatttctccaccaccaaagcctacggtctccagagttgtttcttcaacacgtctggtaaacccaccacctagatcttcaggaaatgcagcaacttcaggaaatgcagcaacaaaaatacctactcctatagtaggagtcaagaggacatcctcacctcataaagaagagagtcccaagaaaaccaaaacagaagaggatgaaacaagtgaagatgctaactgtcttgctttgagtggacatgataaaacagaagcaaaggaacaacttgatacagagacaagtacaactcaatcagaaactattcagacagcggcttctctgttggcctctcagaaaacatccagtacagacctttctgatatccctgctctccctgcaaatcctattcctgttatcaagaattcaataaaactgagattgaatcggtaaaaacaacctcaggggtccataaacaatatctgccaactcaacctgttgtcttcaaatgctaaaaaaggagaatggagggtacaagactagacatgactgaaatggatttgggttttttggtgacctcccttactgggctaatcagcacttgatcggaagtccaggttagtatgtgaagccaggagtactattattattgtgttagcaacagttgcattaactatttcaaaaattactgcctttaaaaaaaacaacctcaagctatatttgtattcataattgacatctggattgggtttatgtttgatgcattgtttggaaaatttgcaatacaaactggcataagaattacttattctgatgatgcacttttatgtatttttcattagaaagtagaactaattttagattttcagcttgatggattttcagtttttcctgaagaattttctttaccattagtcttcaaattggatactgttgtgcagtggtgtactgttatacttcagagaaagggtaagagtacatctagttcagttcctatgaggtagctgtaacccttaaaaatgaaacgtcaactctagggtacatttgacattgaaagaatagttaggaaataacttggttttgatagggtcatgattaagaaatgatatattggttttatttatggaattgttttatagtgcatacaaatcagcgatcagccagcaaatatttttctttgagcttgtgaaagctctgtgttcttttgccttcaatctgttgtcttcaaaacaaacaaacaaaaaaagcttcttgcgcctttccctcccctgttttcttcctttttctttttgcttgtatgcacaaggtaggacttacttcgtaagaaacaaaatgccagtattttcttaagccatgatgtgaaaccaatgaccctgtgaccacatggcacagaacactaaattttggtcccatggctgaaacttgagggtgactaaaagtaatgcctgtgaaacatgatatctatctgggatggccatttgatctctaaaaggaattttgtacactccacagaactcctatctatagtaaaattgattttcagttttaaatgtgggcaaaaaggcattttctccaagattttaaaactaattcttatttttaaatggtttaccaaaatttgtcagtacattttacgtgtagaagcattttaaaaatcatttctagcaagcacttgacatctagtcagctctctactcctttattttgttttatcaaaagattaagagctcctttctttgaataaaataatttctcataattaagcagtagaagatctatcttcacaaagtatgagggatgccagatgttgataaacttactctttctgaatctggacaaagtcgacttaacagatttttctgatgagcatgttttatgaatcctccattgtgctccattctatcacatgtgcatttttcatgttaaactgcaattacttaatctcttcccctatccttctaaattaattttctgaagttggagtgtagtcttttcccccttaggctatgcattaatcgaagctttcttttcaccatgactttataatgtctagtaaacaatatttctacttcccacatctttgctttacacagtcaccttgcccttccttccaccaccgaagaaaaaagatggtcatactaacaggtgaaatgtacaaggtgtctgtgtgttttgtgtagcttcagagttagattgaaattaccaggcacagatttagtcttgtcattttgtttacacattggggaaaacaattcagtttattaaacgtttcatgtaactgcacccaagttttgccaagctggaaacttggaccttttctgtgtagtgactttttaattatagttttcataacctggagatcagactgttgctttcgcatgatgtatgtagtgtctcatgactggagtttgctttgttttatagtatctgtactccttgtatttttcaagagctattttgtaaacagatgatgtatttctccattgaaaacacaataaaaaaaaacagcacaa

SEQ ID NO: 434976 - DNA, 4511 bp, Homo sapiens
accccctggagcctgctgtctcctcctgttgtccaggctacaatgcaggggcatgattgtagcttactgtaacctcaaactcctgggttcaagcaattctcctgcctcagccctgggcccccccctccctcccgcctcagtggatcatgcccagggcggcagcggcggcggttgcgggggggaagtgactgggcggtgccggcgccggagacgatgccgtttccagttacaacacagggatcacaacaaacacaaccgccacagaagcactatggcattacttctcctatcagcttagcagcccccaaggagactgactgcgtacttacacagaaactaattgagacattgaaaccctttggggtttttgaagaggaagaggaactgcagcgcaggattttaattttgggaaaactaaataacctggtaaaagagtggatacgagaaatcagtgaaagcaagaatcttccacaatctgtaattgaaaatgttggaggaaaaatttttacatttggatcttacagattaggagtgcatacaaaaggtgctgatattgatgcgttgtgtgttgcaccaagacatgttgatcgaagtgactttttcacctcattctatgataagttgaaattacaggaagaagtaaaagatttaagagctgttgaagaggcattcgtaccagttattaaactctgttttgatgggatagagattgatattttgtttgcaagattagcactgcagacaattcctgaagatttggatctacgagatgacagtctgctaaaaaatttagatataagatgtataagaagtcttaacggttgcagggtaaccgatgaaattttacatctagtaccaaacattgacaacttcaggttaactctgagagctatcaaactatgggccaaacgccacaacatctattccaatatattaggtttcctcggtggtgtttcctgggctatgctagtagcaagaacttgccagctttatccaaatgcaatagcatcaactcttgtacataaatttttcttggtattttctaaatgggaatggccaaatccagtgctattgaaacagcctgaagaatgcaatcttaatttgcctgtatgggacccaagggtaaaccccagtgataggtaccatcttatgcctataattacaccagcatacccacaacagaactccacgtacaatgtgtccgtttcaacacggatggtcatggttgaggagtttaaacaaggtcttgctatcacagatgaaattttgctgagtaaggcagagtggtccaaactttttgaagctccaaacttctttcaaaagtacaagcattatattgtacttctagcaagtgcaccaacagaaaaacaacgcctggaatgggtgggcttggtggaatcaaaaatccgaatcctggttggaagcttggagaagaatgaatttattacactggctcatgtgaatccccagtcatttccagcacccaaagaaaatcccgacaaggaagaatttcgcacgatgtgggtgattgggttagtgtttaaaaaaacagaaaactctgaaaacctcagtgttgatctcacctatgatattcagtctttcacagatacagtttataggcaagcaataaacagcaagatgtttgaggtggatatgaaaattgctgcaatgcatgtaaaaagaaagcaactccatcaactactacctaatcatgtgcttcagaaaaagaaaaagcattcaacagaaggtgtcaaattgacagctctcaatgacagcagcctcgacttgtctatggacagtgataacagcatgtctgtgccttcacctactagtgctacgaagaccagtccattgaacagttctggcagctctcagggcagaaacagtcctgctccagctgtaacagcagcatctgtgaccaacatacaggctactgaagtttctgtgccacaagtaaattccagtgaaagctcagggggtacatcgagtgaaagcattcctcaaactgccacacaaccagccatttctccaccaccaaagcctacggtctccagagttgtttcttcaacacgtctggtaaacccaccacctagatcttcaggaaatgcagcaacttcaggaaatgcagcaacaaaaatacctactcctatagtaggagtcaagaggacatcctcacctcataaagaagagagtcccaagaaaaccaaaacagaagaggatgaaacaagtgaagatgctaactgtcttgctttgagtggacatgataaaacagaagcaaaggaacaacttgatacagagacaagtacaactcaatcagaaactattcagacagcggcttctctgttggcctctcagaaaacatccagtacagacctttctgatatccctgctctccctgcaaatcctattcctgttatcaagaattcaataaaactgagattgaatcggtaaaaacaacctcaggggtccataaacaatatctgccaactcaacctgttgtcttcaaatgctaaaaaaggagaatggagggtacaagactagacatgactgaaatggatttgggttttttggtgacctcccttactgggctaatcagcacttgatcggaagtccaggttagtatgtgaagccaggagtactattattattgtgttagcaacagttgcattaactatttcaaaaattactgcctttaaaaaaaacaacctcaagctatatttgtattcataattgacatctggattgggtttatgtttgatgcattgtttggaaaatttgcaatacaaactggcataagaattacttattctgatgatgcacttttatgtatttttcattagaaagtagaactaattttagattttcagcttgatggattttcagtttttcctgaagaattttctttaccattagtcttcaaattggatactgttgtgcagtggtgtactgttatacttcagagaaagggtaagagtacatctagttcagttcctatgaggtagctgtaacccttaaaaatgaaacgtcaactctagggtacatttgacattgaaagaatagttaggaaataacttggttttgatagggtcatgattaagaaatgatatattggttttatttatggaattgttttatagtgcatacaaatcagcgatcagccagcaaatatttttctttgagcttgtgaaagctctgtgttcttttgccttcaatctgttgtcttcaaaacaaacaaacaaaaaaagcttcttgcgcctttccctcccctgttttcttcctttttctttttgcttgtatgcacaaggtaggacttacttcgtaagaaacaaaatgccagtattttcttaagccatgatgtgaaaccaatgaccctgtgaccacatggcacagaacactaaattttggtcccatggctgaaacttgagggtgactaaaagtaatgcctgtgaaacatgatatctatctgggatggccatttgatctctaaaaggaattttgtacactccacagaactcctatctatagtaaaattgattttcagttttaaatgtgggcaaaaaggcattttctccaagattttaaaactaattcttatttttaaatggtttaccaaaatttgtcagtacattttacgtgtagaagcattttaaaaatcatttctagcaagcacttgacatctagtcagctctctactcctttattttgttttatcaaaagattaagagctcctttctttgaataaaataatttctcataattaagcagtagaagatctatcttcacaaagtatgagggatgccagatgttgataaacttactctttctgaatctggacaaagtcgacttaacagatttttctgatgagcatgttttatgaatcctccattgtgctccattctatcacatgtgcatttttcatgttaaactgcaattacttaatctcttcccctatccttctaaattaattttctgaagttggagtgtagtcttttcccccttaggctatgcattaatcgaagctttcttttcaccatgactttataatgtctagtaaacaatatttctacttcccacatctttgctttacacagtcaccttgcccttccttccaccaccgaagaaaaaagatggtcatactaacaggtgaaatgtacaaggtgtctgtgtgttttgtgtagcttcagagttagattgaaattaccaggcacagatttagtcttgtcattttgtttacacattggggaaaacaattcagtttattaaacgtttcatgtaactgcacccaagttttgccaagctggaaacttggaccttttctgtgtagtgactttttaattatagttttcataacctggagatcagactgttgctttcgcatgatgtatgtagtgtctcatgactggagtttgctttgttttatagtatctgtactccttgtatttttcaagagctattttgtaaacagatgatgtatttctccattgaaaacacaataaaaaaaaacagcacaa

SEQ ID NO: 434977 - DNA, 4310 bp, Homo sapiens
gtatccaattttgtttatagtccagttacaacacagggatcacaacaaacacaaccgccacagaagcactatggcattacttctcctatcagcttagcagcccccaaggagactgactgcgtacttacacagaaactaattgagacattgaaaccctttggggtttttgaagaggaagaggaactgcagcgcaggattttaattttgggaaaactaaataacctggtaaaagagtggatacgagaaatcagtgaaagcaagaatcttccacaatctgtaattgaaaatgttggaggaaaaatttttacatttggatcttacagattaggagtgcatacaaaaggtgctgatattgatgcgttgtgtgttgcaccaagacatgttgatcgaagtgactttttcacctcattctatgataagttgaaattacaggaagaagtaaaagatttaagagctgttgaagaggcattcgtaccagttattaaactctgttttgatgggatagagattgatattttgtttgcaagattagcactgcagacaattcctgaagatttggatctacgagatgacagtctgctaaaaaatttagatataagatgtataagaagtcttaacggttgcagggtaaccgatgaaattttacatctagtaccaaacattgacaacttcaggttaactctgagagctatcaaactatgggccaaacgccacaacatctattccaatatattaggtttcctcggtggtgtttcctgggctatgctagtagcaagaacttgccagctttatccaaatgcaatagcatcaactcttgtacataaatttttcttggtattttctaaatgggaatggccaaatccagtgctattgaaacagcctgaagaatgcaatcttaatttgcctgtatgggacccaagggtaaaccccagtgataggtaccatcttatgcctataattacaccagcatacccacaacagaactccacgtacaatgtgtccgtttcaacacggatggtcatggttgaggagtttaaacaaggtcttgctatcacagatgaaattttgctgagtaaggcagagtggtccaaactttttgaagctccaaacttctttcaaaagtacaagcattatattgtacttctagcaagtgcaccaacagaaaaacaacgcctggaatgggtgggcttggtggaatcaaaaatccgaatcctggttggaagcttggagaagaatgaatttattacactggctcatgtgaatccccagtcatttccagcacccaaagaaaatcccgacaaggaagaatttcgcacgatgtgggtgattgggttagtgtttaaaaaaacagaaaactctgaaaacctcagtgttgatctcacctatgatattcagtctttcacagatacagtttataggcaagcaataaacagcaagatgtttgaggtggatatgaaaattgctgcaatgcatgtaaaaagaaagcaactccatcaactactacctaatcatgtgcttcagaaaaagaaaaagcattcaacagaaggtgtcaaattgacagctctcaatgacagcagcctcgacttgtctatggacagtgataacagcatgtctgtgccttcacctactagtgctacgaagaccagtccattgaacagttctggcagctctcagggcagaaacagtcctgctccagctgtaacagcagcatctgtgaccaacatacaggctactgaagtttctgtgccacaagtaaattccagtgaaagctcagggggtacatcgagtgaaagcattcctcaaactgccacacaaccagccatttctccaccaccaaagcctacggtctccagagttgtttcttcaacacgtctggtaaacccaccacctagatcttcaggaaatgcagcaacttcaggaaatgcagcaacaaaaatacctactcctatagtaggagtcaagaggacatcctcacctcataaagaagagagtcccaagaaaaccaaaacagaagaggatgaaacaagtgaagatgctaactgtcttgctttgagtggacatgataaaacagaagcaaaggaacaacttgatacagagacaagtacaactcaatcagaaactattcagacagcggcttctctgttggcctctcagaaaacatccagtacagacctttctgatatccctgctctccctgcaaatcctattcctgttatcaagaattcaataaaactgagattgaatcggtaaaaacaacctcaggggtccataaacaatatctgccaactcaacctgttgtcttcaaatgctaaaaaaggagaatggagggtacaagactagacatgactgaaatggatttgggttttttggtgacctcccttactgggctaatcagcacttgatcggaagtccaggttagtatgtgaagccaggagtactattattattgtgttagcaacagttgcattaactatttcaaaaattactgcctttaaaaaaaacaacctcaagctatatttgtattcataattgacatctggattgggtttatgtttgatgcattgtttggaaaatttgcaatacaaactggcataagaattacttattctgatgatgcacttttatgtatttttcattagaaagtagaactaattttagattttcagcttgatggattttcagtttttcctgaagaattttctttaccattagtcttcaaattggatactgttgtgcagtggtgtactgttatacttcagagaaagggtaagagtacatctagttcagttcctatgaggtagctgtaacccttaaaaatgaaacgtcaactctagggtacatttgacattgaaagaatagttaggaaataacttggttttgatagggtcatgattaagaaatgatatattggttttatttatggaattgttttatagtgcatacaaatcagcgatcagccagcaaatatttttctttgagcttgtgaaagctctgtgttcttttgccttcaatctgttgtcttcaaaacaaacaaacaaaaaaagcttcttgcgcctttccctcccctgttttcttcctttttctttttgcttgtatgcacaaggtaggacttacttcgtaagaaacaaaatgccagtattttcttaagccatgatgtgaaaccaatgaccctgtgaccacatggcacagaacactaaattttggtcccatggctgaaacttgagggtgactaaaagtaatgcctgtgaaacatgatatctatctgggatggccatttgatctctaaaaggaattttgtacactccacagaactcctatctatagtaaaattgattttcagttttaaatgtgggcaaaaaggcattttctccaagattttaaaactaattcttatttttaaatggtttaccaaaatttgtcagtacattttacgtgtagaagcattttaaaaatcatttctagcaagcacttgacatctagtcagctctctactcctttattttgttttatcaaaagattaagagctcctttctttgaataaaataatttctcataattaagcagtagaagatctatcttcacaaagtatgagggatgccagatgttgataaacttactctttctgaatctggacaaagtcgacttaacagatttttctgatgagcatgttttatgaatcctccattgtgctccattctatcacatgtgcatttttcatgttaaactgcaattacttaatctcttcccctatccttctaaattaattttctgaagttggagtgtagtcttttcccccttaggctatgcattaatcgaagctttcttttcaccatgactttataatgtctagtaaacaatatttctacttcccacatctttgctttacacagtcaccttgcccttccttccaccaccgaagaaaaaagatggtcatactaacaggtgaaatgtacaaggtgtctgtgtgttttgtgtagcttcagagttagattgaaattaccaggcacagatttagtcttgtcattttgtttacacattggggaaaacaattcagtttattaaacgtttcatgtaactgcacccaagttttgccaagctggaaacttggaccttttctgtgtagtgactttttaattatagttttcataacctggagatcagactgttgctttcgcatgatgtatgtagtgtctcatgactggagtttgctttgttttatagtatctgtactccttgtatttttcaagagctattttgtaaacagatgatgtatttctccattgaaaacacaataaaaaaaaacagcacaa

SEQ ID NO: 434978 - DNA, 4725 bp, Homo sapiens
cggacgcgtgggcgaccacgcgtccggaattaaaagtacttttatacctactttcccccaacattctttgaagagggaaggtatacatttctgtgaaagaccttaggtatttcaaattcttcgcgagttagttcaagtgtgtaaaatggaagacggggccaggcgcggtggttcacgcctgtaatcccagcactttgggaggcccaggcaggtaaatcgcttgaggccaggagtttgagatcagcctgggcaacatggcgaaacttcatctcaacaaaaaacacaagttagctgggcgtggtggctcatgcctgtaatcccagctacttgggaggttgaggtgggaggactgcttgagcccaggaggctgaggctgcagtgagccttgatcatgccactgcgttccagcctgggtgacagagcgagactcaaaaatccagttacaacacagggatcacaacaaacacaaccgccacagaagcactatggcattacttctcctatcagcttagcagcccccaaggagactgactgcgtacttacacagaaactaattgagacattgaaaccctttggggtttttgaagaggaagaggaactgcagcgcaggattttaattttgggaaaactaaataacctggtaaaagagtggatacgagaaatcagtgaaagcaagaatcttccacaatctgtaattgaaaatgttggaggaaaaatttttacatttggatcttacagattaggagtgcatacaaaaggtgctgatattgatgcgttgtgtgttgcaccaagacatgttgatcgaagtgactttttcacctcattctatgataagttgaaattacaggaagaagtaaaagatttaagagctgttgaagaggcattcgtaccagttattaaactctgttttgatgggatagagattgatattttgtttgcaagattagcactgcagacaattcctgaagatttggatctacgagatgacagtctgctaaaaaatttagatataagatgtataagaagtcttaacggttgcagggtaaccgatgaaattttacatctagtaccaaacattgacaacttcaggttaactctgagagctatcaaactatgggccaaacgccacaacatctattccaatatattaggtttcctcggtggtgtttcctgggctatgctagtagcaagaacttgccagctttatccaaatgcaatagcatcaactcttgtacataaatttttcttggtattttctaaatgggaatggccaaatccagtgctattgaaacagcctgaagaatgcaatcttaatttgcctgtatgggacccaagggtaaaccccagtgataggtaccatcttatgcctataattacaccagcatacccacaacagaactccacgtacaatgtgtccgtttcaacacggatggtcatggttgaggagtttaaacaaggtcttgctatcacagatgaaattttgctgagtaaggcagagtggtccaaactttttgaagctccaaacttctttcaaaagtacaagcattatattgtacttctagcaagtgcaccaacagaaaaacaacgcctggaatgggtgggcttggtggaatcaaaaatccgaatcctggttggaagcttggagaagaatgaatttattacactggctcatgtgaatccccagtcatttccagcacccaaagaaaatcccgacaaggaagaatttcgcacgatgtgggtgattgggttagtgtttaaaaaaacagaaaactctgaaaacctcagtgttgatctcacctatgatattcagtctttcacagatacagtttataggcaagcaataaacagcaagatgtttgaggtggatatgaaaattgctgcaatgcatgtaaaaagaaagcaactccatcaactactacctaatcatgtgcttcagaaaaagaaaaagcattcaacagaaggtgtcaaattgacagctctcaatgacagcagcctcgacttgtctatggacagtgataacagcatgtctgtgccttcacctactagtgctacgaagaccagtccattgaacagttctggcagctctcagggcagaaacagtcctgctccagctgtaacagcagcatctgtgaccaacatacaggctactgaagtttctgtgccacaagtaaattccagtgaaagctcagggggtacatcgagtgaaagcattcctcaaactgccacacaaccagccatttctccaccaccaaagcctacggtctccagagttgtttcttcaacacgtctggtaaacccaccacctagatcttcaggaaatgcagcaacttcaggaaatgcagcaacaaaaatacctactcctatagtaggagtcaagaggacatcctcacctcataaagaagagagtcccaagaaaaccaaaacagaagaggatgaaacaagtgaagatgctaactgtcttgctttgagtggacatgataaaacagaagcaaaggaacaacttgatacagagacaagtacaactcaatcagaaactattcagacagcggcttctctgttggcctctcagaaaacatccagtacagacctttctgatatccctgctctccctgcaaatcctattcctgttatcaagaattcaataaaactgagattgaatcggtaaaaacaacctcaggggtccataaacaatatctgccaactcaacctgttgtcttcaaatgctaaaaaaggagaatggagggtacaagactagacatgactgaaatggatttgggttttttggtgacctcccttactgggctaatcagcacttgatcggaagtccaggttagtatgtgaagccaggagtactattattattgtgttagcaacagttgcattaactatttcaaaaattactgcctttaaaaaaaacaacctcaagctatatttgtattcataattgacatctggattgggtttatgtttgatgcattgtttggaaaatttgcaatacaaactggcataagaattacttattctgatgatgcacttttatgtatttttcattagaaagtagaactaattttagattttcagcttgatggattttcagtttttcctgaagaattttctttaccattagtcttcaaattggatactgttgtgcagtggtgtactgttatacttcagagaaagggtaagagtacatctagttcagttcctatgaggtagctgtaacccttaaaaatgaaacgtcaactctagggtacatttgacattgaaagaatagttaggaaataacttggttttgatagggtcatgattaagaaatgatatattggttttatttatggaattgttttatagtgcatacaaatcagcgatcagccagcaaatatttttctttgagcttgtgaaagctctgtgttcttttgccttcaatctgttgtcttcaaaacaaacaaacaaaaaaagcttcttgcgcctttccctcccctgttttcttcctttttctttttgcttgtatgcacaaggtaggacttacttcgtaagaaacaaaatgccagtattttcttaagccatgatgtgaaaccaatgaccctgtgaccacatggcacagaacactaaattttggtcccatggctgaaacttgagggtgactaaaagtaatgcctgtgaaacatgatatctatctgggatggccatttgatctctaaaaggaattttgtacactccacagaactcctatctatagtaaaattgattttcagttttaaatgtgggcaaaaaggcattttctccaagattttaaaactaattcttatttttaaatggtttaccaaaatttgtcagtacattttacgtgtagaagcattttaaaaatcatttctagcaagcacttgacatctagtcagctctctactcctttattttgttttatcaaaagattaagagctcctttctttgaataaaataatttctcataattaagcagtagaagatctatcttcacaaagtatgagggatgccagatgttgataaacttactctttctgaatctggacaaagtcgacttaacagatttttctgatgagcatgttttatgaatcctccattgtgctccattctatcacatgtgcatttttcatgttaaactgcaattacttaatctcttcccctatccttctaaattaattttctgaagttggagtgtagtcttttcccccttaggctatgcattaatcgaagctttcttttcaccatgactttataatgtctagtaaacaatatttctacttcccacatctttgctttacacagtcaccttgcccttccttccaccaccgaagaaaaaagatggtcatactaacaggtgaaatgtacaaggtgtctgtgtgttttgtgtagcttcagagttagattgaaattaccaggcacagatttagtcttgtcattttgtttacacattggggaaaacaattcagtttattaaacgtttcatgtaactgcacccaagttttgccaagctggaaacttggaccttttctgtgtagtgactttttaattatagttttcataacctggagatcagactgttgctttcgcatgatgtatgtagtgtctcatgactggagtttgctttgttttatagtatctgtactccttgtatttttcaagagctattttgtaaacagatgatgtatttctccattgaaaacacaataaaaaaaaacagcacaa

SEQ ID NO: 434979 - DNA, 4545 bp, Homo sapiens
  misc_feature (159)..(159): n is a, c, g, or t
tgagcggtgccttgcttatgactaatagggaaggaggagaagcgcttaaagcgagcggcgagcggattcgggacgaggtgtttgaccctaggtgttgatggtcatggccactaccgcacatctctcatcgcctgccctcacgattcggatcgattgccncgattgcggacagtgtcagccgcgtagtcgtgtatgctcgtgagtgacaaagttgaacttgggccggtcgtctttaccacggagaccgatgccgtttccagttacaacacagggatcacaacaaacacaaccgccacagaagcactatggcattacttctcctatcagcttagcagcccccaaggagactgactgcgtacttacacagaaactaattgagacattgaaaccctttggggtttttgaagaggaagaggaactgcagcgcaggattttaattttgggaaaactaaataacctggtaaaagagtggatacgagaaatcagtgaaagcaagaatcttccacaatctgtaattgaaaatgttggaggaaaaatttttacatttggatcttacagattaggagtgcatacaaaaggtgctgatattgatgcgttgtgtgttgcaccaagacatgttgatcgaagtgactttttcacctcattctatgataagttgaaattacaggaagaagtaaaagatttaagagctgttgaagaggcattcgtaccagttattaaactctgttttgatgggatagagattgatattttgtttgcaagattagcactgcagacaattcctgaagatttggatctacgagatgacagtctgctaaaaaatttagatataagatgtataagaagtcttaacggttgcagggtaaccgatgaaattttacatctagtaccaaacattgacaacttcaggttaactctgagagctatcaaactatgggccaaacgccacaacatctattccaatatattaggtttcctcggtggtgtttcctgggctatgctagtagcaagaacttgccagctttatccaaatgcaatagcatcaactcttgtacataaatttttcttggtattttctaaatgggaatggccaaatccagtgctattgaaacagcctgaagaatgcaatcttaatttgcctgtatgggacccaagggtaaaccccagtgataggtaccatcttatgcctataattacaccagcatacccacaacagaactccacgtacaatgtgtccgtttcaacacggatggtcatggttgaggagtttaaacaaggtcttgctatcacagatgaaattttgctgagtaaggcagagtggtccaaactttttgaagctccaaacttctttcaaaagtacaagcattatattgtacttctagcaagtgcaccaacagaaaaacaacgcctggaatgggtgggcttggtggaatcaaaaatccgaatcctggttggaagcttggagaagaatgaatttattacactggctcatgtgaatccccagtcatttccagcacccaaagaaaatcccgacaaggaagaatttcgcacgatgtgggtgattgggttagtgtttaaaaaaacagaaaactctgaaaacctcagtgttgatctcacctatgatattcagtctttcacagatacagtttataggcaagcaataaacagcaagatgtttgaggtggatatgaaaattgctgcaatgcatgtaaaaagaaagcaactccatcaactactacctaatcatgtgcttcagaaaaagaaaaagcattcaacagaaggtgtcaaattgacagctctcaatgacagcagcctcgacttgtctatggacagtgataacagcatgtctgtgccttcacctactagtgctacgaagaccagtccattgaacagttctggcagctctcagggcagaaacagtcctgctccagctgtaacagcagcatctgtgaccaacatacaggctactgaagtttctgtgccacaagtaaattccagtgaaagctcagggggtacatcgagtgaaagcattcctcaaactgccacacaaccagccatttctccaccaccaaagcctacggtctccagagttgtttcttcaacacgtctggtaaacccaccacctagatcttcaggaaatgcagcaacttcaggaaatgcagcaacaaaaatacctactcctatagtaggagtcaagaggacatcctcacctcataaagaagagagtcccaagaaaaccaaaacagaagaggatgaaacaagtgaagatgctaactgtcttgctttgagtggacatgataaaacagaagcaaaggaacaacttgatacagagacaagtacaactcaatcagaaactattcagacagcggcttctctgttggcctctcagaaaacatccagtacagacctttctgatatccctgctctccctgcaaatcctattcctgttatcaagaattcaataaaactgagattgaatcggtaaaaacaacctcaggggtccataaacaatatctgccaactcaacctgttgtcttcaaatgctaaaaaaggagaatggagggtacaagactagacatgactgaaatggatttgggttttttggtgacctcccttactgggctaatcagcacttgatcggaagtccaggttagtatgtgaagccaggagtactattattattgtgttagcaacagttgcattaactatttcaaaaattactgcctttaaaaaaaacaacctcaagctatatttgtattcataattgacatctggattgggtttatgtttgatgcattgtttggaaaatttgcaatacaaactggcataagaattacttattctgatgatgcacttttatgtatttttcattagaaagtagaactaattttagattttcagcttgatggattttcagtttttcctgaagaattttctttaccattagtcttcaaattggatactgttgtgcagtggtgtactgttatacttcagagaaagggtaagagtacatctagttcagttcctatgaggtagctgtaacccttaaaaatgaaacgtcaactctagggtacatttgacattgaaagaatagttaggaaataacttggttttgatagggtcatgattaagaaatgatatattggttttatttatggaattgttttatagtgcatacaaatcagcgatcagccagcaaatatttttctttgagcttgtgaaagctctgtgttcttttgccttcaatctgttgtcttcaaaacaaacaaacaaaaaaagcttcttgcgcctttccctcccctgttttcttcctttttctttttgcttgtatgcacaaggtaggacttacttcgtaagaaacaaaatgccagtattttcttaagccatgatgtgaaaccaatgaccctgtgaccacatggcacagaacactaaattttggtcccatggctgaaacttgagggtgactaaaagtaatgcctgtgaaacatgatatctatctgggatggccatttgatctctaaaaggaattttgtacactccacagaactcctatctatagtaaaattgattttcagttttaaatgtgggcaaaaaggcattttctccaagattttaaaactaattcttatttttaaatggtttaccaaaatttgtcagtacattttacgtgtagaagcattttaaaaatcatttctagcaagcacttgacatctagtcagctctctactcctttattttgttttatcaaaagattaagagctcctttctttgaataaaataatttctcataattaagcagtagaagatctatcttcacaaagtatgagggatgccagatgttgataaacttactctttctgaatctggacaaagtcgacttaacagatttttctgatgagcatgttttatgaatcctccattgtgctccattctatcacatgtgcatttttcatgttaaactgcaattacttaatctcttcccctatccttctaaattaattttctgaagttggagtgtagtcttttcccccttaggctatgcattaatcgaagctttcttttcaccatgactttataatgtctagtaaacaatatttctacttcccacatctttgctttacacagtcaccttgcccttccttccaccaccgaagaaaaaagatggtcatactaacaggtgaaatgtacaaggtgtctgtgtgttttgtgtagcttcagagttagattgaaattaccaggcacagatttagtcttgtcattttgtttacacattggggaaaacaattcagtttattaaacgtttcatgtaactgcacccaagttttgccaagctggaaacttggaccttttctgtgtagtgactttttaattatagttttcataacctggagatcagactgttgctttcgcatgatgtatgtagtgtctcatgactggagtttgctttgttttatagtatctgtactccttgtatttttcaagagctattttgtaaacagatgatgtatttctccattgaaaacacaataaaaaaaaacagcacaa

SEQ ID NO: 434980 - DNA, 4312 bp, Homo sapiens
cctttagtacctattgacagtgggctatctctgctgtccggtccggaagtcctgtatcgccacagaagcactatggcattacttctcctatcagcttagcagcccccaaggagactgactgcgtacttacacagaaactaattgagacattgaaaccctttggggtttttgaagaggaagaggaactgcagcgcaggattttaattttgggaaaactaaataacctggtaaaagagtggatacgagaaatcagtgaaagcaagaatcttccacaatctgtaattgaaaatgttggaggaaaaatttttacatttggatcttacagattaggagtgcatacaaaaggtgctgatattgatgcgttgtgtgttgcaccaagacatgttgatcgaagtgactttttcacctcattctatgataagttgaaattacaggaagaagtaaaagatttaagagctgttgaagaggcattcgtaccagttattaaactctgttttgatgggatagagattgatattttgtttgcaagattagcactgcagacaattcctgaagatttggatctacgagatgacagtctgctaaaaaatttagatataagatgtataagaagtcttaacggttgcagggtaaccgatgaaattttacatctagtaccaaacattgacaacttcaggttaactctgagagctatcaaactatgggccaaacgccacaacatctattccaatatattaggtttcctcggtggtgtttcctgggctatgctagtagcaagaacttgccagctttatccaaatgcaatagcatcaactcttgtacataaatttttcttggtattttctaaatgggaatggccaaatccagtgctattgaaacagcctgaagaatgcaatcttaatttgcctgtatgggacccaagggtaaaccccagtgataggtaccatcttatgcctataattacaccagcatacccacaacagaactccacgtacaatgtgtccgtttcaacacggatggtcatggttgaggagtttaaacaaggtcttgctatcacagatgaaattttgctgagtaaggcagagtggtccaaactttttgaagctccaaacttctttcaaaagtacaagcattatattgtacttctagcaagtgcaccaacagaaaaacaacgcctggaatgggtgggcttggtggaatcaaaaatccgaatcctggttggaagcttggagaagaatgaatttattacactggctcatgtgaatccccagtcatttccagcacccaaagaaaatcccgacaaggaagaatttcgcacgatgtgggtgattgggttagtgtttaaaaaaacagaaaactctgaaaacctcagtgttgatctcacctatgatattcagtctttcacagatacagtttataggcaagcaataaacagcaagatgtttgaggtggatatgaaaattgctgcaatgcatgtaaaaagaaagcaactccatcaactactacctaatcatgtgcttcagaaaaagaaaaagcattcaacagaaggtgtcaaattgacagctctcaatgacagcagcctcgacttgtctatggacagtgataacagcatgtctgtgccttcacctactagtgctacgaagaccagtccattgaacagttctggcagctctcagggcagaaacagtcctgctccagctgtaacagcagcatctgtgaccaacatacaggctactgaagtttctgtgccacaagtaaattccagtgaaagctcagggggtacatcgagtgaaagcattcctcaaactgccacacaaccagccatttctccaccaccaaagcctacggtctccagagttgtttcttcaacacgtctggtaaacccaccacctagatcttcaggaaatgcagcaacttcaggaaatgcagcaacaaaaatacctactcctatagtaggagtcaagaggacatcctcacctcataaagaagagagtcccaagaaaaccaaaacagaagaggatgaaacaagtgaagatgctaactgtcttgctttgagtggacatgataaaacagaagcaaaggaacaacttgatacagagacaagtacaactcaatcagaaactattcagacagcggcttctctgttggcctctcagaaaacatccagtacagacctttctgatatccctgctctccctgcaaatcctattcctgttatcaagaattcaataaaactgagattgaatcggtaaaaacaacctcaggggtccataaacaatatctgccaactcaacctgttgtcttcaaatgctaaaaaaggagaatggagggtacaagactagacatgactgaaatggatttgggttttttggtgacctcccttactgggctaatcagcacttgatcggaagtccaggttagtatgtgaagccaggagtactattattattgtgttagcaacagttgcattaactatttcaaaaattactgcctttaaaaaaaacaacctcaagctatatttgtattcataattgacatctggattgggtttatgtttgatgcattgtttggaaaatttgcaatacaaactggcataagaattacttattctgatgatgcacttttatgtatttttcattagaaagtagaactaattttagattttcagcttgatggattttcagtttttcctgaagaattttctttaccattagtcttcaaattggatactgttgtgcagtggtgtactgttatacttcagagaaagggtaagagtacatctagttcagttcctatgaggtagctgtaacccttaaaaatgaaacgtcaactctagggtacatttgacattgaaagaatagttaggaaataacttggttttgatagggtcatgattaagaaatgatatattggttttatttatggaattgttttatagtgcatacaaatcagcgatcagccagcaaatatttttctttgagcttgtgaaagctctgtgttcttttgccttcaatctgttgtcttcaaaacaaacaaacaaaaaaagcttcttgcgcctttccctcccctgttttcttcctttttctttttgcttgtatgcacaaggtaggacttacttcgtaagaaacaaaatgccagtattttcttaagccatgatgtgaaaccaatgaccctgtgaccacatggcacagaacactaaattttggtcccatggctgaaacttgagggtgactaaaagtaatgcctgtgaaacatgatatctatctgggatggccatttgatctctaaaaggaattttgtacactccacagaactcctatctatagtaaaattgattttcagttttaaatgtgggcaaaaaggcattttctccaagattttaaaactaattcttatttttaaatggtttaccaaaatttgtcagtacattttacgtgtagaagcattttaaaaatcatttctagcaagcacttgacatctagtcagctctctactcctttattttgttttatcaaaagattaagagctcctttctttgaataaaataatttctcataattaagcagtagaagatctatcttcacaaagtatgagggatgccagatgttgataaacttactctttctgaatctggacaaagtcgacttaacagatttttctgatgagcatgttttatgaatcctccattgtgctccattctatcacatgtgcatttttcatgttaaactgcaattacttaatctcttcccctatccttctaaattaattttctgaagttggagtgtagtcttttcccccttaggctatgcattaatcgaagctttcttttcaccatgactttataatgtctagtaaacaatatttctacttcccacatctttgctttacacagtcaccttgcccttccttccaccaccgaagaaaaaagatggtcatactaacaggtgaaatgtacaaggtgtctgtgtgttttgtgtagcttcagagttagattgaaattaccaggcacagatttagtcttgtcattttgtttacacattggggaaaacaattcagtttattaaacgtttcatgtaactgcacccaagttttgccaagctggaaacttggaccttttctgtgtagtgactttttaattatagttttcataacctggagatcagactgttgctttcgcatgatgtatgtagtgtctcatgactggagtttgctttgttttatagtatctgtactccttgtatttttcaagagctattttgtaaacagatgatgtatttctccattgaaaacacaataaaaaaaaacagcacaa

SEQ ID NO: 434981 - DNA, 2303 bp, Homo sapiens
agcggagttctagaacgttgctgtggtagcgctcgggcgccatgttaggacgaaggggaaggaggagaagcgcttaaagcggcgggagcggtgcgggagaggggttggacccagggctgaggcaggcccccccctccctcccgcctcagtggatcatgcccagggcggcagcggcggcggttgcgggggggaagtgactgggcggtgccggcgccggagacgatgccgtttccagttacaacacagggatcacaacaaacacaaccgccacagaagcactatggcattacttctcctatcagcttagcagcccccaaggagactgactgcgtacttacacagaaactaattgagacattgaaaccctttggggtttttgaagaggaagaggaactgcagcgcaggattttaattttgggaaaactaaataacctggtaaaagagtggatacgagaaatcagtgaaagcaagaatcttccacaatctgtaattgaaaatgttggaggaaaaatttttacatttggatcttacagattaggagtgcatacaaaaggtgctgatattgatgcgttgtgtgttgcaccaagacatgttgatcgaagtgactttttcacctcattctatgataagttgaaattacaggaagaagtaaaagatttaagagctgttgaagaggcattcgtaccagttattaaactctgttttgatgggatagagattgatattttgtttgcaagattagcactgcagacaattcctgaagatttggatctacgagatgacagtctgctaaaaaatttagatataagatgtataagaagtcttaacggttgcagggtaaccgatgaaattttacatctagtaccaaacattgacaacttcaggttaactctgagagctatcaaactatgggccaaacgccacaacatctattccaatatattaggtttcctcggtggtgtttcctgggctatgctagtagcaagaacttgccagctttatccaaatgcaatagcatcaactcttgtacataaatttttcttggtattttctaaatgggaatggccaaatccagtgctattgaaacagcctgaagaatgcaatcttaatttgcctgtatgggacccaagggtaaaccccagtgataggtaccatcttatgcctataattacaccagcatacccacaacagaactccacgtacaatgtgtccgtttcaacacggatggtcatggttgaggagtttaaacaaggtcttgctatcacagatgaaattttgctgagtaaggcagagtggtccaaactttttgaagctccaaacttctttcaaaagtacaagcattatattgtacttctagcaagtgcaccaacagaaaaacaacgcctggaatgggtgggcttggtggaatcaaaaatccgaatcctggttggaagcttggagaagaatgaatttattacactggctcatgtgaatccccagtcatttccagcacccaaagaaaatcccgacaaggaagaatttcgcacgatgtgggtgattgggttagtgtttaaaaaaacagaaaactctgaaaacctcagtgttgatctcacctatgatattcagtctttcacagatacagtttataggcaagcaataaacagcaagatgtttgaggtggatatgaaaattgctgcaatgcatgtaaaaagaaagcaactccatcaactactacctaatcatgtgcttcagaaaaagaaaaagcattcaacagaaggtgtcaaattgacagctctcaatgacagcagcctcgacttgtctatggacagtgataacagcatgtctgtgccttcacctactagtgctacgaagaccagtccattgaacagttctggcagctctcagggcagaaacagtcctgctccagctgtaacagcagcatctgtgaccaacatacaggctactgaagtttctgtgccacaagtaaattccagtgaaagctcagggggtacatcgagtgaaagcattcctcaaactgccacacaaccagccatttctccaccaccaaagcctacggtctccagagttgtttcttcaacacgtctggtaaacccaccacctagatcttcaggaaatgcagcaacttcaggaaatgcagcaacaaaaatacctactcctatagtaggagtcaagaggacatcctcacctcataaagaagagagtcccaagaaaaccaaaacagaagagatgaaacaagtgaagatgctaactgtctgctttgagtgacacgaatgttcaggtacaagctcggttctatatgtaca

SEQ ID NO: 434982 - DNA, 2779 bp, Homo sapiens
agcggagttctagaacgttgctgtggtagcgctcgggcgccatgttaggacgaaggggaaggaggagaagcgcttaaagcggcgggagcggtgcgggagaggggttggacccagggctgaggcaggcccccccctccctcccgcctcagtggatcatgcccagggcggcagcggcggcggttgcgggggggaagtgactgggcggtgccggcgccggagacgatgccgtttccagttacaacacagggatcacaacaaacacaaccgccacagaagcactatggcattacttctcctatcagcttagcagcccccaaggagactgactgcgtacttacacagaaactaattgagacattgaaaccctttggggtttttgaagaggaagaggaactgcagcgcaggattttaattttgggaaaactaaataacctggtaaaagagtggatacgagaaatcagtgaaagcaagaatcttccacaatctgtaattgaaaatgttggaggaaaaatttttacatttggatcttacagattaggagtgcatacaaaaggtgctgatattgatgcgttgtgtgttgcaccaagacatgttgatcgaagtgactttttcacctcattctatgataagttgaaattacaggaagaagtaaaagatttaagagctgttgaagaggcattcgtaccagttattaaactctgttttgatgggatagagattgatattttgtttgcaagattagcactgcagacaattcctgaagatttggatctacgagatgacagtctgctaaaaaatttagatataagatgtataagaagtcttaacggttgcagggtaaccgatgaaattttacatctagtaccaaacattgacaacttcaggttaactctgagagctatcaaactatgggccaaacgccacaacatctattccaatatattaggtttcctcggtggtgtttcctgggctatgctagtagcaagaacttgccagctttatccaaatgcaatagcatcaactcttgtacataaatttttcttggtattttctaaatgggaatggccaaatccagtgctattgaaacagcctgaagaatgcaatcttaatttgcctgtatgggacccaagggtaaaccccagtgataggtaccatcttatgcctataattacaccagcatacccacaacagaactccacgtacaatgtgtccgtttcaacacggatggtcatggttgaggagtttaaacaaggtcttgctatcacagatgaaattttgctgagtaaggcagagtggtccaaactttttgaagctccaaacttctttcaaaagtacaagcattatattgtacttctagcaagtgcaccaacagaaaaacaacgcctggaatgggtgggcttggtggaatcaaaaatccgaatcctggttggaagcttggagaagaatgaatttattacactggctcatgtgaatccccagtcatttccagcacccaaagaaaatcccgacaaggaagaatttcgcacgatgtgggtgattgggttagtgtttaaaaaaacagaaaactctgaaaacctcagtgttgatctcacctatgatattcagtctttcacagatacagtttataggcaagcaataaacagcaagatgtttgaggtggatatgaaaattgctgcaatgcatgtaaaaagaaagcaactccatcaactactacctaatcatgtgcttcagaaaaagaaaaagcattcaacagaaggtgtcaaattgacagctctcaatgacagcagcctcgacttgtctatggacagtgataacagcatgtctgtgccttcacctactagtgctacgaagaccagtccattgaacagttctggcagctctcaggggtaaggaaaaagagggaaatagaagtggaggggctgtttgctaaatcaatcagatacattctctttttgctattaaagtcatctatttagaatgttattttcattccatctactaatttttttttaaatagcaatttaattcccaggtttggggatagtactttttggttttgtcttgtcatacttaacattttatttttgagactgataatgtcttcagtcagatgtgaatgaatgttagcacataacccctccaaattcatgtatttagatagctactgctacagtgcactgtatggtgtgctgatgagaacagacaaaaggaacaaaaccacctttctgtcccagagctgcttatacctttgtaacagggaatgtgtctatgatagttagggaaacctgttttagaagagctagatatctgtctaacatttacagcagttaaaattttaaaaatttattattattttgagaaatggggtctggctgtgttgtttaggctggccttgagttcctggatttaagcgatcctcctacttcaaccttctgagtagctgagactacaggcgcatgccactgccctgggtatgaagcagtgaaaaattttcagccaggtgcagtgactcacacctgtaatcccaacacttggggaggctgaggtggtaggatcacttgaggccaggagttcaagaccagcctgggcaacgtagtgagactcccatctctagaaaaaagtaaaagaattaggtgtggtggtatgcacctgtagtcgtggccactcaggaggctgaggtgggaggattgcttgaacctgcaaggttgagactacagtgagctgtgatcccactgctgtaccccagcctgggcaaccagagtgagaccctgtcttaaaa

SEQ ID NO: 434983 - DNA, 2007 bp, Homo sapiens
agcggagttctagaacgttgctgtggtagcgctcgggcgccatgttaggacgaaggggaaggaggagaagcgcttaaagcggcgggagcggtgcgggagaggggttggacccagggctgaggcaggcccccccctccctcccgcctcagtggatcatgcccagggcggcagcggcggcggttgcgggggggaagtgactgggcggtgccggcgccggagacgatgccgtttccagttacaacacagggatcacaacaaacacaaccgccacagaagcactatggcattacttctcctatcagcttagcagcccccaaggagactgactgcgtacttacacagaaactaattgagacattgaaaccctttggggtttttgaagaggaagaggaactgcagcgcaggattttaattttgggaaaactaaataacctggtaaaagagtggatacgagaaatcagtgaaagcaagaatcttccacaatctgtaattgaaaatgttggaggaaaaatttttacatttggatcttacagattaggagtgcatacaaaaggtgctgatattgatgcgttgtgtgttgcaccaagacatgttgatcgaagtgactttttcacctcattctatgataagttgaaattacaggaagaagtaaaagatttaagagctgttgaagaggcattcgtaccagttattaaactctgttttgatgggatagagattgatattttgtttgcaagattagcactgcagacaattcctgaagatttggatctacgagatgacagtctgctaaaaaatttagatataagatgtataagaagtcttaacggttgcagggtaaccgatgaaattttacatctagtaccaaacattgacaacttcaggttaactctgagagctatcaaactatgggccaaacgccacaacatctattccaatatattaggtttcctcggtggtgtttcctgggctatgctagtagcaagaacttgccagctttatccaaatgcaatagcatcaactcttgtacataaatttttcttggtattttctaaatgggaatggccaaatccagtgctattgaaacagcctgaagaatgcaatcttaatttgcctgtatgggacccaagggtaaaccccagtgataggtaccatcttatgcctataattacaccagcatacccacaacagaactccacgtacaatgtgtccgtttcaacacggatggtcatggttgaggagtttaaacaaggtcttgctatcacagatgaaattttgctgagtaaggcagagtggtccaaactttttgaagctccaaacttctttcaaaagtacaagcattatattgtacttctagcaagtgcaccaacagaaaaacaacgcctggaatgggtgggcttggtggaatcaaaaatccgaatcctggttggaagcttggagaagaatgaatttattacactggctcatgtgaatccccagtcatttccagcacccaaagaaaatcccgacaaggaagaatttcgcacgatgtgggtgattgggttagtgtttaaaaaaacagaaaactctgaaaacctcagtgttgatctcacctatgatattcagtctttcacagatacagtttataggcaagcaataaacagcaagatgtttgaggtggatatgaaaattgctgcaatgcatgtaaaaagaaagcaactccatcaactactacctaatcatgtgcttcagaaaaagaaaaagcattcaacagaaggtgtcaaattgacagctctcaatgacagcagcctcgacttgtctatggacagtgataacagcatgtctgtgccttcacctactagtgctacgaagaccagtccattgaacagttctggcagctctcagggcagaaacagtcctgctccagctgtaacagcagcatctgtactccttgtatttttcaagagctattttgtaaacagatgatgtatttctccattgaaaacacaataaaaaaaaacagcacaa

SEQ ID NO: 434984 - DNA, 1282 bp, Homo sapiens
agcggagttctagaacgttgctgtggtagcgctcgggcgccatgttaggacgaaggggaaggaggagaagcgcttaaagcggcgggagcggtgcgggagaggggttggacccagggctgaggcaggcccccccctccctcccgcctcagtggatcatgcccagggcggcagcggcggcggttgcgggggggaagtgactgggcggtgccggcgccggagacgatgccgtttccagttacaacacagggatcacaacaaacacaaccgccacagaagcactatggcattacttctcctatcagcttagcagcccccaaggagactgactgcgtacttacacagaaactaattgagacattgaaaccctttggggtttttgaagaggaagaggaactgcagcgcaggattttaattttgggaaaactaaataacctggtaaaagagtggatacgagaaatcagtgaaagcaagaatcttccacaatctgtaattgaaaatgttggaggaaaaatttttacatttggatcttacagattaggagtgcatacaaaaggtgctgatattgatgcgttgtgtgttgcaccaagacatgttgatcgaagtgactttttcacctcattctatgataagttgaaattacaggaagaagtaaaagatttaagagctgttgaagaggcattcgtaccagttattaaactctgttttgatgggatagagattgatattttgtttgcaagattagcactgcagacaattcctgaagatttggatctacgagatgacagtctgctaaaaaatttagatataagatgtataagaagtcttaacggttgcagggtaaccgatgaaattttacatctagtaccaaacattgacaacttcaggttaactctgagagctatcaaactatgggccaaacgccacaacatctattccaatatattaggtttcctcggtggtgtttcctgggctatgctagtagcaagaacttgccagctttatccaaatgcaatagcatcaactcttgtacataaatttttcttggtattttctaaatggtatgtgtttagattatattaaaataaaattgattgtagacactgaaaaaaaaaaaaaaaaaaaaaaaatttgggggggcgtggctcggaaatttttaaccattgtggggggggccaaggtagaatgggaaagggtcagaaacgggcgtgaaggggggggtcccaaaaaagcgggggcgggttggaacacggggtgggtttggtaaaggcagaacaccgggcgg

SEQ ID NO: 434985 - DNA, 1662 bp, Homo sapiens
agcggagttctagaacgttgctgtggtagcgctcgggcgccatgttaggacgaaggggaaggaggagaagcgcttaaagcggcgggagcggtgcgggagaggggttggacccagggctgaggcaggcccccccctccctcccgcctcagtggatcatgcccagggcggcagcggcggcggttgcgggggggaagtgactgggcggtgccggcgccggagacgatgccgtttccagttacaacacagggatcacaacaaacacaaccgccacagaagcactatggcattacttctcctatcagcttagcagcccccaaggagactgactgcgtacttacacagaaactaattgagacattgaaaccctttggggtttttgaagaggaagaggaactgcagcgcaggattttaattttgggaaaactaaataacctggtaaaagagtggatacgagaaatcagtgaaagcaagaatcttccacaatctgtaattgaaaatgttggaggaaaaatttttacatttggatcttacagattaggagtgcatacaaaaggtgctgatattgatgcgttgtgtgttgcaccaagacatgttgatcgaagtgactttttcacctcattctatgataagttgaaattacaggaagaagtaaaagatttaagagctgttgaagaggcattcgtaccagttattaaactctgttttgatgggatagagattgatattttgtttgcaagattagcactgcagacaattcctgaagatttggatctacgagatgacagtctgctaaaaaatttagatataagatgtataagaagtcttaacggttgcagggtaaccgatgaaattttacatctagtaccaaacattgacaacttcaggttaactctgagagctatcaaactatgggccaaacgccacaacatctattccaatatattaggtttcctcggtggtgtttcctgggctatgctagtagcaagaacttgccagctttatccaaatgcaatagcatcaactcttgtacataaatttttcttggtattttctaaatggtatgtgtttagattatattaaaataaaattgattgtagacactgaaaaaaaaaaaaaaaaaaaaaaaaaaaaaaaaaaaaaaaaaaaaaaaaaaaaaaaaaaaaaaaaaagaggggggggggcgaaaaaaattcccccggggggcgcgcaccaccacataatcgcgcagatcgcagcccaatattgtgttgaacaacaagaggggccccccaaaatggggggagcgactgtaaaaatataaacaggagcagcgggggccgcgcggagataaacaaccacgagggcagcatgagggagaaaaaaccgcggacgacgacgggaactacatgtgggggagaagaggagaaccaccacacatccgcggggggacgagggaaacaatatgtgtggggaacacaaacttgttctagctgagggaggagtatttataagcggctctgtgagggggagcaaatatataaaagtatttgacgaggaggtttaatgatgttgggtgtcaacacaaaccaggggaaagtttgttggtgtggagggatgtgaagaaaattttgtggacaaagggagagtatattatattagaaacaaatttttatacacgcgggt

SEQ ID NO: 434986 - DNA, 1461 bp, Homo sapiens
agcggagttctagaacgttgctgtggtagcgctcgggcgccatgttaggacgaaggggaaggaggagaagcgcttaaagcggcgggagcggtgcgggagaggggttggacccagggctgaggcaggcccccccctccctcccgcctcagtggatcatgcccagggcggcagcggcggcggttgcgggggggaagtgactgggcggtgccggcgccggagacgatgccgtttccagttacaacacagggatcacaacaaacacaaccgccacagaagcactatggcattacttctcctatcagcttagcagcccccaaggagactgactgcgtacttacacagaaactaattgagacattgaaaccctttggggtttttgaagaggaagaggaactgcagcgcaggattttaattttgggaaaactaaataacctggtaaaagagtggatacgagaaatcagtgaaagcaagaatcttccacaatctgtaattgaaaatgttggaggaaaaatttttacatttggatcttacagattaggagtgcatacaaaaggtgctgatattgatgcgttgtgtgttgcaccaagacatgttgatcgaagtgactttttcacctcattctatgataagttgaaattacaggaagaagtaaaagatttaagagctgttgaagaggcattcgtaccagttattaaactctgttttgatgggatagagattgatattttgtttgcaagattagcactgcagacaattcctgaagatttggatctacgagatgacagtctgctaaaaaatttagatataagatgtataagaagtcttaacggttgcagggtaaccgatgaaattttacatctagtaccaaacattgacaacttcaggttaactctgagagctatcaaactatgggccaaacgccacaacatctattccaatatattaggtttcctcggtggtgtttcctgggctatgctagtagcaagaacttgccagctttatccaaatgcaatagcatcaactcttgtacataaatttttcttggtattttctaaatgggaatggccaaatccagtgctattgaaacagcctgaagaatgcaatcttaatttgcctgtatgggacccaagggttagtgtattattttttcccctaccaattcacactgtgcaataacaagtaaaaatcatctgcataaactccagggagacttccagccttttacttatgaatggtcatgtccgtattacactttcttttagataacctcaactataattgtcctcaactataattgatgtgagaagcataattatgtaccctgtaaaccacatttaattgtacatagtttttaatacagattttactaacattttaatttattctatatagaactaccttgtaagtcaaagttgtgtgggcatttgtgctttaaaaaaaataaaaggatactaaaaaacc

SEQ ID NO: 434987 - DNA, 2484 bp, Homo sapiens
agcggagttctagaacgttgctgtggtagcgctcgggcgccatgttaggacgaaggggaaggaggagaagcgcttaaagcggcgggagcggtgcgggagaggggttggacccagggctgaggcaggcccccccctccctcccgcctcagtggatcatgcccagggcggcagcggcggcggttgcgggggggaagtgactgggcggtgccggcgccggagacgatgccgtttccagttacaacacagggatcacaacaaacacaaccgccacagaagcactatggcattacttctcctatcagcttagcagcccccaaggagactgactgcgtacttacacagaaactaattgagacattgaaaccctttggggtttttgaagaggaagaggaactgcagcgcaggattttaattttgggaaaactaaataacctggtaaaagagtggatacgagaaatcagtgaaagcaagaatcttccacaatctgtaattgaaaatgttggaggaaaaatttttacatttggatcttacagattaggagtgcatacaaaaggtgctgatattgatgcgttgtgtgttgcaccaagacatgttgatcgaagtgactttttcacctcattctatgataagttgaaattacaggaagaagtaaaagatttaagagctgttgaagaggcattcgtaccagttattaaactctgttttgatgggatagagattgatattttgtttgcaagattagcactgcagacaattcctgaagatttggatctacgagatgacagtctgctaaaaaatttagatataagatgtataagaagtcttaacggttgcagggtaaccgatgaaattttacatctagtaccaaacattgacaacttcaggttaactctgagagctatcaaactatgggccaaacgccacaacatctattccaatatattaggtttcctcggtggtgtttcctgggctatgctagtagcaagaacttgccagctttatccaaatgcaatagcatcaactcttgtacataaatttttcttggtattttctaaatgggaatggccaaatccagtgctattgaaacagcctgaagaatgcaatcttaatttgcctgtatgggacccaagggtaaaccccagtgataggtaccatcttatgcctataattacaccagcatacccacaacagaactccacgtacaatgtgtccgtttcaacacggatggtcatggttgaggagtttaaacaaggtcttgctatcacagatgaaattttgctgagtaaggcagagtggtccaaactttttgaagctccaaacttctttcaaaagtacaagcattatattgtacttctagcaagtgcaccaacagaaaaacaacgcctggaatggtgagtataagaatagactttacagaaaaagcaaacttcaaaatgaatcacatagccactgaacacagtaggagatgggaggaagtccttaaaacttctagtttggtttgatttgttcacaaatggagctttactgtgtgtagtggaagtacagaaatcaggagatccatatgcaacttatttttttgtttgctttatggagatccgtgcataatttcttaattgtatatttaaagtgcacttatagcttgtttttcttaaaatttttgtgtggataacttttgtaaccttgctggtgtgaatggagtgtttcttggctcttttttccccgttgtttggcaattttgggtagaacataaggcttctggttttatctgtgggagttcagctagttgaaatgccctggtatgtgcattttatttatttatttttaagttaaccaaaactttttgttaatactaagtgacatttgttcagggtgggcttggtggaatcaaaaatccgaatcctggttggaagcttggagaagaatgaatttattacactggctcatgtgaatccccagtcatttccagcacccaaagaaaatcccgacaaggaagaatttcgcacgatgtgggtgattgggttagtgtttaaaaaaacagaaaactctgaaaacctcagtgttgatctcacctatgatattcagtctttcacagatacagtttataggcaagcaataaacagcaagatgtttgaggtggatatgaaaattgctgcaatgcatgtaaaaagaaagcaactccatcaactactacctaatcatgtgcttcagaaaaagaaaaagcattcaacagaaggtgtcaaattgacagctctcaatgacagcagcctcgacttgtctatggacagtgataacagcatgtctgtgccttcacctactagtgctacgaagaccagtccattgaacagttctggcagctctcagggcagaaacagtcctgctccagctgtaacagcagcatctgtactccttgtatttttcaagagctattttgtaaacagatgatgtatttctccattgaaaacacaataaaaaaaaacagcacaa

SEQ ID NO: 434988 - DNA, 2512 bp, Homo sapiens
gaggcgatctagaggatcccgccatttctccaccaccaaagcctacggtctccagagttgtttcttcaacacgtctggtaaacccaccacctagatcttcaggaaatgcagcaacttcaggaaatgcagcaacaaaaatacctactcctatagtaggagtcaagaggacatcctcacctcataaagaagagagtcccaagaaaaccaaaacagaagaggatgaaacaagtgaagatgctaactgtcttgctttgagtggacatgataaaacagaagcaaaggaacaacttgatacagagacaagtacaactcaatcagaaactattcagacagcggcttctctgttggcctctcagaaaacatccagtacagacctttctgatatccctgctctccctgcaaatcctattcctgttatcaagaattcaataaaactgagattgaatcggtaaaaacaacctcaggggtccataaacaatatctgccaactcaacctgttgtcttcaaatgctaaaaaaggagaatggagggtacaagactagacatgactgaaatggatttgggttttttggtgacctcccttactgggctaatcagcacttgatcggaagtccaggttagtatgtgaagccaggagtactattattattgtgttagcaacagttgcattaactatttcaaaaattactgcctttaaaaaaaacaacctcaagctatatttgtattcataattgacatctggattgggtttatgtttgatgcattgtttggaaaatttgcaatacaaactggcataagaattacttattctgatgatgcacttttatgtatttttcattagaaagtagaactaattttagattttcagcttgatggattttcagtttttcctgaagaattttctttaccattagtcttcaaattggatactgttgtgcagtggtgtactgttatacttcagagaaagggtaagagtacatctagttcagttcctatgaggtagctgtaacccttaaaaatgaaacgtcaactctagggtacatttgacattgaaagaatagttaggaaataacttggttttgatagggtcatgattaagaaatgatatattggttttatttatggaattgttttatagtgcatacaaatcagcgatcagccagcaaatatttttctttgagcttgtgaaagctctgtgttcttttgccttcaatctgttgtcttcaaaacaaacaaacaaaaaaagcttcttgcgcctttccctcccctgttttcttcctttttctttttgcttgtatgcacaaggtaggacttacttcgtaagaaacaaaatgccagtattttcttaagccatgatgtgaaaccaatgaccctgtgaccacatggcacagaacactaaattttggtcccatggctgaaacttgagggtgactaaaagtaatgcctgtgaaacatgatatctatctgggatggccatttgatctctaaaaggaattttgtacactccacagaactcctatctatagtaaaattgattttcagttttaaatgtgggcaaaaaggcattttctccaagattttaaaactaattcttatttttaaatggtttaccaaaatttgtcagtacattttacgtgtagaagcattttaaaaatcatttctagcaagcacttgacatctagtcagctctctactcctttattttgttttatcaaaagattaagagctcctttctttgaataaaataatttctcataattaagcagtagaagatctatcttcacaaagtatgagggatgccagatgttgataaacttactctttctgaatctggacaaagtcgacttaacagatttttctgatgagcatgttttatgaatcctccattgtgctccattctatcacatgtgcatttttcatgttaaactgcaattacttaatctcttcccctatccttctaaattaattttctgaagttggagtgtagtcttttcccccttaggctatgcattaatcgaagctttcttttcaccatgactttataatgtctagtaaacaatatttctacttcccacatctttgctttacacagtcaccttgcccttccttccaccaccgaagaaaaaagatggtcatactaacaggtgaaatgtacaaggtgtctgtgtgttttgtgtagcttcagagttagattgaaattaccaggcacagatttagtcttgtcattttgtttacacattggggaaaacaattcagtttattaaacgtttcatgtaactgcacccaagttttgccaagctggaaacttggaccttttctgtgtagtgactttttaattatagttttcataacctggagatcagactgttgctttcgcatgatgtatgtagtgtctcatgactggagtttgctttgttttatagtatctgtactccttgtatttttcaagagctattttgtaaacagatgatgtatttctccattgaaaacacaataaaaaaaaacagcacaa

SEQ ID NO: 434989 - DNA, 1771 bp, Homo sapiens
agcggagttctagaacgttgctgtggtagcgctcgggcgccatgttaggacgaaggggaaggaggagaagcgcttaaagcggcgggagcggtgcgggagaggggttggacccagggctgaggcaggcccccccctccctcccgcctcagtggatcatgcccagggcggcagcggcggcggttgcgggggggaagtgactgggcggtgccggcgccggagacgatgccgtttccagttacaacacagggatcacaacaaacacaaccgccacagaagcactatggcattacttctcctatcagcttagcagcccccaaggagactgactgcgtacttacacagaaactaattgagacattgaaaccctttggggtttttgaagaggaagaggaactgcagcgcaggattttaattttgggaaaactaaataacctggtaaaagagtggatacgagaaatcagtgaaagcaagaatcttccacaatctgtaattgaaaatgttggaggaaaaatttttacatttggatcttacagattaggagtgcatacaaaaggtgctgatattgatgcgttgtgtgttgcaccaagacatgttgatcgaagtgactttttcacctcattctatgataagttgaaattacaggaagaagtaaaagatttaagagctgttgaagaggcattcgtaccagttattaaactctgttttgatgggatagagattgatattttgtttgcaagattagcactgcagacaattcctgaagatttggatctacgagatgacagtctgctaaaaaatttagatataagatgtataagaagtcttaacggttgcagggtaaccgatgaaattttacatctagtaccaaacattgacaacttcaggttaactctgagagctatcaaactatgggccaaacgccacaacatctattccaatatattaggtttcctcggtggtgtttcctgggctatgctagtagcaagaacttgccagctttatccaaatgcaatagcatcaactcttgtacataaatttttcttggtattttctaaatggtatgtgtttagattatattaaaataaaattgattgtagacactgaagtttagtcttatttctatgacatttctcagcttggtttcagattcaaattttagttcatgatgtagtcatgtaggcagccttggagatcacattgtgtataaaatggcaaactgaaactattttttttccctagtttggccaggatagtaaggcagattctatttgtacttccttgcataaacttaccctctgaataaactctgaattttagcagctaagatccaatttattgataggttgggaaatcagttactatacttttggataaaacttgtacacactacctctttcactcttttaattctctatctataggccattagtttcttgtgattgttttttttttctttttgctttcagcatttatttggcctaatattaaagatacgaattttcataagaagcttttaaagaataaattaacattaagtgcttcgggacaaaaaaggaatttgagattagtcattaacccagatttttttaagtttcttcgtttcatttccacatatgtcaactatgatttaagaaaaagtagaataaaagattactgccattttatattaattgccttggcccaaaaggtgagggttcttggtttttaatcaaattaagatgaaatcgtccgattcctgttcttatgaactcctgctcctccctctgcaaaa

SEQ ID NO: 434990 - DNA, 2329 bp, Homo sapiens
acccacgggggcgaaagaggcgggcgggggagaggaggatgagggagtgggagaagagaaaactcttgctttgagtggacatgatacaacagaagcaagaacaacttgatacagagacaagtacaactcaatcagaaactattcagacagcggcttctctgttggcctctcagaaaacatccagtacagacctttctgatatccctgctctccctgcaaatcctattcctgttatcaagaattcaataaaactgagattgaatcggtaaaaacaacctcaggggtccataaacaatatctgccaactcaacctgttgtcttcaaatgctaaaaaaggagaatggagggtacaagactagacatgactgaaatggatttgggttttttggtgacctcccttactgggctaatcagcacttgatcggaagtccaggttagtatgtgaagccaggagtactattattattgtgttagcaacagttgcattaactatttcaaaaattactgcctttaaaaaaaacaacctcaagctatatttgtattcataattgacatctggattgggtttatgtttgatgcattgtttggaaaatttgcaatacaaactggcataagaattacttattctgatgatgcacttttatgtatttttcattagaaagtagaactaattttagattttcagcttgatggattttcagtttttcctgaagaattttctttaccattagtcttcaaattggatactgttgtgcagtggtgtactgttatacttcagagaaagggtaagagtacatctagttcagttcctatgaggtagctgtaacccttaaaaatgaaacgtcaactctagggtacatttgacattgaaagaatagttaggaaataacttggttttgatagggtcatgattaagaaatgatatattggttttatttatggaattgttttatagtgcatacaaatcagcgatcagccagcaaatatttttctttgagcttgtgaaagctctgtgttcttttgccttcaatctgttgtcttcaaaacaaacaaacaaaaaaagcttcttgcgcctttccctcccctgttttcttcctttttctttttgcttgtatgcacaaggtaggacttacttcgtaagaaacaaaatgccagtattttcttaagccatgatgtgaaaccaatgaccctgtgaccacatggcacagaacactaaattttggtcccatggctgaaacttgagggtgactaaaagtaatgcctgtgaaacatgatatctatctgggatggccatttgatctctaaaaggaattttgtacactccacagaactcctatctatagtaaaattgattttcagttttaaatgtgggcaaaaaggcattttctccaagattttaaaactaattcttatttttaaatggtttaccaaaatttgtcagtacattttacgtgtagaagcattttaaaaatcatttctagcaagcacttgacatctagtcagctctctactcctttattttgttttatcaaaagattaagagctcctttctttgaataaaataatttctcataattaagcagtagaagatctatcttcacaaagtatgagggatgccagatgttgataaacttactctttctgaatctggacaaagtcgacttaacagatttttctgatgagcatgttttatgaatcctccattgtgctccattctatcacatgtgcatttttcatgttaaactgcaattacttaatctcttcccctatccttctaaattaattttctgaagttggagtgtagtcttttcccccttaggctatgcattaatcgaagctttcttttcaccatgactttataatgtctagtaaacaatatttctacttcccacatctttgctttacacagtcaccttgcccttccttccaccaccgaagaaaaaagatggtcatactaacaggtgaaatgtacaaggtgtctgtgtgttttgtgtagcttcagagttagattgaaattaccaggcacagatttagtcttgtcattttgtttacacattggggaaaacaattcagtttattaaacgtttcatgtaactgcacccaagttttgccaagctggaaacttggaccttttctgtgtagtgactttttaattatagttttcataacctggagatcagactgttgctttcgcatgatgtatgtagtgtctcatgactggagtttgctttgttttatagtatctgtactccttgtatttttcaagagctattttgtaaacagatgatgtatttctccattgaaaacacaataaaaaaaaacagcacaa

SEQ ID NO: 434991 - DNA, 2255 bp, Homo sapiens
ccgtctctactaataacatacataatataaataaagttagttcgggcgtggttgtcacctcataaagaagagagtcccaagaaaaccaaaacagaagagaaaacatccagtacagacctttctgatatccctgctctccctgcaaatcctattcctgttatcaagaattcaataaaactgagattgaatcggtaaaaacaacctcaggggtccataaacaatatctgccaactcaacctgttgtcttcaaatgctaaaaaaggagaatggagggtacaagactagacatgactgaaatggatttgggttttttggtgacctcccttactgggctaatcagcacttgatcggaagtccaggttagtatgtgaagccaggagtactattattattgtgttagcaacagttgcattaactatttcaaaaattactgcctttaaaaaaaacaacctcaagctatatttgtattcataattgacatctggattgggtttatgtttgatgcattgtttggaaaatttgcaatacaaactggcataagaattacttattctgatgatgcacttttatgtatttttcattagaaagtagaactaattttagattttcagcttgatggattttcagtttttcctgaagaattttctttaccattagtcttcaaattggatactgttgtgcagtggtgtactgttatacttcagagaaagggtaagagtacatctagttcagttcctatgaggtagctgtaacccttaaaaatgaaacgtcaactctagggtacatttgacattgaaagaatagttaggaaataacttggttttgatagggtcatgattaagaaatgatatattggttttatttatggaattgttttatagtgcatacaaatcagcgatcagccagcaaatatttttctttgagcttgtgaaagctctgtgttcttttgccttcaatctgttgtcttcaaaacaaacaaacaaaaaaagcttcttgcgcctttccctcccctgttttcttcctttttctttttgcttgtatgcacaaggtaggacttacttcgtaagaaacaaaatgccagtattttcttaagccatgatgtgaaaccaatgaccctgtgaccacatggcacagaacactaaattttggtcccatggctgaaacttgagggtgactaaaagtaatgcctgtgaaacatgatatctatctgggatggccatttgatctctaaaaggaattttgtacactccacagaactcctatctatagtaaaattgattttcagttttaaatgtgggcaaaaaggcattttctccaagattttaaaactaattcttatttttaaatggtttaccaaaatttgtcagtacattttacgtgtagaagcattttaaaaatcatttctagcaagcacttgacatctagtcagctctctactcctttattttgttttatcaaaagattaagagctcctttctttgaataaaataatttctcataattaagcagtagaagatctatcttcacaaagtatgagggatgccagatgttgataaacttactctttctgaatctggacaaagtcgacttaacagatttttctgatgagcatgttttatgaatcctccattgtgctccattctatcacatgtgcatttttcatgttaaactgcaattacttaatctcttcccctatccttctaaattaattttctgaagttggagtgtagtcttttcccccttaggctatgcattaatcgaagctttcttttcaccatgactttataatgtctagtaaacaatatttctacttcccacatctttgctttacacagtcaccttgcccttccttccaccaccgaagaaaaaagatggtcatactaacaggtgaaatgtacaaggtgtctgtgtgttttgtgtagcttcagagttagattgaaattaccaggcacagatttagtcttgtcattttgtttacacattggggaaaacaattcagtttattaaacgtttcatgtaactgcacccaagttttgccaagctggaaacttggaccttttctgtgtagtgactttttaattatagttttcataacctggagatcagactgttgctttcgcatgatgtatgtagtgtctcatgactggagtttgctttgttttatagtatctgtactccttgtatttttcaagagctattttgtaaacagatgatgtatttctccattgaaaacacaataaaaaaaaacagcacaa

SEQ ID NO: 434992 - DNA, 1076 bp, Homo sapiens
agcggagttctagaacgttgctgtggtagcgctcgggcgccatgttaggacgaaggggaaggaggagaagcgcttaaagcggcgggagcggtgcgggagaggggttggacccagggctgaggcaggcccccccctccctcccgcctcagtggatcatgcccagggcggcagcggcggcggttgcgggggggaagtgactgggcggtgccggcgccggagacgatgccgtttccagttacaacacagggatcacaacaaacacaaccgccacagaagcactatggcattacttctcctatcagcttagcagcccccaaggagactgactgcgtacttacacagaaactaattgagacattgaaaccctttggggtttttgaagaggaagaggaactgcagcgcaggattttaattttgggaaaactaaataacctggtaaaagagtggatacgagaaatcagtgaaagcaagaatcttccacaatctgtaattgaaaatgttggaggaaaaatttttacatttggatcttacagattaggagtgcatacaaaaggtgctgatattgatgcgttgtgtgttgcaccaagacatgttgatcgaagtgactttttcacctcattctatgataagttgaaattacaggaagaagtaaaagatttaagagctgttgaagaggcattcgtaccagttattaaactctgttttgatgggatagagattgatattttgtttgcaagattagcactgcagacaattcctgaagatttggatctacgagatgacagtctgctaaaaaatttagatataagatgtataagaagtcttaacggtatgagaaagcctacttccttttgtgtacttcagtttttgtcagatattagttgtttttacacaagttttgtattgaagctttttatagctatattgttaacacagtagtgagttaaataaaatgaactttgcctaataaactacagaagagtatgtagtagtttatttcactctacagtattttatacactgtatttcttctgtcattaatggtatactcaggacacttaaaaagaccatctgac

SEQ ID NO: 434993 - DNA, 1418 bp, Homo sapiens
cggacgcgtgggcgaccacgcgtccgtatggaattgttttatagtgcatacaaatcagcgatcagccagcaaatatttttctttgagcttgtgaaagctctgtgttcttttgccttcaatctgttgtcttcaaaacaaacaaacaaaaaaagcttcttgcgcctttccctcccctgttttcttcctttttctttttgcttgtatgcacaaggtaggacttacttcgtaagaaacaaaatgccagtattttcttaagccatgatgtgaaaccaatgaccctgtgaccacatggcacagaacactaaattttggtcccatggctgaaacttgagggtgactaaaagtaatgcctgtgaaacatgatatctatctgggatggccatttgatctctaaaaggaattttgtacactccacagaactcctatctatagtaaaattgattttcagttttaaatgtgggcaaaaaggcattttctccaagattttaaaactaattcttatttttaaatggtttaccaaaatttgtcagtacattttacgtgtagaagcattttaaaaatcatttctagcaagcacttgacatctagtcagctctctactcctttattttgttttatcaaaagattaagagctcctttctttgaataaaataatttctcataattaagcagtagaagatctatcttcacaaagtatgagggatgccagatgttgataaacttactctttctgaatctggacaaagtcgacttaacagatttttctgatgagcatgttttatgaatcctccattgtgctccattctatcacatgtgcatttttcatgttaaactgcaattacttaatctcttcccctatccttctaaattaattttctgaagttggagtgtagtcttttcccccttaggctatgcattaatcgaagctttcttttcaccatgactttataatgtctagtaaacaatatttctacttcccacatctttgctttacacagtcaccttgcccttccttccaccaccgaagaaaaaagatggtcatactaacaggtgaaatgtacaaggtgtctgtgtgttttgtgtagcttcagagttagattgaaattaccaggcacagatttagtcttgtcattttgtttacacattggggaaaacaattcagtttattaaacgtttcatgtaactgcacccaagttttgccaagctggaaacttggaccttttctgtgtagtgactttttaattatagttttcataacctggagatcagactgttgctttcgcatgatgtatgtagtgtctcatgactggagtttgctttgttttatagtatctgtactccttgtatttttcaagagctattttgtaaacagatgatgtatttctccattgaaaacacaataaaaaaaaacagcacaa

SEQ ID NO: 434994 - DNA, 1644 bp, Homo sapiens
ggcatcgcgttgctcgcaataggtgtattgatcatgctctctaaaccgtagtggcctagaaggtatctcgatctacaactcctattaggtttctgtccactttaaaacatgccgcgtcaactctagcgtacttttgacatccagaatgaatattctagagagactatacacttgggtatctgatcaaggcgattcagagatctcaagcagagtcgtactgatattcggatattactgccatcggaccctgtgtatggaattgttttatagtgcatacaaatcagcgatcagccagcaaatatttttctttgagcttgtgaaagctctgtgttcttttgccttcaatctgttgtcttcaaaacaaacaaacaaaaaaagcttcttgcgcctttccctcccctgttttcttcctttttctttttgcttgtatgcacaaggtaggacttacttcgtaagaaacaaaatgccagtattttcttaagccatgatgtgaaaccaatgaccctgtgaccacatggcacagaacactaaattttggtcccatggctgaaacttgagggtgactaaaagtaatgcctgtgaaacatgatatctatctgggatggccatttgatctctaaaaggaattttgtacactccacagaactcctatctatagtaaaattgattttcagttttaaatgtgggcaaaaaggcattttctccaagattttaaaactaattcttatttttaaatggtttaccaaaatttgtcagtacattttacgtgtagaagcattttaaaaatcatttctagcaagcacttgacatctagtcagctctctactcctttattttgttttatcaaaagattaagagctcctttctttgaataaaataatttctcataattaagcagtagaagatctatcttcacaaagtatgagggatgccagatgttgataaacttactctttctgaatctggacaaagtcgacttaacagatttttctgatgagcatgttttatgaatcctccattgtgctccattctatcacatgtgcatttttcatgttaaactgcaattacttaatctcttcccctatccttctaaattaattttctgaagttggagtgtagtcttttcccccttaggctatgcattaatcgaagctttcttttcaccatgactttataatgtctagtaaacaatatttctacttcccacatctttgctttacacagtcaccttgcccttccttccaccaccgaagaaaaaagatggtcatactaacaggtgaaatgtacaaggtgtctgtgtgttttgtgtagcttcagagttagattgaaattaccaggcacagatttagtcttgtcattttgtttacacattggggaaaacaattcagtttattaaacgtttcatgtaactgcacccaagttttgccaagctggaaacttggaccttttctgtgtagtgactttttaattatagttttcataacctggagatcagactgttgctttcgcatgatgtatgtagtgtctcatgactggagtttgctttgttttatagtatctgtactccttgtatttttcaagagctattttgtaaacagatgatgtatttctccattgaaaacacaataaaaaaaaacagcacaa

SEQ ID NO: 434995 - DNA, 802 bp, Homo sapiens
agcggagttctagaacgttgctgtggtagcgctcgggcgccatgttaggacgaaggggaaggaggagaagcgcttaaagcggcgggagcggtgcgggagaggggttggacccagggctgaggcaggcccccccctccctcccgcctcagtggatcatgcccagggcggcagcggcggcggttgcgggggggaagtgactgggcggtgccggcgccggagacgatgccgtttccagttacaacacagggatcacaacaaacacaaccgccacagaagcactatggcattacttctcctatcagcttagcagcccccaaggagactgactgcgtacttacacagaaactaattgagacattgaaaccctttggggtttttgaagaggaagaggaactgcagcgcaggattttaattttgggaaaactaaataacctggtaaaagagtggatacgagaaatcagtgaaagcaagaatcttccacaatctgtaattgaaaatgttggaggaaaaatttttacatttggatcttacagattaggagtgcatacaaaaggtgctgatattgatgcgttgtgtgttgcaccaagacatgttgatcgaagtgactttttcacctcattctatgataagttgaaattacaggaagaagtaaaagatttaagagctgttgaagaggcattcgtaccagttattaaactctgttttgatgggatagagattgatatgttgtctgccgacttagcctgccgaccattcctcaagattggatctacgaggtgatcctgtgcgagtgatccctgca

SEQ ID NO: 434996 - DNA, 966 bp, Homo sapiens
agcggagttctagaacgttgctgtggtagcgctcgggcgccatgttaggacgaaggggaaggaggagaagcgcttaaagcggcgggagcggtgcgggagaggggttggacccagggctgaggcaggcccccccctccctcccgcctcagtggatcatgcccagggcggcagcggcggcggttgcgggggggaagtgactgggcggtgccggcgccggagacgatgccgtttccagttacaacacagggatcacaacaaacacaaccgccacagaagcactatggcattacttctcctatcagcttagcagcccccaaggagactgactgcgtacttacacagaaactaattgagacattgaaaccctttggggtttttgaagaggaagaggaactgcagcgcaggattttaattttgggaaaactaaataacctggtaaaagagtggatacgagaaatcagtgaaagcaagaatcttccacaatctgtaattgaaaatgttggaggaaaaatttttacatttggatcttacagattaggagtgcatacaaaaggctgttgaagaggcattcgtaccagttattaaactctgttttgatgggatagagattgatattttgtttgcaagattagcactgcagacaattcctgaagatttggatctacgagatgacagtctgctaaaaaatttagatataagatgtataagaagtcttaacggtatgagaaagcctacttccttttgtgtacttcagtttttgtcagatattagttgtttttacacaagttttgtattgaagctttttatagctatattgttaacacagtagtgagttaaataaaatgaactttgcctaataaactacagaagagtatgtagtagtttatttcactctacagtattttatacactgtatttcttctgtcattaatggtatactcaggacacttaaaaagaccatctgac

SEQ ID NO: 434997 - DNA, 697 bp, Homo sapiens
aagataatttttctttgatttcagtggctttggttctttagaatcatcattaaggacattgactatcaatgcacagttagtaagagtatatttctcctggatctctgtttatgttgtagtaggaatatagaggacaggtgtgggtgaggactttgcgttttcatggagcttgggcttagaacttttagtttgctcatacatttgtattgtaagtttttccatgtctctgattgtcagccacactgatagctacattttcatgaaatccagataaactatggtaatgctcttctttgcagggaagaatttcgcacgatgtgggtgattgggttagtgtttaaaaaaacagaaaactctgaaaacctcagtgttgatctcacctatgatattcagtctttcacagatacaggtatgtctttacttggataatcaaaacacttcagttcttgcatatttcaaattgtcttgatgcataccatagtgatatttacaataattgttgaaattacttgcgaatattgaactatcatcagaataatggttttgtattagtctaatacagattgagtattccttatccacaatgcttgggaccagaagtgtttaggattttttcagattttggaatatttacattacacttaccagttgagcatccctagtctgaaaatatgaaatttgaaatacttcagtgagc

SEQ ID NO: 434998 - DNA, 295 bp, Homo sapiens
aattaagctgctttttggtaattattcataaagtcactgcctttttcagaagaattaaactcactagtagttagaaacatggaatttagcatatatgattttatgtgcatattgagattgtagtcccccttgctaaattgatgtggatctataactgtaaggaagcttattactttatggtttaatatccagcacaaagcgtgtaaataaaataaatagcatgttgtctttatcttcaaaggcattatattgtacttctagcaagtgcaccaacagaaaaacaacgcctggaatg

SEQ ID NO: 434999 - DNA, 2463 bp, Homo sapiens
tgtggtggtttccggcggaggtggtgagagtcgcacgcgcagcggggaaggtgtgagtcgtgaacggcccgggtctccgccatggcctctctactcgccaaggacgcctacctgcagagcctggccaagaagatctgctcccattcggccccggaacagcaggcgcgcacgcgggctggcaaaactcaaggctcagaaactgcagggcccccaaaaaagaaaaggaagaaaacacaaaagaaattccggaagcgagaagagaaggctgctgagcacaaggccaagtccttgggggagaaatctccagcagcctctggggccaggaggcctgaggcagccaaagaggaagcagcttgggcttccagctcagcagggaaccctgcagatggcctggccactgagcctgagtctgtctttgctctggatgttctgcgacagcgactgcatgagaagatccaggaggcccggggccagggcagtgccaaggagctgtcccctgccgccttggagaaaaggcggcggagaaagcaggaacgggaccggaagaagaggaagcgaaaggagctgcgggcgaaagagaaggccaggaaggctgaggaggccacggaggcccaggaggtggtggaggcaaccccagagggggcctgcacggagccgcgggagccgcccgggctgatcttcaataaggtggaggtgagcgaagacgagccggccagcaaggcgcagcgcagaaaagagaagaggcagagggtgaaggggaacctcacgccgctgaccgggaggaactaccggcagctgctggagcgcctgcaggcacggcagagccggctggacgagctgcgcggccaggatgaggggaaggcgcaggagctggaggcgaagatgaagtggaccaacctcctctacaaggcggagggcgtgaagatccgtgacgacgaacgcctgctgcaggaggccctgaagcgcaaggagaagcgcagggcgcagcggcagcgccggtgggagaagcgcacggccggcgtggtggagaagatgcagcagcgccaggaccggcggcggcagaacctgcgcaggaagaaggcggcccgcgccgagcgccgcctgctcagagcccgcaagaagggccgcatcctgccgcaggacctggagcgcgcaggcctggtctgagtctttcccacctggggccgccgtcttccgtcctaggagactccaggacaccctctgagtccttgacgctggctctgtcccaggatctccacagacctcggcctctccatgtgagggggacacagtggtgctctgctgagttgtgagggcccagatcacagatcccatgtgagaaagagagagtttcagcgtcatccttgaacgcaggatccgggaccttcagacccagggaaagggtgagggagactggggcctggtctgctttcccgggcctgaaagcttccccgaggtttgcagggtcagggaggaggaacggtgggggtgggcagtcactgcctgttccccactgcctgtgttcgcaggagccacgggacagaagacggtggcctctgctgccgggccacgttagtccgcagctcacccgaacagaggacaaccctgaggtgtggcatatgggcacctggcactgggagtcgggggagcacgtccaggcgtggtgcatcctggggcagaacgccatggctcctccccgctctcttggcttctgcctgttggggtctcattcctttctgttccccagtgccccggggcggcattttactgctcagaatttggagggagggagcagtaccttcccggagtccacgcatgtgagttgggtcaagtgcattggacctagggaaagagaaagaaagaataaaagctggagagagagtgaagtgaatgcaagatacaaagtgggatggaagaattaaatccagagttccaggcaatcaaaatgagtgcaggttgaaagaaaacaggtgaattttagtggcatatggatgataaagctgtaaataaaattcttttgatgaaactctccggttacgagacaaagactgtaactgaacaggagctggtgtgactgttaccagacagaggcaactgatgaaaaagccctgtgaaagataggatgtgaggtgagcatgagcttgagctgagagacagacacaacagtatctgaaaagaatacatactctttccatgcatatatggaacatggatggaaactgaccacctactttgtccagaaaagaagtcttaagatatttcaaggaatcagtgtcgttatctgaccgtatcccaatgtcattaaaaaaaatttgagctatttttttttgttttttagatagagcaagactgtctcaaaaagaaaaaatttaagatttgtggaacagagctaaagcagcacaaaaaaacatagcccctaaatgtatgtgcatctacagataaatagtgccatttatacacaca

SEQ ID NO: 435000 - DNA, 2168 bp, Homo sapiens
cttttggggtcatttgctttttggggaacatcatggtggaacattgaactccgcgggccccttgtttgcgtgaggattttctcacctgccttccagccctgattcttctcgactatgggccaggctgggggaccctgggatcgagagaactttaatgagtgggtgcctctttcccccagggcagtgccaaggagctgtcccctgccgccttggagaaaaggcggcggagaaagcaggaacgggaccggaagaagaggaagcgaaaggagctgcgggcgaaagagaaggccaggaaggctgaggaggccacggaggcccaggaggtggtggaggcaaccccagagggggcctgcacggagccgcgggagccgcccgggctgatcttcaataaggtggaggtgagcgaagacgagccggccagcaaggcgcagcgcagaaaagagaagaggcagagggtgaaggggaacctcacgccgctgaccgggaggaactaccggcagctgctggagcgcctgcaggcacggcagagccggctggacgagctgcgcggccaggatgaggggaaggcgcaggagctggaggcgaagatgaagtggaccaacctcctctacaaggcggagggcgtgaagatccgtgacgacgaacgcctgctgcaggaggccctgaagcgcaaggagaagcgcagggcgcagcggcagcgccggtgggagaagcgcacggccggcgtggtggagaagatgcagcagcgccaggaccggcggcggcagaacctgcgcaggaagaaggcggcccgcgccgagcgccgcctgctcagagcccgcaagaagggccgcatcctgccgcaggacctggagcgcgcaggcctggtctgagtctttcccacctggggccgccgtcttccgtcctaggagactccaggacaccctctgagtccttgacgctggctctgtcccaggatctccacagacctcggcctctccatgtgagggggacacagtggtgctctgctgagttgtgagggcccagatcacagatcccatgtgagaaagagagagtttcagcgtcatccttgaacgcaggatccgggaccttcagacccagggaaagggtgagggagactggggcctggtctgctttcccgggcctgaaagcttccccgaggtttgcagggtcagggaggaggaacggtgggggtgggcagtcactgcctgttccccactgcctgtgttcgcaggagccacgggacagaagacggtggcctctgctgccgggccacgttagtccgcagctcacccgaacagaggacaaccctgaggtgtggcatatgggcacctggcactgggagtcgggggagcacgtccaggcgtggtgcatcctggggcagaacgccatggctcctccccgctctcttggcttctgcctgttggggtctcattcctttctgttccccagtgccccggggcggcattttactgctcagaatttggagggagggagcagtaccttcccggagtccacgcatgtgagttgggtcaagtgcattggacctagggaaagagaaagaaagaataaaagctggagagagagtgaagtgaatgcaagatacaaagtgggatggaagaattaaatccagagttccaggcaatcaaaatgagtgcaggttgaaagaaaacaggtgaattttagtggcatatggatgataaagctgtaaataaaattcttttgatgaaactctccggttacgagacaaagactgtaactgaacaggagctggtgtgactgttaccagacagaggcaactgatgaaaaagccctgtgaaagataggatgtgaggtgagcatgagcttgagctgagagacagacacaacagtatctgaaaagaatacatactctttccatgcatatatggaacatggatggaaactgaccacctactttgtccagaaaagaagtcttaagatatttcaaggaatcagtgtcgttatctgaccgtatcccaatgtcattaaaaaaaatttgagctatttttttttgttttttagatagagcaagactgtctcaaaaagaaaaaatttaagatttgtggaacagagctaaagcagcacaaaaaaacatagcccctaaatgtatgtgcatctacagataaatagtgccatttatacacaca

SEQ ID NO: 435001 - DNA, 2031 bp, Homo sapiens
  misc_feature (11)..(11): n is a, c, g, or t
tgggcttttgncgcggaacccaggacctttctcaccccacgtatcacccctagagacactcacagcaagcagcaaccggggaaaaggacgaaaaagcaggaacgggaccggaagaagaggaagcgaaaggagctgcgggcgaaagagaaggccaggaaggctgaggaggccacggaggcccaggaggtggtggaggcaaccccagagggggcctgcacggagccgcgggagccgcccgggctgatcttcaataaggtggaggtgagcgaagacgagccggccagcaaggcgcagcgcagaaaagagaagaggcagagggtgaaggggaacctcacgccgctgaccgggaggaactaccggcagctgctggagcgcctgcaggcacggcagagccggctggacgagctgcgcggccaggatgaggggaaggcgcaggagctggaggcgaagatgaagtggaccaacctcctctacaaggcggagggcgtgaagatccgtgacgacgaacgcctgctgcaggaggccctgaagcgcaaggagaagcgcagggcgcagcggcagcgccggtgggagaagcgcacggccggcgtggtggagaagatgcagcagcgccaggaccggcggcggcagaacctgcgcaggaagaaggcggcccgcgccgagcgccgcctgctcagagcccgcaagaagggccgcatcctgccgcaggacctggagcgcgcaggcctggtctgagtctttcccacctggggccgccgtcttccgtcctaggagactccaggacaccctctgagtccttgacgctggctctgtcccaggatctccacagacctcggcctctccatgtgagggggacacagtggtgctctgctgagttgtgagggcccagatcacagatcccatgtgagaaagagagagtttcagcgtcatccttgaacgcaggatccgggaccttcagacccagggaaagggtgagggagactggggcctggtctgctttcccgggcctgaaagcttccccgaggtttgcagggtcagggaggaggaacggtgggggtgggcagtcactgcctgttccccactgcctgtgttcgcaggagccacgggacagaagacggtggcctctgctgccgggccacgttagtccgcagctcacccgaacagaggacaaccctgaggtgtggcatatgggcacctggcactgggagtcgggggagcacgtccaggcgtggtgcatcctggggcagaacgccatggctcctccccgctctcttggcttctgcctgttggggtctcattcctttctgttccccagtgccccggggcggcattttactgctcagaatttggagggagggagcagtaccttcccggagtccacgcatgtgagttgggtcaagtgcattggacctagggaaagagaaagaaagaataaaagctggagagagagtgaagtgaatgcaagatacaaagtgggatggaagaattaaatccagagttccaggcaatcaaaatgagtgcaggttgaaagaaaacaggtgaattttagtggcatatggatgataaagctgtaaataaaattcttttgatgaaactctccggttacgagacaaagactgtaactgaacaggagctggtgtgactgttaccagacagaggcaactgatgaaaaagccctgtgaaagataggatgtgaggtgagcatgagcttgagctgagagacagacacaacagtatctgaaaagaatacatactctttccatgcatatatggaacatggatggaaactgaccacctactttgtccagaaaagaagtcttaagatatttcaaggaatcagtgtcgttatctgaccgtatcccaatgtcattaaaaaaaatttgagctatttttttttgttttttagatagagcaagactgtctcaaaaagaaaaaatttaagatttgtggaacagagctaaagcagcacaaaaaaacatagcccctaaatgtatgtgcatctacagataaatagtgccatttatacacaca

SEQ ID NO: 435002 - DNA, 872 bp, Homo sapiens
tgtggtggtttccggcggaggtggtgagagtcgcacgcgcagcggggaaggtgtgagtcgtgaacggcccgggtctccgccatggcctctctactcgccaaggacgcctacctgcagagcctggccaagaagatctgctcccattcggccccggaacagcaggcgcgcacgcgggctggcaaaactcaaggctcagaaactgcagggcccccaaaaaagaaaaggaagaaaacacaaaagaaattccggaagcgagaagagaaggctgctgagcacaaggccaagtccttgggggagaaatctccagcagcctctggggccaggaggcctgaggcagccaaagaggaagcagcttgggcttccagctcagcagggaaccctgcagatggcctggccactgagcctgagtctgtctttgctctggatgttctgcgacagcgactgcatgagaagatccaggaggcccggggccagggcagtgccaaggagctgtcccctgccgccttggagaaaaggcggcggagaaagcaggaacgggaccggaagaagaggaagcgaaaggagctgcgggcgaaagagaaggccaggaaggctgaggaggccacggaggcccaggaggtggtggaggcaaccccagagggggcctgcacggagccgcgggagccgcccgggctgatcttcaataaggtggaggtgagcgaagacgagccggccagcaaggcgcagcgcagaaaagagaagaggcagagggtgaaggggaacctcacgcgtgacggaggactacggaagtggtgaggctgaggacaggaaccggtggaaatggcgccagagagggagcgccaatgggggaaataatggcccccctaaagggg

SEQ ID NO: 435003 - DNA, 295 bp, Homo sapiens
gtcttgctctgtcactcaggctggagtgcagtggcatttcatatttggaatttttaaaacacacttataaattacctatgagttaaagaattccgaatggctattagaaatatttgggactaaaggataatgaaaatgctacgtattaaaatttgtggaacagggcctggcatggtggctcatgctgtcaatcccagctctttgggaggcgggtggatcacttgagatcaggagttcaaggccagcctggccaacatgataaaaccccatctctattaaaaataaaaaattagct

SEQ ID NO: 435004 - DNA, 909 bp, Homo sapiens
agcgggtgaagcacctgattgcctaaaccactcgtttccttcctccagcactcaaagattaaccttagctccttccaagggttcgtgggggaaaattcgcctcgagggactgggtacatgcatattttaaaagggtctcccaatgtgattccacgggctcacgggcagaagaacacgcgaagagacggaactggcctctatcctatgcgaggtccctttaagaacctcgccctgttgcccttctccctcccgctcctgggcggaggcggaagcggaagtggcgagaaagtgtcggtctccaagatggcggccgcctggccgtctggtccgtctgctccggaggccgtgacggccagactcgttggtgtcctgtggttcgtctcagtcactacaggaccctggggggctgttgccacctccgccgggggcgaggagtcgcttaagtgcgaggacctcaaagtgggacaatatatttgtaaagatccaaaaataaatgacgctacgcaagaaccagttaactgtacaaactacacagctcatgtttcctgttttccagcacccaacataacttgtaaggattccagtggcaatgaaacacattttactgggaacgaagttggttttttcaagcccatatcttgccgaaatgtaaatggctattcctacaaagtggcagtcgcattgtctctttttcttggatggttgggagcagatcgattttaccttggataccctgctttgggtttgttaaagttttgcactgtagggttttgtggaattgggagcctaattgatttcattcttatttcaatgcaggtaagtttctcaatctagaatgtaaactacttttacattcaaaattgagttctgtgatctcctgttctatttaaaatgtttagtatacgagga

SEQ ID NO: 435005 - DNA, 1100 bp, Homo sapiens
agcgggtgaagcacctgattgcctaaaccactcgtttccttcctccagcactcaaagattaaccttagctccttccaagggttcgtgggggaaaattcgcctcgagggactgggtacatgcatattttaaaagggtctcccaatgtgattccacgggctcacgggcagaagaacacgcgaagagacggaactggcctctatcctatgcgaggtccctttaagaacctcgccctgttgcccttctccctcccgctcctgggcggaggcggaagcggaagtggcgagaaagtgtcggtctccaagatggcggccgcctggccgtctggtccgtctgctccggaggccgtgacggccagactcgttggtgtcctgtggttcgtctcagtcactacaggaccctggggggctgttgccacctccgccgggggcgaggagtcgcttaagtgcgaggacctcaaagtgggacaatatatttgtaaagatccaaaaataaatgacgctacgcaagaaccagttaactgtacaaactacacagctcatgtttcctgttttccagcacccaacataacttgtaaggattccagtggcaatgaaacacattttactgggaacgaagttggttttttcaagcccatatcttgccgaaatgtaaatggctattcctacaaagtggcagtcgcattgtctctttttcttggatggttgggagcagatcgattttaccttggataccctgctttgggtaaggaaactgtaaccagagaggttaagggatttactgagtctagaggctttcctttattctgtgacatatttgttgttatcatctttgttttatggataggaaaattgtcacgagattaagagatttacccaaggacactcagctagtgacctcaatttgaacccaaattttctggctccagagatcatgctttatttactgtagtactctgcttctatattagcccttcactgagcaaatttaaagtttttgaatgctctgcctactagctagcaaagctaaccttatttcttccatgttgctacccacaaaagatgaaagagaagtcttcactgtggggttgatggtagatata

SEQ ID NO: 435006 - DNA, 1034 bp, Homo sapiens
tttgcaaatatttacatatttaaataaaagtgttacatcaattttgaaatgtatccaacagaatataaatatcgtaggattttaaatatcacctacttaaaaaagatgtgcatgaactcttcactaaccattataatttttacattgcttcttccttgaatttttatttttattcctcttctacagaattttatcctaatataatatatttttaggtttaaaaacttcctactaggctgggcacattggctcacgcctgtaattccagctctttgggaggccgaagcaggcagatcaattgatgttcttaaccatcatcctagtactaggagtttgagaccagcctgttcaacatagtgaaatcctgtctctacaaaaaaatacaaaaacaaaattagctgggcgtgatggcgcccacctgtggtcccagctacttgggaggctgaggtgggaggatcgctggagccccgggggggaggttgcagtgagccaagatcatgccattgcactccagcctggatgacagagtgagaccctatatcaaaaaacaaacaaacaaacaaatgaaagagagaaaacttctagcgaatcatcttattcattaaaattaaaatatttaaaaattttctgtgattttttgtttggatcaacttgttataataatgatacacagttgatcaaaacagcataaacatgttgcaaattatttttaaacaaaaagatgtaaaatgttattggaaatgcatctttggaacagatacggtagaatgtatttttggacctttgagtaaaggatagttccctaaatccaatattttgagctatccctttgtttggcacttcagaggctttcacacctcagggaaatatgccatcataagactcggggtatcctggatggtaggtatgctttactgttaacaagtgggagaaatgaccacagtgaggagaagtgggaagggaaactggtaggatgcttccagtgtagcatggtatcaggcaaatttgttttacaaagagtatttagggaatta

SEQ ID NO: 435007 - DNA, 1332 bp, Homo sapiens
agcgggtgaagcacctgattgcctaaaccactcgtttccttcctccagcactcaaagattaaccttagctccttccaagggttcgtgggggaaaattcgcctcgagggactgggtacatgcatattttaaaagggtctcccaatgtgattccacgggctcacgggcagaagaacacgcgaagagacggaactggcctctatcctatgcgaggtccctttaagaacctcgccctgttgcccttctccctcccgctcctgggcggaggcggaagcggaagtggcgagaaagtgtcggtctccaagatggcggccgcctggccgtctggtccgtctgctccggaggccgtgacggccagactcgttggtgtcctgtggttcgtctcagtcactacaggaccctggggggctgttgccacctccgccgggggcgaggagtcgcttaagtgcgaggacctcaaagtgggacaatatatttgtaaagatccaaaaataaatgacgctacgcaagaaccagttaactgtacaaactacacagctcatgtttcctgttttccagcacccaacataacttgtaaggattccagtggcaatgaaacacattttactgggaacgaagttggttttttcaagcccatatcttgccgaaatgtaaatggctattcctacaaagtggcagtcgcattgtctctttttcttggatggttgggagcagatcgattttaccttggataccctgctttgggtttgttaaagttttgcactgtagggttttgtggaattgggagcctaattgatttcattcttatttcaatgcagattgttggaccttcagatggaagtagttacattatagattactatggaaccagacttacaagactgagtattactaatgaaacatttagaaaaacgcaattatatccataaatattttttaaaagaaacagatttgagcctccttgattttaatagagaacttctagtgtatggatttaaagatttctctttttcattcatataccattttatgagttctgtataattttttgtggtttttgttttgttgagttaaagtatattattgtgagatttatttaataggacttcctttgaaagctgtataatagtgtttctcgggcttctgtctctatgagagatagcttattactctgatactctttaatcttttacaaaggcaagttgccacttgtcatttttgtttctgaaaaataaaagtataacttattcacaaaaaattatacagaactcgtaaaatggtatatgaatgaaaaagagaaatctttaaatccatacactagaagttctctatta

SEQ ID NO: 435008 - DNA, 1629 bp, Homo sapiens
agcgggtgaagcacctgattgcctaaaccactcgtttccttcctccagcactcaaagattaaccttagctccttccaagggttcgtgggggaaaattcgcctcgagggactgggtacatgcatattttaaaagggtctcccaatgtgattccacgggctcacgggcagaagaacacgcgaagagacggaactggcctctatcctatgcgaggtccctttaagaacctcgccctgttgcccttctccctcccgctcctgggcggaggcggaagcggaagtggcgagaaagtgtcggtctccaagatggcggccgcctggccgtctggtccgtctgctccggaggccgtgacggccagactcgttggtgtcctgtggttcgtctcagtcactacaggaccctggggggctgttgccacctccgccgggggcgaggagtcgcttaagtgcgaggacctcaaagtgggacaatatatttgtaaagatccaaaaataaatgacgctacgcaagaaccagttaactgtacaaactacacagctcatgtttcctgttttccagcacccaacataacttgtaaggattccagtggcaatgaaacacattttactgggaacgaagttggttttttcaagcccatatcttgccgaaatgtaaatggctattcctacaaagtggcagtcgcattgtctctttttcttggatggttgggagcagatcgattttaccttggataccctgctttgggtttgttaaagttttgcactgtagggttttgtggaattgggagcctaattgatttcattcttatttcaatgcagattgttggaccttcagatggaagtagttacattatagattactatggaaccagacttacaagactgagtattactaatgaaacatttagaaaaacgcaattatatccataaatattttttaaaagaaacagatttgagcctccttgattttaatagagaacttctagtgtatggatttaaagatttctctttttcattcatataccattttatgagttctgtataattttttgtggtttttgttttgttgagttaaagtatattattgtgagatttatttaataggacttcctttgaaagctgtataatagtgtttctcgggcttctgtctctatgagagatagcttattactctgatactctttaatcttttacaaaggcaagttgccacttgtcatttttgtttctgaaaaataaaagtataacttattcacaaaaaaaaaaaaaaaaaaaaaaaaaaaaaaaaaaaaaaaaaaaaaaaaaaaaaaaaaaaaaaaaaaaaaaaaaaaaaaacaaaaaacaagaagaaagacgacaagacacagaccaaacagacatggagaacagcgaatagcaaaacaaagaaagaaagacgagaaagggggcgaggaacaagcaacaacacacggacaggagagcggaagaagaaacgagccgaggagcagaaaatcaaaagagccgaaggcaaagagcgaaggcagaaaacgaaagcagaggaggaggacaaaacagacggggagaggaagagaaagaacgaagaaagaaagtagaaaagagaaaaaagagagagagagagaaagagaaacaaaaaaa

SEQ ID NO: 435009 - DNA, 1264 bp, Homo sapiens
agcgggtgaagcacctgattgcctaaaccactcgtttccttcctccagcactcaaagattaaccttagctccttccaagggttcgtgggggaaaattcgcctcgagggactgggtacatgcatattttaaaagggtctcccaatgtgattccacgggctcacgggcagaagaacacgcgaagagacggaactggcctctatcctatgcgaggtccctttaagaacctcgccctgttgcccttctccctcccgctcctgggcggaggcggaagcggaagtggcgagaaagtgtcggtctccaagatggcggccgcctggccgtctggtccgtctgctccggaggccgtgacggccagactcgttggtgtcctgtggttcgtctcagtcactacaggaccctggggggctgttgccacctccgccgggggcgaggagtcgcttaagtgcgaggacctcaaagtgggacaatatatttgtaaagatccaaaaataaatgacgctacgcaagaaccagttaactgtacaaactacacagctcatgtttcctgttttccagcacccaacataacttgtaaggattccagtggcaatgaaacacattttactgggaacgaagttggttttttcaagcccatatcttgccgaaatgtaaatggctattcctacaaagtggcagtcgcattgtctctttttcttggatggttgggagcagatcgattttaccttggataccctgctttgggtttgttaaagttttgcactgtagggttttgtggaattgggagcctaattgatttcattcttatttcaatgcagattgttggaccttcagatggaagtagttacattatagattactatggaaccagacttacaagactgagtattactaatgaaacatttagaaaaacgcaattatatccataaatattttttaaaagaaacagatttgagcctccttgattttaatagagaacttctagtgtatggatttaaagatttctctttttcattcatataccattttatgagttctgtataattttttgtggtttttgttttgttgagttaaagtatattattgtgagatttatttaataggacttcctttgaaagctgtataatagtgtttctcgggcttctgtctctatgagagatagcttattactctgatactctttaatcttttacaaaggcaagttgccacttgtcatttttgtttctgaagtgtcctgaagtgtcaggataccgagctctacattcg

SEQ ID NO: 435010 - DNA, 2743 bp, Homo sapiens
agcgggtgaagcacctgattgcctaaaccactcgtttccttcctccagcactcaaagattaaccttagctccttccaagggttcgtgggggaaaattcgcctcgagggactgggtacatgcatattttaaaagggtctcccaatgtgattccacgggctcacgggcagaagaacacgcgaagagacggaactggcctctatcctatgcgaggtccctttaagaacctcgccctgttgcccttctccctcccgctcctgggcggaggcggaagcggaagtggcgagaaagtgtcggtctccaagatggcggccgcctggccgtctggtccgtctgctccggaggccgtgacggccagactcgttggtgtcctgtggttcgtctcagtcactacaggaccctggggggctgttgccacctccgccgggggcgaggagtcgcttaagtgcgaggacctcaaagtgggacaatatatttgtaaagatccaaaaataaatgacgctacgcaagaaccagttaactgtacaaactacacagctcatgtttcctgttttccagcacccaacataacttgtaaggattccagtggcaatgaaacacattttactgggaacgaagttggttttttcaagcccatatcttgccgaaatgtaaatggctattcctacaaagtggcagtcgcattgtctctttttcttggatggttgggagcagatcgattttaccttggataccctgctttgggtttgttaaagttttgcactgtagggttttgtggaattgggagcctaattgatttcattcttatttcaatgcagagacagagtcttgctctgttgcccaggctggagtgcagtggctcaatcttggctcactgcaacgtctgcctcccaggttcaagcgattctcgtgcctcagcctccccagtagctgggactacaggcacacaccaccatgcccgggtaacttgtatttttagtagagatggggtttcgccattttagtcaggctagtcttgaactcttcaggtgatccacctgcttcggcctcccagagtgctggaattacaggcgtgagccactgtgcctggctggcctcagctttaaataagtgataaacctgctgaagtcagagataccatcctttttcctggttcaactctctggttttctaggactctgctactacaaggttttttaaatttcaattaccatacattagtctattctaataatcttccaataatgcaaacttttactcaggattttggtagaatatcaggaaaaccatttcctggtataatgattctctgtaatagagaaatcctatatatcatgtagggtgaagggtagtttttatgtaatagttcactttgagctgtctagcagctgtctagaagctttcatagacacagacaggtagagagaaagacagggtagatgtcttaaccattatccttgttctagggttttcagtcaactctatctcaaaggactgcttctagaggccagcaagagaatagacatttgttttctgtcttgtagaacagaaacaggatatgaagtatacttttgccctttaggtggatttttttcttttctaacagtaaaattatggatatgccttgtagttattgtcatgggattgaacagtgacacaccctcaagatgtaaggaatttattcaactgattgtccaaaaggttttccaaatcttataaactgtaagtcattgagccttaaaattagaataaagcttagagatccatctacctcttcttaccaggaaaaaaatcaagacctaaggaagttgagagtaagatacgcaactaattagtgcaaaactgaaactagaatctaggtcttccatacattctgtcacatggttgttctcttcctcccatcctaccccagctccagtcaactgtatcattttgtattaggcatttttgttttggaaattgtttctcctattttatgagaaggattgtgtagtttcatgtaacttttattattcatactgtaaattgtgtctctttcaaaagtagattgtttctaaaccatagtgtgtaaaaattaagcaaatgtaattttaagaggaatctcattcttggtagcctattatgtaaacatttaggtgggattccagattcagatttgaaacttaaaacctgaaaggcccattgagaaggccagtatctgcattatcattcatgtaatctctctacattatacagaagtgctccaagaatgagaaaaaaatacattgagcaaatgaaatgttaaaatgtacatctgcaataacctcattggactcttaaaaaatattgtgttttaacgtatttcttctttctgttttaggatttgagcctccttgattttaatagagaacttctagtgtatggatttaaagatttctctttttcattcatataccattttatgagttctgtataattttttgtggtttttgttttgttgagttaaagtatattattgtgagatttatttaataggacttcctttgaaagctgtataatagtgtttctcgggcttctgtctctatgagagatagcttattactctgatactctttaatcttttacaaaggcaagttgccacttgtcatttttgtttctgaaaaataaaagtataacttattcacaaaaaattatacagaactcgtaaaatggtatatgaatgaaaaagagaaatctttaaatccatacactagaagttctctatta

SEQ ID NO: 435011 - DNA, 1461 bp, Homo sapiens
agcgggtgaagcacctgattgcctaaaccactcgtttccttcctccagcactcaaagattaaccttagctccttccaagggttcgtgggggaaaattcgcctcgagggactgggtacatgcatattttaaaagggtctcccaatgtgattccacgggctcacgggcagaagaacacgcgaagagacggaactggcctctatcctatgcgaggtccctttaagaacctcgccctgttgcccttctccctcccgctcctgggcggaggcggaagcggaagtggcgagaaagtgtcggtctccaagatggcggccgcctggccgtctggtccgtctgctccggaggccgtgacggccagactcgttggtgtcctgtggttcgtctcagtcactacaggaccctggggggctgttgccacctccgccgggggcgaggagtcgcttaagtgcgaggacctcaaagtgggacaatatatttgtaaagatccaaaaataaatgacgctacgcaagaaccagttaactgtacaaactacacagctcatgtttcctgttttccagcacccaacataacttgtaaggattccagtggcaatgaaacacattttactgggaacgaagttggttttttcaagcccatatcttgccgaaatgtaaatggctattcctacaaagtggcagtcgcattgtctctttttcttggatggttgggagcagatcgattttaccttggataccctgctttgggtttgttaaagttttgcactgtagggttttgtggaattgggagcctaattgatttcattcttatttcaatgcagagacagggtcttgctctgttgcccaggctggagtgcagtggcgtgatcataactcattgcagcctcgaattcctgggttcaaacaatcttcctgcctcagctcccatccagtatgggatattttaaaagattgttggaccttcagatggaagtagttacattatagattactatggaaccagacttacaagactgagtattactaatgaaacatttagaaaaacgcaattatatccataaatattttttaaaagaaacagatttgagcctccttgattttaatagagaacttctagtgtatggatttaaagatttctctttttcattcatataccattttatgagttctgtataattttttgtggtttttgttttgttgagttaaagtatattattgtgagatttatttaataggacttcctttgaaagctgtataatagtgtttctcgggcttctgtctctatgagagatagcttattactctgatactctttaatcttttacaaaggcaagttgccacttgtcatttttgtttctgaaaaataaaagtataacttattcacaaaaaattatacagaactcgtaaaatggtatatgaatgaaaaagagaaatctttaaatccatacactagaagttctctatta

SEQ ID NO: 435012 - DNA, 2688 bp, Homo sapiens
agcgggtgaagcacctgattgcctaaaccactcgtttccttcctccagcactcaaagattaaccttagctccttccaagggttcgtgggggaaaattcgcctcgagggactgggtacatgcatattttaaaagggtctcccaatgtgattccacgggctcacgggcagaagaacacgcgaagagacggaactggcctctatcctatgcgaggtccctttaagaacctcgccctgttgcccttctccctcccgctcctgggcggaggcggaagcggaagtggcgagaaagtgtcggtctccaagatggcggccgcctggccgtctggtccgtctgctccggaggccgtgacggccagactcgttggtgtcctgtggttcgtctcagtcactacaggaccctggggggctgttgccacctccgccgggggcgaggagtcgcttaagtgcgaggacctcaaagtgggacaatatatttgtaaagatccatttcctgttttccagcacccaacataacttgtaaggattccagtggcaatgaaacacattttactgggaacgaagttggttttttcaagcccatatcttgccgaaatgtaaatggctattcctacaaagtggcagtcgcattgtctctttttcttggatggttgggagcagatcgattttaccttggataccctgctttgggtttgttaaagttttgcactgtagggttttgtggaattgggagcctaattgatttcattcttatttcaatgcagagacagagtcttgctctgttgcccaggctggagtgcagtggctcaatcttggctcactgcaacgtctgcctcccaggttcaagcgattctcgtgcctcagcctccccagtagctgggactacaggcacacaccaccatgcccgggtaacttgtatttttagtagagatggggtttcgccattttagtcaggctagtcttgaactcttcaggtgatccacctgcttcggcctcccagagtgctggaattacaggcgtgagccactgtgcctggctggcctcagctttaaataagtgataaacctgctgaagtcagagataccatcctttttcctggttcaactctctggttttctaggactctgctactacaaggttttttaaatttcaattaccatacattagtctattctaataatcttccaataatgcaaacttttactcaggattttggtagaatatcaggaaaaccatttcctggtataatgattctctgtaatagagaaatcctatatatcatgtagggtgaagggtagtttttatgtaatagttcactttgagctgtctagcagctgtctagaagctttcatagacacagacaggtagagagaaagacagggtagatgtcttaaccattatccttgttctagggttttcagtcaactctatctcaaaggactgcttctagaggccagcaagagaatagacatttgttttctgtcttgtagaacagaaacaggatatgaagtatacttttgccctttaggtggatttttttcttttctaacagtaaaattatggatatgccttgtagttattgtcatgggattgaacagtgacacaccctcaagatgtaaggaatttattcaactgattgtccaaaaggttttccaaatcttataaactgtaagtcattgagccttaaaattagaataaagcttagagatccatctacctcttcttaccaggaaaaaaatcaagacctaaggaagttgagagtaagatacgcaactaattagtgcaaaactgaaactagaatctaggtcttccatacattctgtcacatggttgttctcttcctcccatcctaccccagctccagtcaactgtatcattttgtattaggcatttttgttttggaaattgtttctcctattttatgagaaggattgtgtagtttcatgtaacttttattattcatactgtaaattgtgtctctttcaaaagtagattgtttctaaaccatagtgtgtaaaaattaagcaaatgtaattttaagaggaatctcattcttggtagcctattatgtaaacatttaggtgggattccagattcagatttgaaacttaaaacctgaaaggcccattgagaaggccagtatctgcattatcattcatgtaatctctctacattatacagaagtgctccaagaatgagaaaaaaatacattgagcaaatgaaatgttaaaatgtacatctgcaataacctcattggactcttaaaaaatattgtgttttaacgtatttcttctttctgttttaggatttgagcctccttgattttaatagagaacttctagtgtatggatttaaagatttctctttttcattcatataccattttatgagttctgtataattttttgtggtttttgttttgttgagttaaagtatattattgtgagatttatttaataggacttcctttgaaagctgtataatagtgtttctcgggcttctgtctctatgagagatagcttattactctgatactctttaatcttttacaaaggcaagttgccacttgtcatttttgtttctgaaaaataaaagtataacttattcacaaaaaattatacagaactcgtaaaatggtatatgaatgaaaaagagaaatctttaaatccatacactagaagttctctatta

SEQ ID NO: 435013 - DNA, 1922 bp, Homo sapiens
tttgcaaatatttacatatttaaataaaagtgttacatcaattttgaaatgtatccaacagaatataaatatcgtaggattttaaatatcacctacttaaaaaagatgtgcatgaactcttcactaaccattataatttttacattgcttcttccttgaatttttatttttattcctcttctacagaattttatcctaatataatatatttttaggtttaaaaactcccagagtgctggaattacaggcgtgagccactgtgcctggctggcctcagctttaaataagtgataaacctgctgaagtcagagataccatcctttttcctggttcaactctctggttttctaggactctgctactacaaggttttttaaatttcaattaccatacattagtctattctaataatcttccaataatgcaaacttttactcaggattttggtagaatatcaggaaaaccatttcctggtataatgattctctgtaatagagaaatcctatatatcatgtagggtgaagggtagtttttatgtaatagttcactttgagctgtctagcagctgtctagaagctttcatagacacagacaggtagagagaaagacagggtagatgtcttaaccattatccttgttctagggttttcagtcaactctatctcaaaggactgcttctagaggccagcaagagaatagacatttgttttctgtcttgtagaacagaaacaggatatgaagtatacttttgccctttaggtggatttttttcttttctaacagtaaaattatggatatgccttgtagttattgtcatgggattgaacagtgacacaccctcaagatgtaaggaatttattcaactgattgtccaaaaggttttccaaatcttataaactgtaagtcattgagccttaaaattagaataaagcttagagatccatctacctcttcttaccaggaaaaaaatcaagacctaaggaagttgagagtaagatacgcaactaattagtgcaaaactgaaactagaatctaggtcttccatacattctgtcacatggttgttctcttcctcccatcctaccccagctccagtcaactgtatcattttgtattaggcatttttgttttggaaattgtttctcctattttatgagaaggattgtgtagtttcatgtaacttttattattcatactgtaaattgtgtctctttcaaaagtagattgtttctaaaccatagtgtgtaaaaattaagcaaatgtaattttaagaggaatctcattcttggtagcctattatgtaaacatttaggtgggattccagattcagatttgaaacttaaaacctgaaaggcccattgagaaggccagtatctgcattatcattcatgtaatctctctacattatacagaagtgctccaagaatgagaaaaaaatacattgagcaaatgaaatgttaaaatgtacatctgcaataacctcattggactcttaaaaaatattgtgttttaacgtatttcttctttctgttttaggatttgagcctccttgattttaatagagaacttctagtgtatggatttaaagatttctctttttcattcatataccattttatgagttctgtataattttttgtggtttttgttttgttgagttaaagtatattattgtgagatttatttaataggacttcctttgaaagctgtataatagtgtttctcgggcttctgtctctatgagagatagcttattactctgatactctttaatcttttacaaaggcaagttgccacttgtcatttttgtttctgaaaaataaaagtataacttattcacaaaaaattatacagaactcgtaaaatggtatatgaatgaaaaagagaaatctttaaatccatacactagaagttctctatta

SEQ ID NO: 435014 - DNA, 1945 bp, Homo sapiens
tgcagatgagcacgagtttatggactctggcctcgcgctgctgcttgatgaagttgatgagcccatggtagaagcgtcgtgagaggtcacttgagcactgccatcaagctcaggctctattttcttagccagctgctttcccagctccactccccactggtcaaagctgttgatgtcccagatgatgccctgaacgaagatcttgtgctcatacatggcgaccaaggctccaagcatgaatggtgtgagcttggtgaacacaatagagttggttgggcgatttccttcaaagaccttatgtggcagcagcctctcaaggtcctctggactcttgcccgcagcctggagctcctttcgggcctcctccgtcgattttcccctcatcagggcctctgtctgggccaagaagttggccaggaggatcttgtgatgcagacccttccgtatggggtgctgggtctggaccgggatgaggaagtcacagggtatcatcttggtgccttgattctctgtaatagagaaatcctatatatcatgtagggtgaagggtagtttttatgtaatagttcactttgagctgtctagcagctgtctagaagctttcatagacacagacaggtagagagaaagacagggtagatgtcttaaccattatccttgttctagggttttcagtcaactctatctcaaaggactgcttctagaggccagcaagagaatagacatttgttttctgtcttgtagaacagaaacaggatatgaagtatacttttgccctttaggtggatttttttcttttctaacagtaaaattatggatatgccttgtagttattgtcatgggattgaacagtgacacaccctcaagatgtaaggaatttattcaactgattgtccaaaaggttttccaaatcttataaactgtaagtcattgagccttaaaattagaataaagcttagagatccatctacctcttcttaccaggaaaaaaatcaagacctaaggaagttgagagtaagatacgcaactaattagtgcaaaactgaaactagaatctaggtcttccatacattctgtcacatggttgttctcttcctcccatcctaccccagctccagtcaactgtatcattttgtattaggcatttttgttttggaaattgtttctcctattttatgagaaggattgtgtagtttcatgtaacttttattattcatactgtaaattgtgtctctttcaaaagtagattgtttctaaaccatagtgtgtaaaaattaagcaaatgtaattttaagaggaatctcattcttggtagcctattatgtaaacatttaggtgggattccagattcagatttgaaacttaaaacctgaaaggcccattgagaaggccagtatctgcattatcattcatgtaatctctctacattatacagaagtgctccaagaatgagaaaaaaatacattgagcaaatgaaatgttaaaatgtacatctgcaataacctcattggactcttaaaaaatattgtgttttaacgtatttcttctttctgttttaggatttgagcctccttgattttaatagagaacttctagtgtatggatttaaagatttctctttttcattcatataccattttatgagttctgtataattttttgtggtttttgttttgttgagttaaagtatattattgtgagatttatttaataggacttcctttgaaagctgtataatagtgtttctcgggcttctgtctctatgagagatagcttattactctgatactctttaatcttttacaaaggcaagttgccacttgtcatttttgtttctgaaaaataaaagtataacttattcacaaaaaattatacagaactcgtaaaatggtatatgaatgaaaaagagaaatctttaaatccatacactagaagttctctatta

SEQ ID NO: 435015 - DNA, 2337 bp, Homo sapiens
cctatgcctgaaacatctccaatcctttgaaaagcattttagtccacgctcatggctccttcggttcccacttcagactctttgcagtgcatatggttaaaggacaaagttcacaagaaaaaagtaacatcaaagcaaaaaggcatttattatttgatggttatgatgaaagtatgtgccgtaaatagctcaatatagcagatatttctgctgcccatccctctaagggtcagtataatctttaacttccttctttgcttctccttccctgaaactgaaaatagatactgaaagagtccaaagcctgaattccctgtaagtgcttcttctaacctaaagtttggctctggctgtaagaattattggcctcagctttatctttttctttttcttttttttttttttttttgagacagagtcttgctctgttgcccaggctggagtgcagtggctcaatcttggctcactgcaacgtctgcctcccaggttcaagcgattctcgtgcctcagcctccccagtagctgggactacaggcacacaccaccatgcccgggtaacttgtatttttagtagagatggggtttcgccattttagtcaggctagtcttgaactcttcaggtgatccacctgcttcggcctcccagagtgctggaattacaggcgtgagccactgtgcctggctggcctcagctttaaataagtgataaacctgctgaagtcagagataccatcctttttcctggttcaactctctggttttctaggactctgctactacaaggttttttaaatttcaattaccatacattagtctattctaataatcttccaataatgcaaacttttactcaggattttggtagaatatcaggaaaaccatttcctggtataatgattctctgtaatagagaaatcctatatatcatgtagggtgaagggtagtttttatgtaatagttcactttgagctgtctagcagctgtctagaagctttcatagacacagacaggtagagagaaagacagggtagatgtcttaaccattatccttgttctagggttttcagtcaactctatctcaaaggactgcttctagaggccagcaagagaatagacatttgttttctgtcttgtagaacagaaacaggatatgaagtatacttttgccctttaggtggatttttttcttttctaacagtaaaattatggatatgccttgtagttattgtcatgggattgaacagtgacacaccctcaagatgtaaggaatttattcaactgattgtccaaaaggttttccaaatcttataaactgtaagtcattgagccttaaaattagaataaagcttagagatccatctacctcttcttaccaggaaaaaaatcaagacctaaggaagttgagagtaagatacgcaactaattagtgcaaaactgaaactagaatctaggtcttccatacattctgtcacatggttgttctcttcctcccatcctaccccagctccagtcaactgtatcattttgtattaggcatttttgttttggaaattgtttctcctattttatgagaaggattgtgtagtttcatgtaacttttattattcatactgtaaattgtgtctctttcaaaagtagattgtttctaaaccatagtgtgtaaaaattaagcaaatgtaattttaagaggaatctcattcttggtagcctattatgtaaacatttaggtgggattccagattcagatttgaaacttaaaacctgaaaggcccattgagaaggccagtatctgcattatcattcatgtaatctctctacattatacagaagtgctccaagaatgagaaaaaaatacattgagcaaatgaaatgttaaaatgtacatctgcaataacctcattggactcttaaaaaatattgtgttttaacgtatttcttctttctgttttaggatttgagcctccttgattttaatagagaacttctagtgtatggatttaaagatttctctttttcattcatataccattttatgagttctgtataattttttgtggtttttgttttgttgagttaaagtatattattgtgagatttatttaataggacttcctttgaaagctgtataatagtgtttctcgggcttctgtctctatgagagatagcttattactctgatactctttaatcttttacaaaggcaagttgccacttgtcatttttgtttctgaaaaataaaagtataacttattcacaaaaaattatacagaactcgtaaaatggtatatgaatgaaaaagagaaatctttaaatccatacactagaagttctctatta

SEQ ID NO: 435016 - DNA, 1507 bp, Homo sapiens
cctgaggatccccgtctctcgagacggactctctccagcacgggaaaaccatttcctggtataatgattctctgtaatagagaaatcctatatatcatgtagggtgaagggtagtttttatgtaatagttcactttgagctgtctagcagctgtctagaagctttcatagacacagacaggtagagagaaagacagggtagatgtcttaaccattatccttgttctagggttttcagtcaactctatctcaaaggactgcttctagaggccagcaagagaatagacatttgttttctgtcttgtagaacagaaacaggatatgaagtatacttttgccctttaggtggatttttttcttttctaacagtaaaattatggatatgccttgtagttattgtcatgggattgaacagtgacacaccctcaagatgtaaggaatttattcaactgattgtccaaaaggttttccaaatcttataaactgtaagtcattgagccttaaaattagaataaagcttagagatccatctacctcttcttaccaggaaaaaaatcaagacctaaggaagttgagagtaagatacgcaactaattagtgcaaaactgaaactagaatctaggtcttccatacattctgtcacatggttgttctcttcctcccatcctaccccagctccagtcaactgtatcattttgtattaggcatttttgttttggaaattgtttctcctattttatgagaaggattgtgtagtttcatgtaacttttattattcatactgtaaattgtgtctctttcaaaagtagattgtttctaaaccatagtgtgtaaaaattaagcaaatgtaattttaagaggaatctcattcttggtagcctattatgtaaacatttaggtgggattccagattcagatttgaaacttaaaacctgaaaggcccattgagaaggccagtatctgcattatcattcatgtaatctctctacattatacagaagtgctccaagaatgagaaaaaaatacattgagcaaatgaaatgttaaaatgtacatctgcaataacctcattggactcttaaaaaatattgtgttttaacgtatttcttctttctgttttaggatttgagcctccttgattttaatagagaacttctagtgtatggatttaaagatttctctttttcattcatataccattttatgagttctgtataattttttgtggtttttgttttgttgagttaaagtatattattgtgagatttatttaataggacttcctttgaaagctgtataatagtgtttctcgggcttctgtctctatgagagatagcttattactctgatactctttaatcttttacaaaggcaagttgccacttgtcatttttgtttctgaaaaataaaagtataacttattcacaaaaaattatacagaactcgtaaaatggtatatgaatgaaaaagagaaatctttaaatccatacactagaagttctctatta

SEQ ID NO: 435017 - DNA, 1277 bp, Homo sapiens
agcgggtgaagcacctgattgcctaaaccactcgtttccttcctccagcactcaaagattaaccttagctccttccaagggttcgtgggggaaaattcgcctcgagggactgggtacatgcatattttaaaagggtctcccaatgtgattccacgggctcacgggcagaagaacacgcgaagagacggaactggcctctatcctatgcgaggtccctttaagaacctcgccctgttgcccttctccctcccgctcctgggcggaggcggaagcggaagtggcgagaaagtgtcggtctccaagatggcggccgcctggccgtctggtccgtctgctccggaggccgtgacggccagactcgttggtgtcctgtggttcgtctcagtcactacaggaccctggggggctgttgccacctccgccgggggcgaggagtcgcttaagtgcgaggacctcaaagtgggacaatatatttgtaaagatccatttcctgttttccagcacccaacataacttgtaaggattccagtggcaatgaaacacattttactgggaacgaagttggttttttcaagcccatatcttgccgaaatgtaaatggctattcctacaaagtggcagtcgcattgtctctttttcttggatggttgggagcagatcgattttaccttggataccctgctttgggtttgttaaagttttgcactgtagggttttgtggaattgggagcctaattgatttcattcttatttcaatgcagattgttggaccttcagatggaagtagttacattatagattactatggaaccagacttacaagactgagtattactaatgaaacatttagaaaaacgcaattatatccataaatattttttaaaagaaacagatttgagcctccttgattttaatagagaacttctagtgtatggatttaaagatttctctttttcattcatataccattttatgagttctgtataattttttgtggtttttgttttgttgagttaaagtatattattgtgagatttatttaataggacttcctttgaaagctgtataatagtgtttctcgggcttctgtctctatgagagatagcttattactctgatactctttaatcttttacaaaggcaagttgccacttgtcatttttgtttctgaaaaataaaagtataacttattcacaaaaaattatacagaactcgtaaaatggtatatgaatgaaaaagagaaatctttaaatccatacactagaagttctctatta

SEQ ID NO: 435018 - DNA, 1328 bp, Homo sapiens
agcgggtgaagcacctgattgcctaaaccactcgtttccttcctccagcactcaaagattaaccttagctccttccaagggttcgtgggggaaaattcgcctcgagggactgggtacatgcatattttaaaagggtctcccaatgtgattccacgggctcacgggcagaagaacacgcgaagagacggaactggcctctatcctatgcgaggtccctttaagaacctcgccctgttgcccttctccctcccgctcctgggcggaggcggaagcggaagtggcgagaaagtgtcggtctccaagatggcggccgcctggccgtctggtccgtctgctccggaggccgtgacggccagactcgttggtgtcctgtggttcgtctcagtcactacaggaccctggggggctgttgccacctccgccgggggcgaggagtcgcttaagtgcgaggacctcaaagtgggacaatatatttgtaaagatccacctctgtggagaacacccccccatggaggcgaggtagagttggggtcgcagtttcctgttttccagcacccaacataacttgtaaggattccagtggcaatgaaacacattttactgggaacgaagttggttttttcaagcccatatcttgccgaaatgtaaatggctattcctacaaagtggcagtcgcattgtctctttttcttggatggttgggagcagatcgattttaccttggataccctgctttgggtttgttaaagttttgcactgtagggttttgtggaattgggagcctaattgatttcattcttatttcaatgcagattgttggaccttcagatggaagtagttacattatagattactatggaaccagacttacaagactgagtattactaatgaaacatttagaaaaacgcaattatatccataaatattttttaaaagaaacagatttgagcctccttgattttaatagagaacttctagtgtatggatttaaagatttctctttttcattcatataccattttatgagttctgtataattttttgtggtttttgttttgttgagttaaagtatattattgtgagatttatttaataggacttcctttgaaagctgtataatagtgtttctcgggcttctgtctctatgagagatagcttattactctgatactctttaatcttttacaaaggcaagttgccacttgtcatttttgtttctgaaaaataaaagtataacttattcacaaaaaattatacagaactcgtaaaatggtatatgaatgaaaaagagaaatctttaaatccatacactagaagttctctatta

SEQ ID NO: 435019 - DNA, 881 bp, Homo sapiens
cggttcgctaagtgcgaggacctcaaagcgggacaatatcctctgtggagaacacccccccatggaggcgaggtagagttggggtcgcagtttcctgttttccagcacccaacataacttgtaaggattccagtggcaatgaaacacattttactgggaacgaagttggttttttcaagcccatatcttgccgaaatgtaaatggctattcctacaaagtggcagtcgcattgtctctttttcttggatggttgggagcagatcgattttaccttggataccctgctttgggtttgttaaagttttgcactgtagggttttgtggaattgggagcctaattgatttcattcttatttcaatgcagattgttggaccttcagatggaagtagttacattatagattactatggaaccagacttacaagactgagtattactaatgaaacatttagaaaaacgcaattatatccataaatattttttaaaagaaacagatttgagcctccttgattttaatagagaacttctagtgtatggatttaaagatttctctttttcattcatataccattttatgagttctgtataattttttgtggtttttgttttgttgagttaaagtatattattgtgagatttatttaataggacttcctttgaaagctgtataatagtgtttctcgggcttctgtctctatgagagatagcttattactctgatactctttaatcttttacaaaggcaagttgccacttgtcatttttgtttctgaaaaataaaagtataacttattcacaaaaaattatacagaactcgtaaaatggtatatgaatgaaaaagagaaatctttaaatccatacactagaagttctctatta

SEQ ID NO: 435020 - DNA, 1564 bp, Homo sapiens
agcgggtgaagcacctgattgcctaaaccactcgtttccttcctccagcactcaaagattaaccttagctccttccaagggttcgtgggggaaaattcgcctcgagggactgggtacatgcatattttaaaagggtctcccaatgtgattccacgggctcacgggcagaagaacacgcgaagagacggaactggcctctatcctatgcgaggtccctttaagaacctcgccctgttgcccttctccctcccgctcctgggcggaggcggaagcggaagtggcgagaaagtgtcggtctccaagatggcggccgcctggccgtctggtccgtctgctccggaggccgtgacggccagactcgttggtgtcctgtggttcgtctcagtcactacaggaccctggggggctgttgccacctccgccgggggcgaggagtcgcttaagtgcgaggacctcaaagtgggacaatatatttgtaaagatccacccccccatggaggcgagggtcttactctgtcgccctggctggagtacagttggcacggatctcagctcactgcagcctccgcctcccgggttcagtcaattctcctgcctcagcctcctgagtagctgggactacatggcatgcgccacacacccggtttcctgttttccagcacccaacataacttgtaaggattccagtggcaatgaaacacattttactgggaacgaagttggttttttcaagcccatatcttgccgaaatgtaaatggctattcctacaaagtggcagtcgcattgtctctttttcttggatggttgggagcagatcgattttaccttggataccctgctttgggtttgttaaagttttgcactgtagggttttgtggaattgggagcctaattgatttcattcttatttcaatgcagagacagggtcttgctctgttgcccaggctggagtgcagtggcgtgatcataactcattgcagcctcgaattcctgggttcaaacaatcttcctgcctcagctcccatccagtatgggatattttaaaagattgttggaccttcagatggaagtagttacattatagattactatggaaccagacttacaagactgagtattactaatgaaacatttagaaaaacgcaattatatccataaatattttttaaaagaaacagatttgagcctccttgattttaatagagaacttctagtgtatggatttaaagatttctctttttcattcatataccattttatgagttctgtataattttttgtggtttttgttttgttgagttaaagtatattattgtgagatttatttaataggacttcctttgaaagctgtataatagtgtttctcgggcttctgtctctatgagagatagcttattactctgatactctttaatcttttacaaaggcaagttgccacttgtcatttttgtttctgaaaaataaaagtataacttattcacaaaaaattatacagaactcgtaaaatggtatatgaatgaaaaagagaaatctttaaatccatacactagaagttctctatta

SEQ ID NO: 435021 - DNA, 922 bp, Homo sapiens
ggaattggtatataaacattggggaagaaaagtttactttctttgtattaggagctgctgagctgggaatatgtgactctagagctgttggcaattagttagagtgccactctgcagaatgaagacaagcagagctaagcaaggaggcagggaagccaagggcctcagggagcacagaattcagtccttggttcctgtagcttttcttttgatcctttgagctatcccagtatatcccagtagttgtttttagctacatgagccactaaattacctatttttgcttaggttagagctggatttttgttgcttctgaaatacttttattaacaactgagaaaagtaaacaaagtgctgtgaaatatcttttgtaaaatgaataattttgaaattttgtctcttctagattgttggaccttcagatggaagtagttacattatagattactatggaaccagacttacaagactgagtattactaatgaaacatttagaaaaacgcaattatatccataaatattttttaaaagaaacagatttgagcctccttgattttaatagagaacttctagtgtatggatttaaagatttctctttttcattcatataccattttatgagttctgtataattttttgtggtttttgttttgttgagttaaagtatattattgtgagatttatttaataggacttcctttgaaagctgtataatagtgtttctcgggcttctgtctctatgagagatagcttattactctgatactctttaatcttttacaaaggcaagttgccacttgtcatttttgtttctgaaaaataaaagtataacttattcacaaaaaattatacagaactcgtaaaatggtatatgaatgaaaaagagaaatctttaaatccatacactagaagttctctatta

SEQ ID NO: 435022 - DNA, 896 bp, Homo sapiens
aaacaaattgaagaaaaagaaactatgacattctcaagtttatactaacatgctttgtgaagaggaatacatttcggaaatatgaaatacgctggataaaacctcagcagacaattttctttgggcaactaatagtaccatgcaactaatgaaaaaactaaaggagtttttattaaggtttgttaaagttttgcactgtagggttttgtggaattgggagcctaattgatttcattcttatttcaatgcagagacagggtcttgctctgttgcccaggctggagtgcagtggcgtgatcataactcattgcagcctcgaattcctgggttcaaacaatcttcctgcctcagctcccatccagtatgggatattttaaaagattgttggaccttcagatggaagtagttacattatagattactatggaaccagacttacaagactgagtattactaatgaaacatttagaaaaacgcaattatatccataaatattttttaaaagaaacagatttgagcctccttgattttaatagagaacttctagtgtatggatttaaagatttctctttttcattcatataccattttatgagttctgtataattttttgtggtttttgttttgttgagttaaagtatattattgtgagatttatttaataggacttcctttgaaagctgtataatagtgtttctcgggcttctgtctctatgagagatagcttattactctgatactctttaatcttttacaaaggcaagttgccacttgtcatttttgtttctgaaaaataaaagtataacttattcacaaaaaattatacagaactcgtaaaatggtatatgaatgaaaaagagaaatctttaaatccatacactagaagttctctatta

SEQ ID NO: 435023 - DNA, 936 bp, Homo sapiens
cggttcgctaagtgcgaggacctcaaagcgggacaatatcctctgtggagaacacccccccatggaggcgaggtagagttggggtcgcagaaaataaatgacgctacgcaagaaccagttaactgtacaaactacacagctcatgtttcctgttttccagcacccaacataacttgtaaggattccagtggcaatgaaacacattttactgggaacgaagttggttttttcaagcccatatcttgccgaaatgtaaatggctattcctacaaagtggcagtcgcattgtctctttttcttggatggttgggagcagatcgattttaccttggataccctgctttgggtttgttaaagttttgcactgtagggttttgtggaattgggagcctaattgatttcattcttatttcaatgcagattgttggaccttcagatggaagtagttacattatagattactatggaaccagacttacaagactgagtattactaatgaaacatttagaaaaacgcaattatatccataaatattttttaaaagaaacagatttgagcctccttgattttaatagagaacttctagtgtatggatttaaagatttctctttttcattcatataccattttatgagttctgtataattttttgtggtttttgttttgttgagttaaagtatattattgtgagatttatttaataggacttcctttgaaagctgtataatagtgtttctcgggcttctgtctctatgagagatagcttattactctgatactctttaatcttttacaaaggcaagttgccacttgtcatttttgtttctgaaaaataaaagtataacttattcacaaaaaattatacagaactcgtaaaatggtatatgaatgaaaaagagaaatctttaaatccatacactagaagttctctatta

SEQ ID NO: 435024 - DNA, 1258 bp, Homo sapiens
agcgggtgaagcacctgattgcctaaaccactcgtttccttcctccagcactcaaagattaaccttagctccttccaagggttcgtgggggaaaattcgcctcgagggactgggtacatgcatattttaaaagggtctcccaatgtgattccacgggctcacgggcagaagaacacgcgaagagacggaactggcctctatcctatgcgaggtccctttaagaacctcgccctgttgcccttctccctcccgctcctgggcggaggcggaagcggaagtggcgagaaagtgtcggtctccaagatggcggccgcctggccgtctggtccgtctgctccggaggccgtgacggccagactcgttggtgtcctgtggttcgtctcagtcactacaggaccctggggggctgttgccacctccgccgggggcgaggagtcgcttaagtgcgaggacctcaaagtgggacaatatatttgtaaagatccaaaaataaatgacgctacgcaagaaccagttaactgtacaaactacacagctcatgtttcctgttttccagcacccaacataacttgtaaggattccagtggcaatgaaacacattttactgggaacgaagttggttttttcaagcccatatcttgccgaaatgtaaatggctattcctacaaagtggcagtcgcattgtctctttttcttggatggttgggagcagatcgattttaccttggataccctgctttggattgttggaccttcagatggaagtagttacattatagattactatggaaccagacttacaagactgagtattactaatgaaacatttagaaaaacgcaattatatccataaatattttttaaaagaaacagatttgagcctccttgattttaatagagaacttctagtgtatggatttaaagatttctctttttcattcatataccattttatgagttctgtataattttttgtggtttttgttttgttgagttaaagtatattattgtgagatttatttaataggacttcctttgaaagctgtataatagtgtttctcgggcttctgtctctatgagagatagcttattactctgatactctttaatcttttacaaaggcaagttgccacttgtcatttttgtttctgaaaaataaaagtataacttattcacaaaaaattatacagaactcgtaaaatggtatatgaatgaaaaagagaaatctttaaatccatacactagaagttctctatta

SEQ ID NO: 435025 - DNA, 3919 bp, Homo sapiens
aggcgctcggctggctaagcctgcgccgggccgcctcgctcgctcccagctctgtcagtggcccgcggggcccgatcgctgcgcccgcggccagggccgaggcaggcctgacccggggccgggcagcccgcgcgactttcggaacatggcaacccgtgtgtgtctcatcccagaaagagaagactttaaccactgtgatgcctgagaatccagtgtgacgtttctccagatacttcatgctgttcacctgtgtcctcgccgcaccactgccgcacacgactcctgaaccatgggggaaaacgaggatgagaagcaggcccaggcggggcaggtttttgagaactttgtccaggcatccacgtgcaaaggtaccctccaggccttcaacattctcacacgacacctggacctagaccctctggaccacagaaacttttattccaagctcaagtccaaggtgaccacctggaaagccaaagccctgtggtacaaattggataagcgtggttcccacaaagagtataagcgagggaagtcgtgcacgaacaccaagtgtctcatagttgggggaggaccctgtggcttgcgcactgccattgaacttgcctacctgggagccaaagtggtcgtggtggagaagagggactccttctcccggaacaacgtgctacacctctggcctttcaccatccatgaccttcgtggcctgggagccaagaagttctatgggaagttctgtgctggctccatcgaccatatcagtattcgccaactacagctcatcctattcaaggtggccctgatgctgggagttgaaatccatgtgaatgtggagttcgtgaaggttctagagcctcctgaagatcaagaaaatcaaaaaattggctggcgggcagaatttctccctacagaccattctctgtcggagtttgagtttgacgtcatcattggtgccgatggccgcaggaacaccctggaagggttcagaagaaaagaattccgtgggaagctggcgattgccatcaccgccaacttcataaacagaaacagcacagcggaagccaaggtggaagagattagtggtgtggctttcatcttcaatcagaaattttttcaggaccttaaagaagaaacaggcatagatcttgagaacattgtttactacaaggactgcacccactattttgtaatgacagccaagaagcagagcctgctcgacaaaggtgtcatcattaacgactacatcgacacagagatgctgctgtgtgcggagaacgtgaaccaagacaacctgctatcctatgcccgggaagctgcagactttgccaccaactaccagctgccatccttagactttgccatgaaccactatgggcagcctgatgtggccatgtttgactttacctgcatgtatgcctcagagaacgcggccctggtgcgggagcggcaggcgcaccagctgctcgtggcccttgtgggtgacagcttgcttgagccattttggcccatgggtacaggctgtgcccgtggcttcctggcagcctttgacacggcatggatggtgaagagctggaaccagggcacccctcccctggagctgctggctgaaagggaaagtctctaccggctgttacctcagacaaccccggagaacatcaacaagaactttgagcagtacacgttggacccagggacacggtacccaaacctcaactcacactgtgtcaggccccatcaggtgaagcatttgtatatcactaaggagctggagcactaccctctcgagagactgggctcggtgaggagatctgtcaacctctccaggaaggagtcagatatccggcccagcaagctcctgacctggtgccagcagcagacagagggctaccagcatgtcaacgtcaccgacctgaccacatcctggcgcagtgggttggccctgtgtgccatcatccaccgcttccggcctgagctcatcaactttgactctttgaatgaagatgatgctgtggagaacaaccagctcgcatttgatgtggccgagcgagagtttgggatccctccagtgaccacgggcaaagagatggcatctgcccaggagcctgacaagctcagcatggtcatgtacctctccaagttctacgagctcttccggggcaccccactgaggcccgtggattcttggcgcaaaaactatggagaaaatgctgacctcagcttggccaaatcatccatttctaataactatctcaacctcacatttccaaggaagaggactccacgggtggatggtcaaaccggagagaatgacatgaacaaacggagacggaagggcttcaccaacctggacgagccttcaaacttttccagccgtagcttgggctccaatcaagagtgtgggagcagtaaggaaggtggaaatcagaacaaagtcaagtccatggcgaatcagctgctggccaagtttgaggagagcactcggaacccctcactcatgaagcaggaacgccgtgtctcagggataggtaagccggtcctgtgctcttcctccggccctcctgttcactcttgctgccccaagccggaggaggccacacccagcccatcacctcctctgaaaaggcagttcccctctgtggtcgtgacggggcacgtgctcagagagctcaagcaagtgtctgctggcagtgagtgcctgagcagaccttggagagccagagccaagtctgacctacagctgggtgggacagaaaatttcgctaccctgccttctacccgcccgagggcgcaggctctttccggggtgctgtggcggctgcagcaagtggaggaaaagattctccagaagagggctcagaacttggccaacagggaatttcacacaaagaacattaaggagaaggcggctcaccttgcctccatgtttggacacggggatttcccgcagaataaactactctctaaaggcctgtctcatactcatcctccatctcctccctctcgccttccgtctcctgatccagctgcttcttcctctccatcaactgttgactctgcttctcctgccagaaaggaaaagaagtcaccttcagggttccattttcatcccagccatttgagaacagtgcatcctcagctgacggtagggaaagtgtccagcggaataggggctgcagctgaagtcctggtcaatctgtacatgaatgatcacagacctaaggcccaggccacctctccagacctggaatctatgcgaaagtcatttccccttaacctgggaggcagcgacacgtgttacttctgtaagaaacgtgtgtacgtgatggaacggctgagcgccgagggccacttcttccaccgggagtgtttccgctgcagcatctgtgccaccaccttgcgcctggccgcctacacctttgactgcgatgaaggcaaattttactgcaagcctcacttcattcactgtaaaaccaatagcaaacaacggaagagacgggcagagttgaagcaacaaagagaggaggaggcaacatggcaagagcaggaagcccctcggagagacactcccaccgaaagttcttgcgcagtggccgccattggcaccctggaaggcagccccccagttcatttcagccttccagtgctacacccacttcttggctgacacacttctgctctaagagtctccctccctttatagaatgtcaaccaaagagtgccctcctcccctctcagcctcctctttagctagcctccccatctcatcacaacgcatgtctgtgacctttggtaatcatttacagtgccacacggaaccctgtattttgcacacagcaaaacaaacaatgtttagctttatttatggtatttgatgctgtaaatggaaataaatattgttctttataaagcaaaaaaagta

SEQ ID NO: 435026 - DNA, 1107 bp, Homo sapiens
aggcgctcggctggctaagcctgcgccgggccgcctcgctcgctcccagctctgtcagtggcccgcggggcccgatcgctgcgcccgcggccagggccgaggcaggcctgacccggggccgggcagcccgcgcgactttcggaacatggcaacccgtgtgtgtctcatcccagaaagagaagactttaaccactgtgatgcctgagaatccagtgtgacgtttctccagatacttcatgctgttcacctgtgtcctcgccgcaccactgccgcacacgactcctgaaccatgggggaaaacgaggatgagaagcaggcccaggcggggcaggtttttgagaactttgtccaggcatccacgtgcaaaggtaccctccaggccttcaacattctcacacgacacctggacctagaccctctggaccacagaaacttttattccaagctcaagtccaaggtgaccacctggaaagccaaagccctgtggtacaaattggataagcgtggttcccacaaagagtataagcgagggaagtcgtgcacgaacaccaagtgtctcatagttgggggaggaccctgtggcttgcgcactgccattgaacttgcctacctgggagccaaagtggtcgtggtggagaagagggactccttctcccggaacaacgtgctacacctctggcctttcaccatccatgaccttcgtggcctgggagccaagaagttctatgggaagttctgtgctggctccatcgaccatatcagtattcgccaactacagctcatcctattcaaggtggccctgatgctgggagttgaaatccatgtgaatgtggagttcgtgaaggttctagagcctcctgaagatcaagaaaatcaaagtacagtataattttctttttctgcctagaaagcagatactacaaaatagaaattccacttgctgcttccaaagggtgtttctgtaggagttattcttactgggagctggttggcataatgccactgaagggtattttactgttttttttttaccattgctatgactttaggtttgctgtttggctccaaggggatttatgattaagccattaaacctgtaatttggtt

SEQ ID NO: 435027 - DNA, 777 bp, Homo sapiens
cactgaggtaccaagactaatgaaggtccggccctccccagtgtaggaggcaggtaaatgatcacactgtgacaaatgctcaaacggggatgtgcttgcaaaggctagagacagcacgggaggaaggagcagtccattctgctgagagtgtgagtaccgagaaagcatggcactgggcttgaaggatgaggagttcgccagacacagaggatgaggagagcagcacgtgtgacgtttctccagatacttcatgctgttcacctgtgtcctcgccgcaccactgccgcacacgactcctgaaccatgggggaaaacgaggatgagaagcaggcccaggcggggcaggtttttgagaactttgtccaggcatccacgtgcaaaggtaccctccaggccttcaacattctcacacgacacctggacctagaccctctggaccacagaaacttttattccaagctcaagtccaaggtgaccacctggaaagccaaagccctgtggtacaaattggataagcgtggttcccacaaagagtataagcgagggaagtcgtgcacgaacaccaagttcccagccaatgaccccaaggcggggactcaagggaaatgcatgcctttcttccgagctgggttcgtctgccccagtccaccctacaagtccctggcccgagagcagatcaacgctctgacctccttcctggatgccagctttgtgtacagctccgagccaagcctggccagccggctccgcaaactcagcagccccctgggcctcatg

SEQ ID NO: 435028 - DNA, 550 bp, Homo sapiens
cactgaggtaccaagactaatgaaggtccggccctccccagtgtaggaggcaggtaaatgatcacactgtgacaaatgctcaaacggggatgtgcttgcaaaggctagagacagcacgggaggaaggagcagtccattctgctgagagtgtgagtaccgagaaagcatggcactgggcttgaaggatgaggagttcgccagacacagaggatgaggagagcagcactgtagtaaacttccagccacctgaatgaaattcacctaatttaacaaactgcacgagaagcaaagcaactcccggagcatacacagcaaacaacgttctaagaattttacatatattgacttatggaagcctgacaacatcactgtgatgtaagtgctattgttatttacattttatggatgaggacaaggaggcactgaacagcaaagtatttgccctggatcaccaggatttgggcaaaggtatgctctgagacctttttccccgccttatgcccattacaaggtaccttgaatgaaaaaatacacaagaacattgcatgga

SEQ ID NO: 435029 - DNA, 7460 bp, Homo sapiens
aggcgctcggctggctaagcctgcgccgggccgcctcgctcgctcccagctctgtcagtggcccgcggggcccgatcgctgcgcccgcggccagggccgaggcaggcctgacccggggccgggcagcccgcgcgactttcggaacatggcaacccgtgtgtgtctcatcccagaaagagaagactttaaccactgtgatgcctgagaatccagtgtgacgtttctccagatacttcatgctgttcacctgtgtcctcgccgcaccactgccgcacacgactcctgaaccatgggggaaaacgaggatgagaagcaggcccaggcggggcaggtttttgagaactttgtccaggcatccacgtgcaaaggtaccctccaggccttcaacattctcacacgacacctggacctagaccctctggaccacagaaacttttattccaagctcaagtccaaggtgaccacctggaaagccaaagccctgtggtacaaattggataagcgtggttcccacaaagagtataagcgagggaagtcgtgcacgaacaccaagtgtctcatagttgggggaggaccctgtggcttgcgcactgccattgaacttgcctacctgggagccaaagtggtcgtggtggagaagagggactccttctcccggaacaacgtgctacacctctggcctttcaccatccatgaccttcgtggcctgggagccaagaagttctatgggaagttctgtgctggctccatcgaccatatcagtattcgccaactacagctcatcctattcaaggtggccctgatgctgggagttgaaatccatgtgaatgtggagttcgtgaaggttctagagcctcctgaagatcaagaaaatcaaaaaattggctggcgggcagaatttctccctacagaccattctctgtcggagtttgagtttgacgtcatcattggtgccgatggccgcaggaacaccctggaagggttcagaagaaaagaattccgtgggaagctggcgattgccatcaccgccaacttcataaacagaaacagcacagcggaagccaaggtggaagagattagtggtgtggctttcatcttcaatcagaaattttttcaggaccttaaagaagaaacaggcatagatcttgagaacattgtttactacaaggactgcacccactattttgtaatgacagccaagaagcagagcctgctcgacaaaggtgtcatcattaacgactacatcgacacagagatgctgctgtgtgcggagaacgtgaaccaagacaacctgctatcctatgcccgggaagctgcagactttgccaccaactaccagctgccatccttagactttgccatgaaccactatgggcagcctgatgtggccatgtttgactttacctgcatgtatgcctcagagaacgcggccctggtgcgggagcggcaggcgcaccagctgctcgtggcccttgtgggtgacagcttgcttgagccattttggcccatgggtacaggctgtgcccgtggcttcctggcagcctttgacacggcatggatggtgaagagctggaaccagggcacccctcccctggagctgctggctgaaagggaaagtctctaccggctgttacctcagacaaccccggagaacatcaacaagaactttgagcagtacacgttggacccagggacacggtacccaaacctcaactcacactgtgtcaggccccatcaggtgaagcatttgtatatcactaaggagctggagcactaccctctcgagagactgggctcggtgaggagatctgtcaacctctccaggaaggagtcagatatccggcccagcaagctcctgacctggtgccagcagcagacagagggctaccagcatgtcaacgtcaccgacctgaccacatcctggcgcagtgggttggccctgtgtgccatcatccaccgcttccggcctgagctcatcaactttgactctttgaatgaagatgatgctgtggagaacaaccagctcgcatttgatgtggccgagcgagagtttgggatccctccagtgaccacgggcaaagagatggcatctgcccaggagcctgacaagctcagcatggtcatgtacctctccaagttctacgagctcttccggggcaccccactgaggcccgtggattcttggcgcaaaaactatggagaaaatgctgacctcagcttggccaaatcatccatttctaataactatctcaacctcacatttccaaggaagaggactccacgggtggatggtcaaaccggagagaatgacatgaacaaacggagacggaagggcttcaccaacctggacgagccttcaaacttttccagccgtagcttgggctccaatcaagagtgtgggagcagtaaggaaggtggaaatcagaacaaagtcaagtccatggcgaatcagctgctggccaagtttgaggagagcactcggaacccctcactcatgaagcaggaacgccgtgtctcagggataggtaagccggtcctgtgctcttcctccggccctcctgttcactcttgctgccccaagccggaggaggccacacccagcccatcacctcctctgaaaaggcagttcccctctgtggtcgtgacggggcacgtgctcagagagctcaagcaagtgtctgctggcagtgagtgcctgagcagaccttggagagccagagccaagtctgacctacagctgggtgggacagaaaatttcgctaccctgccttctacccgcccgagggcgcaggctctttccggggtgctgtggcggctgcagcaagtggaggaaaagattctccagaagagggctcagaacttggccaacagggaatttcacacaaagaacattaaggagaaggcggctcaccttgcctccatgtttggacacggggatttcccgcagaataaactactctctaaaggcctgtctcatactcatcctccatctcctccctctcgccttccgtctcctgatccagctgcttcttcctctccatcaactgttgactctgcttctcctgccagaaagctgacggtagggaaagtgtccagcggaataggggctgcagctgaagtcctggtcaatctgtacatgaatgatcacagacctaaggcccaggccacctctccagacctggaatctatgcgaaagtcatttccccttaacctgggaggcagcgacacgtgttacttctgtaagaaacgtgtgtacgtgatggaacggctgagcgccgagggccacttcttccaccgggagtgtttccgctgcagcatctgtgccaccaccttgcgcctggccgcctacacctttgactgcgatgaaggcaaattttactgcaagcctcacttcattcactgtaaaaccaatagcaaacaacggaagagacgggcagagttgaagcaacaaagagaggaggaggcaacatggcaagagcaggaagcccctcggagagacactcccaccgaaagttcttgcgcagtggccgccattggcaccctggaaggcagccccccaggtatctccacctccttctttaggaaggtgctgggctggcccctcaggctgccgagggacctgtgtaactggatgcagggactcctgcaagctgctggcctccatatcagggacaatgcttacaactactgctacatgtacgagctcctgagcctggggctgccactcctctgggcgttctctgaggtcctggcagccatgtacagggaatctgagggctccctcgagagcatctgcaactgggtgctcaggtgcttcccagtcaagctccgctgacatggctggctgccccaaagtgccttcacatttccagggaggcttcagatggcagtgcgtttgcagtttgctcaggctctggccaggaagcctagcattctctaagcaattagctcaaagccaaagaatttcacatgggccacctccgcctggccttatcagggtgaacatctactcacggtgctagggccagggatgatatgaaggatcttttctatagctttgtgagccatacttctgggtttacatttcaatttttttaattttaattagcccagagaaagcatttttttctatgagtgtcaatttttctaaacatgggtttgaagcttataaccagttttataaaccccttgaacactgcagtgagttatcaaagccactgcctgcaaagtggatgatttaagattttacacgcatgaaaatgagtgtgccatctcctgaccagtgccttttgacttaggtacccagatgccacttgtcagcagcaggatactttttacaacacgaaagcataattattttagaagaagagagtagaagggcagaatagaattcaacttacagaagcacggagtagtgtgtggttggctgttatctgtccccctgggaggaggactgttttgctcccttgttttgatgttaaacagtagcttaaaggctttcccccccataccaactcacagccaaatgacaaagaaccgtggggtttcaacagattctacaaacatgcattttcccttcccactaatgggcactgcagggaaagcccattggcatttgaccatggagctgatgcagtgccaaagatgagctctttcaactgatggcattttagcccctgtggctcccagcggatcccccagcccgggctgcaggctgagccaaggctgtgcagggtccatattggtcaggccaagtggagtggaagactctgtccacttatgtggtgtcctttgggactgagggggtttgttagcacatcaggctattgctgggaagcgtggcctgcccagtgagcattgcctgtggacatcctgactgcttagctgctccgctgccacacatatgtggtcaaaacagaaaccaatttcacactgccctgggaaaggaatgggtctgacctccaggggaagctctaccatatcttgactggcagggaaggctgggagtggaagctatttatggactgatccaaaggacatatgcatgagtaagggtaaaaatgagcatgcaggtccacctgtgttcttactctgggtatctagaagagtcctcagctctccctactccacgctgcctagacatacacagctgcagggtctggctgaacaatcaaggggccgccagagaaaggccatctacggtgcgcagtgtatctggagttgctgggcccaagatagctctgtggagttatcactagagatgcctctggattaactaagaggtgtgcctgggtgtgggtgaggagtcagaacctttgagagctttgagatgacagtttctatggggcgggaagaaggaggtgcatttctacaaacacttccctgaaatccttgggaaaaacagaggcatggccgtggccaactctgtgggaactggcgcctctgtccttgttggcactgttctcagtccgatgacttgcattgtgttttctccaatttttgctgggattttaatgttcagcatggtgggaggaacccttgattccttttgtttgagtatagaaagtaaatttttgaggtcatgatgtgaacggccatgttattgtgattatcttcagctcaggataggctgagatgctttgtggagtgttccatgaagcccgagtcggaatctctgactgtcgtgtacagccataaggagactggtttgaattactgtggcgagacagggcgtgcctgtcagaaatctgagatgtttgtacgctctgagatgttgaacctttctggtgggcagcaccgacacccaggggtggacccccgaggatgaatgcctctaggcctccgcaacatattcaagaatgaatgggagacgctagagtaaaatgggggcagagaggatatcagggagcaagatgcaaactgtgtgcatccactctcgtaaacaagtagctggtcacaaccagaaaggttcatctctcctaagcaaacagcgactctttcagaggaagtttccctctttcaatcgtggccttattttcaactccggtgccttctcgtgatgttaatcatttccttttttccccacactaagctctcttttctatctttctctctctttccaatcttacgccatggccatcagttcatttcagccttccagtgctacacccacttcttggctgacacacttctgctctaaggtgactggttttcttgccaattttcaaagagtggtactaacccccaacccgctttccgcaccccgtcctctccgccagcagtactggttgcactaactgtgagtgtcttgcatactgatggactcatttggtggcatggttggctaacagcatggcggggggtgttcagcttgagacccatgcctgtgttcatttcccatggagctggcagcctggtctaccccaagtgcatgccccgcctctcctctctcccttgggtctgcctgcgtgcatgcttctccagttgcgtctgcgaagctacctactttcttgggagggtcgaccttgatcatgaaacaataccatgagggggcctctgtcacctttgaaaagaacactttttgagcagcctcaaaaagctcatacataccagcgccttcttaaattggctctaatgtaaagattgttaatgtcatttatcaaaaccataggtgattatttggagggatttaaaaaacttaattactctcaggcctcatcccaagcttgacacatgctctgtaggttgaacacataatcacaaatattctagcaaatgctgccttggttgcagcctgcactgtagacccaagggttttgctgtggctcttcttatctcccttggctcataaagccccagatgatgccagagcttcaattagagccatcatcatcccaggcagggatatctttgagaaatgactcagttcagccccaggcccctgtgactctgcttaaagcacacatttctgctgactcttgtacctggggcagcaggataatcaccaacacactcttaacgagaaacaacacaccaagcacagtggagctgtcctaggcaacactcgcggtctcaggctgcggtgggcgtctgtcctgcatgtggcccagaccaccctgacccccgggcctgcctgcctggccctgcatgctgcacgctcactgtatttgtgcagatcctggccagtacaaagtcgttgctcttgtcttatcttctcttacagagtctccctccctttatagaatgtcaaccaaagagtgccctcctcccctctcagcctcctctttagctagcctccccatctcatcacaacgcatgtctgtgacctttggtaatcatttacagtgccacacggaaccctgtattttgcacacagcaaaacaaacaatgtttagctttatttatggtatttgatgctgtaaatggaaataaatattgttctttataaagcaaaaaaagta

SEQ ID NO: 435030 - DNA, 7404 bp, Homo sapiens
aggcgctcggctggctaagcctgcgccgggccgcctcgctcgctcccagctctgtcagtggcccgcggggcccgatcgctgcgcccgcggccagggccgaggcaggcctgacccggggccgggcagcccgcgcgactttcggaacatggcaacccgtgtgtgtctcatcccagaaagagaagactttaaccactgtgatgcctgagaatccagtgtgacgtttctccagatacttcatgctgttcacctgtgtcctcgccgcaccactgccgcacacgactcctgaaccatgggggaaaacgaggatgagaagcaggcccaggcggggcaggtttttgagaactttgtccaggcatccacgtgcaaaggtaccctccaggccttcaacattctcacacgacacctggacctagaccctctggaccacagaaacttttattccaagctcaagtccaaggtgaccacctggaaagccaaagccctgtggtacaaattggataagcgtggttcccacaaagagtataagcgagggaagtcgtgcacgaacaccaagtgtctcatagttgggggaggaccctgtggcttgcgcactgccattgaacttgcctacctgggagccaaagtggtcgtggtggagaagagggactccttctcccggaacaacgtgctacacctctggcctttcaccatccatgaccttcgtggcctgggagccaagaagttctatgggaagttctgtgctggctccatcgaccatatcagtattcgccaactacagctcatcctattcaaggtggccctgatgctgggagttgaaatccatgtgaatgtggagttcgtgaaggttctagagcctcctgaagatcaagaaaatcaaaaaattggctggcgggcagaatttctccctacagaccattctctgtcggagtttgagtttgacgtcatcattggtgccgatggccgcaggaacaccctggaagggttcagaagaaaagaattccgtgggaagctggcgattgccatcaccgccaacttcataaacagaaacagcacagcggaagccaaggtggaagagattagtggtgtggctttcatcttcaatcagaaattttttcaggaccttaaagaagaaacaggcatagatcttgagaacattgtttactacaaggactgcacccactattttgtaatgacagccaagaagcagagcctgctcgacaaaggtgtcatcattaacgactacatcgacacagagatgctgctgtgtgcggagaacgtgaaccaagacaacctgctatcctatgcccgggaagctgcagactttgccaccaactaccagctgccatccttagactttgccatgaaccactatgggcagcctgatgtggccatgtttgactttacctgcatgtatgcctcagagaacgcggccctggtgcgggagcggcaggcgcaccagctgctcgtggcccttgtgggtgacagcttgcttgagccattttggcccatgggtacaggctgtgcccgtggcttcctggcagcctttgacacggcatggatggtgaagagctggaaccagggcacccctcccctggagctgctggctgaaagggaaagtctctaccggctgttacctcagacaaccccggagaacatcaacaagaactttgagcagtacacgttggacccagggacacggtacccaaacctcaactcacactgtgtcaggccccatcaggtgaagcatttgtatatcactaaggagctggagcactaccctctcgagagactgggctcggtgaggagatcgccagcagcagacagagggctaccagcatgtcaacgtcaccgacctgaccacatcctggcgcagtgggttggccctgtgtgccatcatccaccgcttccggcctgagctcatcaactttgactctttgaatgaagatgatgctgtggagaacaaccagctcgcatttgatgtggccgagcgagagtttgggatccctccagtgaccacgggcaaagagatggcatctgcccaggagcctgacaagctcagcatggtcatgtacctctccaagttctacgagctcttccggggcaccccactgaggcccgtggattcttggcgcaaaaactatggagaaaatgctgacctcagcttggccaaatcatccatttctaataactatctcaacctcacatttccaaggaagaggactccacgggtggatggtcaaaccggagagaatgacatgaacaaacggagacggaagggcttcaccaacctggacgagccttcaaacttttccagccgtagcttgggctccaatcaagagtgtgggagcagtaaggaaggtggaaatcagaacaaagtcaagtccatggcgaatcagctgctggccaagtttgaggagagcactcggaacccctcactcatgaagcaggaacgccgtgtctcagggataggtaagccggtcctgtgctcttcctccggccctcctgttcactcttgctgccccaagccggaggaggccacacccagcccatcacctcctctgaaaaggcagttcccctctgtggtcgtgacggggcacgtgctcagagagctcaagcaagtgtctgctggcagtgagtgcctgagcagaccttggagagccagagccaagtctgacctacagctgggtgggacagaaaatttcgctaccctgccttctacccgcccgagggcgcaggctctttccggggtgctgtggcggctgcagcaagtggaggaaaagattctccagaagagggctcagaacttggccaacagggaatttcacacaaagaacattaaggagaaggcggctcaccttgcctccatgtttggacacggggatttcccgcagaataaactactctctaaaggcctgtctcatactcatcctccatctcctccctctcgccttccgtctcctgatccagctgcttcttcctctccatcaactgttgactctgcttctcctgccagaaagctgacggtagggaaagtgtccagcggaataggggctgcagctgaagtcctggtcaatctgtacatgaatgatcacagacctaaggcccaggccacctctccagacctggaatctatgcgaaagtcatttccccttaacctgggaggcagcgacacgtgttacttctgtaagaaacgtgtgtacgtgatggaacggctgagcgccgagggccacttcttccaccgggagtgtttccgctgcagcatctgtgccaccaccttgcgcctggccgcctacacctttgactgcgatgaaggcaaattttactgcaagcctcacttcattcactgtaaaaccaatagcaaacaacggaagagacgggcagagttgaagcaacaaagagaggaggaggcaacatggcaagagcaggaagcccctcggagagacactcccaccgaaagttcttgcgcagtggccgccattggcaccctggaaggcagccccccaggtatctccacctccttctttaggaaggtgctgggctggcccctcaggctgccgagggacctgtgtaactggatgcagggactcctgcaagctgctggcctccatatcagggacaatgcttacaactactgctacatgtacgagctcctgagcctggggctgccactcctctgggcgttctctgaggtcctggcagccatgtacagggaatctgagggctccctcgagagcatctgcaactgggtgctcaggtgcttcccagtcaagctccgctgacatggctggctgccccaaagtgccttcacatttccagggaggcttcagatggcagtgcgtttgcagtttgctcaggctctggccaggaagcctagcattctctaagcaattagctcaaagccaaagaatttcacatgggccacctccgcctggccttatcagggtgaacatctactcacggtgctagggccagggatgatatgaaggatcttttctatagctttgtgagccatacttctgggtttacatttcaatttttttaattttaattagcccagagaaagcatttttttctatgagtgtcaatttttctaaacatgggtttgaagcttataaccagttttataaaccccttgaacactgcagtgagttatcaaagccactgcctgcaaagtggatgatttaagattttacacgcatgaaaatgagtgtgccatctcctgaccagtgccttttgacttaggtacccagatgccacttgtcagcagcaggatactttttacaacacgaaagcataattattttagaagaagagagtagaagggcagaatagaattcaacttacagaagcacggagtagtgtgtggttggctgttatctgtccccctgggaggaggactgttttgctcccttgttttgatgttaaacagtagcttaaaggctttcccccccataccaactcacagccaaatgacaaagaaccgtggggtttcaacagattctacaaacatgcattttcccttcccactaatgggcactgcagggaaagcccattggcatttgaccatggagctgatgcagtgccaaagatgagctctttcaactgatggcattttagcccctgtggctcccagcggatcccccagcccgggctgcaggctgagccaaggctgtgcagggtccatattggtcaggccaagtggagtggaagactctgtccacttatgtggtgtcctttgggactgagggggtttgttagcacatcaggctattgctgggaagcgtggcctgcccagtgagcattgcctgtggacatcctgactgcttagctgctccgctgccacacatatgtggtcaaaacagaaaccaatttcacactgccctgggaaaggaatgggtctgacctccaggggaagctctaccatatcttgactggcagggaaggctgggagtggaagctatttatggactgatccaaaggacatatgcatgagtaagggtaaaaatgagcatgcaggtccacctgtgttcttactctgggtatctagaagagtcctcagctctccctactccacgctgcctagacatacacagctgcagggtctggctgaacaatcaaggggccgccagagaaaggccatctacggtgcgcagtgtatctggagttgctgggcccaagatagctctgtggagttatcactagagatgcctctggattaactaagaggtgtgcctgggtgtgggtgaggagtcagaacctttgagagctttgagatgacagtttctatggggcgggaagaaggaggtgcatttctacaaacacttccctgaaatccttgggaaaaacagaggcatggccgtggccaactctgtgggaactggcgcctctgtccttgttggcactgttctcagtccgatgacttgcattgtgttttctccaatttttgctgggattttaatgttcagcatggtgggaggaacccttgattccttttgtttgagtatagaaagtaaatttttgaggtcatgatgtgaacggccatgttattgtgattatcttcagctcaggataggctgagatgctttgtggagtgttccatgaagcccgagtcggaatctctgactgtcgtgtacagccataaggagactggtttgaattactgtggcgagacagggcgtgcctgtcagaaatctgagatgtttgtacgctctgagatgttgaacctttctggtgggcagcaccgacacccaggggtggacccccgaggatgaatgcctctaggcctccgcaacatattcaagaatgaatgggagacgctagagtaaaatgggggcagagaggatatcagggagcaagatgcaaactgtgtgcatccactctcgtaaacaagtagctggtcacaaccagaaaggttcatctctcctaagcaaacagcgactctttcagaggaagtttccctctttcaatcgtggccttattttcaactccggtgccttctcgtgatgttaatcatttccttttttccccacactaagctctcttttctatctttctctctctttccaatcttacgccatggccatcagttcatttcagccttccagtgctacacccacttcttggctgacacacttctgctctaaggtgactggttttcttgccaattttcaaagagtggtactaacccccaacccgctttccgcaccccgtcctctccgccagcagtactggttgcactaactgtgagtgtcttgcatactgatggactcatttggtggcatggttggctaacagcatggcggggggtgttcagcttgagacccatgcctgtgttcatttcccatggagctggcagcctggtctaccccaagtgcatgccccgcctctcctctctcccttgggtctgcctgcgtgcatgcttctccagttgcgtctgcgaagctacctactttcttgggagggtcgaccttgatcatgaaacaataccatgagggggcctctgtcacctttgaaaagaacactttttgagcagcctcaaaaagctcatacataccagcgccttcttaaattggctctaatgtaaagattgttaatgtcatttatcaaaaccataggtgattatttggagggatttaaaaaacttaattactctcaggcctcatcccaagcttgacacatgctctgtaggttgaacacataatcacaaatattctagcaaatgctgccttggttgcagcctgcactgtagacccaagggttttgctgtggctcttcttatctcccttggctcataaagccccagatgatgccagagcttcaattagagccatcatcatcccaggcagggatatctttgagaaatgactcagttcagccccaggcccctgtgactctgcttaaagcacacatttctgctgactcttgtacctggggcagcaggataatcaccaacacactcttaacgagaaacaacacaccaagcacagtggagctgtcctaggcaacactcgcggtctcaggctgcggtgggcgtctgtcctgcatgtggcccagaccaccctgacccccgggcctgcctgcctggccctgcatgctgcacgctcactgtatttgtgcagatcctggccagtacaaagtcgttgctcttgtcttatcttctcttacagagtctccctccctttatagaatgtcaaccaaagagtgccctcctcccctctcagcctcctctttagctagcctccccatctcatcacaacgcatgtctgtgacctttggtaatcatttacagtgccacacggaaccctgtattttgcacacagcaaaacaaacaatgtttagctttatttatggtatttgatgctgtaaatggaaataaatattgttctttataaagcaaaaaaagta

SEQ ID NO: 435031 - DNA, 7474 bp, Homo sapiens
cactgaggtaccaagactaatgaaggtccggccctccccagtgtaggaggcaggtaaatgatcacactgtgacaaatgctcaaacggggatgtgcttgcaaaggctagagacagcacgggaggaaggagcagtccattctgctgagagtgtgagtaccgagaaagcatggcactgggcttgaaggatgaggagttcgccagacacagaggatgaggagagcagcacgtgtgacgtttctccagatacttcatgctgttcacctgtgtcctcgccgcaccactgccgcacacgactcctgaaccatgggggaaaacgaggatgagaagcaggcccaggcggggcaggtttttgagaactttgtccaggcatccacgtgcaaaggtaccctccaggccttcaacattctcacacgacacctggacctagaccctctggaccacagaaacttttattccaagctcaagtccaaggtgaccacctggaaagccaaagccctgtggtacaaattggataagcgtggttcccacaaagagtataagcgagggaagtcgtgcacgaacaccaagtgtctcatagttgggggaggaccctgtggcttgcgcactgccattgaacttgcctacctgggagccaaagtggtcgtggtggagaagagggactccttctcccggaacaacgtgctacacctctggcctttcaccatccatgaccttcgtggcctgggagccaagaagttctatgggaagttctgtgctggctccatcgaccatatcagtattcgccaactacagctcatcctattcaaggtggccctgatgctgggagttgaaatccatgtgaatgtggagttcgtgaaggttctagagcctcctgaagatcaagaaaatcaaaaaattggctggcgggcagaatttctccctacagaccattctctgtcggagtttgagtttgacgtcatcattggtgccgatggccgcaggaacaccctggaagggttcagaagaaaagaattccgtgggaagctggcgattgccatcaccgccaacttcataaacagaaacagcacagcggaagccaaggtggaagagattagtggtgtggctttcatcttcaatcagaaattttttcaggaccttaaagaagaaacaggcatagatcttgagaacattgtttactacaaggactgcacccactattttgtaatgacagccaagaagcagagcctgctcgacaaaggtgtcatcattaacgactacatcgacacagagatgctgctgtgtgcggagaacgtgaaccaagacaacctgctatcctatgcccgggaagctgcagactttgccaccaactaccagctgccatccttagactttgccatgaaccactatgggcagcctgatgtggccatgtttgactttacctgcatgtatgcctcagagaacgcggccctggtgcgggagcggcaggcgcaccagctgctcgtggcccttgtgggtgacagcttgcttgagccattttggcccatgggtacaggctgtgcccgtggcttcctggcagcctttgacacggcatggatggtgaagagctggaaccagggcacccctcccctggagctgctggctgaaagggaaagtctctaccggctgttacctcagacaaccccggagaacatcaacaagaactttgagcagtacacgttggacccagggacacggtacccaaacctcaactcacactgtgtcaggccccatcaggtgaagcatttgtatatcactaaggagctggagcactaccctctcgagagactgggctcggtgaggagatctgtcaacctctccaggaaggagtcagatatccggcccagcaagctcctgacctggtgccagcagcagacagagggctaccagcatgtcaacgtcaccgacctgaccacatcctggcgcagtgggttggccctgtgtgccatcatccaccgcttccggcctgagctcatcaactttgactctttgaatgaagatgatgctgtggagaacaaccagctcgcatttgatgtggccgagcgagagtttgggatccctccagtgaccacgggcaaagagatggcatctgcccaggagcctgacaagctcagcatggtcatgtacctctccaagttctacgagctcttccggggcaccccactgaggcccgtggattcttggcgcaaaaactatggagaaaatgctgacctcagcttggccaaatcatccatttctaataactatctcaacctcacatttccaaggaagaggactccacgggtggatggtcaaaccggagagaatgacatgaacaaacggagacggaagggcttcaccaacctggacgagccttcaaacttttccagccgtagcttgggctccaatcaagagtgtgggagcagtaaggaaggtggaaatcagaacaaagtcaagtccatggcgaatcagctgctggccaagtttgaggagagcactcggaacccctcactcatgaagcaggaacgccgtgtctcagggataggtaagccggtcctgtgctcttcctccggccctcctgttcactcttgctgccccaagccggaggaggccacacccagcccatcacctcctctgaaaaggcagttcccctctgtggtcgtgacggggcacgtgctcagagagctcaagcaagtgtctgctggcagtgagtgcctgagcagaccttggagagccagagccaagtctgacctacagctgggtgggacagaaaatttcgctaccctgccttctacccgcccgagggcgcaggctctttccggggtgctgtggcggctgcagcaagtggaggaaaagattctccagaagagggctcagaacttggccaacagggaatttcacacaaagaacattaaggagaaggcggctcaccttgcctccatgtttggacacggggatttcccgcagaataaactactctctaaaggcctgtctcatactcatcctccatctcctccctctcgccttccgtctcctgatccagctgcttcttcctctccatcaactgttgactctgcttctcctgccagaaagctgacggtagggaaagtgtccagcggaataggggctgcagctgaagtcctggtcaatctgtacatgaatgatcacagacctaaggcccaggccacctctccagacctggaatctatgcgaaagtcatttccccttaacctgggaggcagcgacacgtgttacttctgtaagaaacgtgtgtacgtgatggaacggctgagcgccgagggccacttcttccaccgggagtgtttccgctgcagcatctgtgccaccaccttgcgcctggccgcctacacctttgactgcgatgaaggcaaattttactgcaagcctcacttcattcactgtaaaaccaatagcaaacaacggaagagacgggcagagttgaagcaacaaagagaggaggaggcaacatggcaagagcaggaagcccctcggagagacactcccaccgaaagttcttgcgcagtggccgccattggcaccctggaaggcagccccccaggtatctccacctccttctttaggaaggtgctgggctggcccctcaggctgccgagggacctgtgtaactggatgcagggactcctgcaagctgctggcctccatatcagggacaatgcttacaactactgctacatgtacgagctcctgagcctggggctgccactcctctgggcgttctctgaggtcctggcagccatgtacagggaatctgagggctccctcgagagcatctgcaactgggtgctcaggtgcttcccagtcaagctccgctgacatggctggctgccccaaagtgccttcacatttccagggaggcttcagatggcagtgcgtttgcagtttgctcaggctctggccaggaagcctagcattctctaagcaattagctcaaagccaaagaatttcacatgggccacctccgcctggccttatcagggtgaacatctactcacggtgctagggccagggatgatatgaaggatcttttctatagctttgtgagccatacttctgggtttacatttcaatttttttaattttaattagcccagagaaagcatttttttctatgagtgtcaatttttctaaacatgggtttgaagcttataaccagttttataaaccccttgaacactgcagtgagttatcaaagccactgcctgcaaagtggatgatttaagattttacacgcatgaaaatgagtgtgccatctcctgaccagtgccttttgacttaggtacccagatgccacttgtcagcagcaggatactttttacaacacgaaagcataattattttagaagaagagagtagaagggcagaatagaattcaacttacagaagcacggagtagtgtgtggttggctgttatctgtccccctgggaggaggactgttttgctcccttgttttgatgttaaacagtagcttaaaggctttcccccccataccaactcacagccaaatgacaaagaaccgtggggtttcaacagattctacaaacatgcattttcccttcccactaatgggcactgcagggaaagcccattggcatttgaccatggagctgatgcagtgccaaagatgagctctttcaactgatggcattttagcccctgtggctcccagcggatcccccagcccgggctgcaggctgagccaaggctgtgcagggtccatattggtcaggccaagtggagtggaagactctgtccacttatgtggtgtcctttgggactgagggggtttgttagcacatcaggctattgctgggaagcgtggcctgcccagtgagcattgcctgtggacatcctgactgcttagctgctccgctgccacacatatgtggtcaaaacagaaaccaatttcacactgccctgggaaaggaatgggtctgacctccaggggaagctctaccatatcttgactggcagggaaggctgggagtggaagctatttatggactgatccaaaggacatatgcatgagtaagggtaaaaatgagcatgcaggtccacctgtgttcttactctgggtatctagaagagtcctcagctctccctactccacgctgcctagacatacacagctgcagggtctggctgaacaatcaaggggccgccagagaaaggccatctacggtgcgcagtgtatctggagttgctgggcccaagatagctctgtggagttatcactagagatgcctctggattaactaagaggtgtgcctgggtgtgggtgaggagtcagaacctttgagagctttgagatgacagtttctatggggcgggaagaaggaggtgcatttctacaaacacttccctgaaatccttgggaaaaacagaggcatggccgtggccaactctgtgggaactggcgcctctgtccttgttggcactgttctcagtccgatgacttgcattgtgttttctccaatttttgctgggattttaatgttcagcatggtgggaggaacccttgattccttttgtttgagtatagaaagtaaatttttgaggtcatgatgtgaacggccatgttattgtgattatcttcagctcaggataggctgagatgctttgtggagtgttccatgaagcccgagtcggaatctctgactgtcgtgtacagccataaggagactggtttgaattactgtggcgagacagggcgtgcctgtcagaaatctgagatgtttgtacgctctgagatgttgaacctttctggtgggcagcaccgacacccaggggtggacccccgaggatgaatgcctctaggcctccgcaacatattcaagaatgaatgggagacgctagagtaaaatgggggcagagaggatatcagggagcaagatgcaaactgtgtgcatccactctcgtaaacaagtagctggtcacaaccagaaaggttcatctctcctaagcaaacagcgactctttcagaggaagtttccctctttcaatcgtggccttattttcaactccggtgccttctcgtgatgttaatcatttccttttttccccacactaagctctcttttctatctttctctctctttccaatcttacgccatggccatcagttcatttcagccttccagtgctacacccacttcttggctgacacacttctgctctaaggtgactggttttcttgccaattttcaaagagtggtactaacccccaacccgctttccgcaccccgtcctctccgccagcagtactggttgcactaactgtgagtgtcttgcatactgatggactcatttggtggcatggttggctaacagcatggcggggggtgttcagcttgagacccatgcctgtgttcatttcccatggagctggcagcctggtctaccccaagtgcatgccccgcctctcctctctcccttgggtctgcctgcgtgcatgcttctccagttgcgtctgcgaagctacctactttcttgggagggtcgaccttgatcatgaaacaataccatgagggggcctctgtcacctttgaaaagaacactttttgagcagcctcaaaaagctcatacataccagcgccttcttaaattggctctaatgtaaagattgttaatgtcatttatcaaaaccataggtgattatttggagggatttaaaaaacttaattactctcaggcctcatcccaagcttgacacatgctctgtaggttgaacacataatcacaaatattctagcaaatgctgccttggttgcagcctgcactgtagacccaagggttttgctgtggctcttcttatctcccttggctcataaagccccagatgatgccagagcttcaattagagccatcatcatcccaggcagggatatctttgagaaatgactcagttcagccccaggcccctgtgactctgcttaaagcacacatttctgctgactcttgtacctggggcagcaggataatcaccaacacactcttaacgagaaacaacacaccaagcacagtggagctgtcctaggcaacactcgcggtctcaggctgcggtgggcgtctgtcctgcatgtggcccagaccaccctgacccccgggcctgcctgcctggccctgcatgctgcacgctcactgtatttgtgcagatcctggccagtacaaagtcgttgctcttgtcttatcttctcttacagagtctccctccctttatagaatgtcaaccaaagagtgccctcctcccctctcagcctcctctttagctagcctccccatctcatcacaacgcatgtctgtgacctttggtaatcatttacagtgccacacggaaccctgtattttgcacacagcaaaacaaacaatgtttagctttatttatggtatttgatgctgtaaatggaaataaatattgttctttataaagcaaaaaaagta

SEQ ID NO: 435032 - DNA, 7382 bp, Homo sapiens
ggtagatggtgtgcttccagctgataccaggagcagaagttttgagaagagactgtttgtcatgtggatagtggaaagccctgctctctggtaacgaatgaagaaaggctttaaagctgggtgtctacggagaggtgtgacgtttctccagatacttcatgctgttcacctgtgtcctcgccgcaccactgccgcacacgactcctgaaccatgggggaaaacgaggatgagaagcaggcccaggcggggcaggtttttgagaactttgtccaggcatccacgtgcaaaggtaccctccaggccttcaacattctcacacgacacctggacctagaccctctggaccacagaaacttttattccaagctcaagtccaaggtgaccacctggaaagccaaagccctgtggtacaaattggataagcgtggttcccacaaagagtataagcgagggaagtcgtgcacgaacaccaagtgtctcatagttgggggaggaccctgtggcttgcgcactgccattgaacttgcctacctgggagccaaagtggtcgtggtggagaagagggactccttctcccggaacaacgtgctacacctctggcctttcaccatccatgaccttcgtggcctgggagccaagaagttctatgggaagttctgtgctggctccatcgaccatatcagtattcgccaactacagctcatcctattcaaggtggccctgatgctgggagttgaaatccatgtgaatgtggagttcgtgaaggttctagagcctcctgaagatcaagaaaatcaaaaaattggctggcgggcagaatttctccctacagaccattctctgtcggagtttgagtttgacgtcatcattggtgccgatggccgcaggaacaccctggaagggttcagaagaaaagaattccgtgggaagctggcgattgccatcaccgccaacttcataaacagaaacagcacagcggaagccaaggtggaagagattagtggtgtggctttcatcttcaatcagaaattttttcaggaccttaaagaagaaacaggcatagatcttgagaacattgtttactacaaggactgcacccactattttgtaatgacagccaagaagcagagcctgctcgacaaaggtgtcatcattaacgactacatcgacacagagatgctgctgtgtgcggagaacgtgaaccaagacaacctgctatcctatgcccgggaagctgcagactttgccaccaactaccagctgccatccttagactttgccatgaaccactatgggcagcctgatgtggccatgtttgactttacctgcatgtatgcctcagagaacgcggccctggtgcgggagcggcaggcgcaccagctgctcgtggcccttgtgggtgacagcttgcttgagccattttggcccatgggtacaggctgtgcccgtggcttcctggcagcctttgacacggcatggatggtgaagagctggaaccagggcacccctcccctggagctgctggctgaaagggaaagtctctaccggctgttacctcagacaaccccggagaacatcaacaagaactttgagcagtacacgttggacccagggacacggtacccaaacctcaactcacactgtgtcaggccccatcaggtgaagcatttgtatatcactaaggagctggagcactaccctctcgagagactgggctcggtgaggagatctgtcaacctctccaggaaggagtcagatatccggcccagcaagctcctgacctggtgccagcagcagacagagggctaccagcatgtcaacgtcaccgacctgaccacatcctggcgcagtgggttggccctgtgtgccatcatccaccgcttccggcctgagctcatcaactttgactctttgaatgaagatgatgctgtggagaacaaccagctcgcatttgatgtggccgagcgagagtttgggatccctccagtgaccacgggcaaagagatggcatctgcccaggagcctgacaagctcagcatggtcatgtacctctccaagttctacgagctcttccggggcaccccactgaggcccgtggattcttggcgcaaaaactatggagaaaatgctgacctcagcttggccaaatcatccatttctaataactatctcaacctcacatttccaaggaagaggactccacgggtggatggtcaaaccggagagaatgacatgaacaaacggagacggaagggcttcaccaacctggacgagccttcaaacttttccagccgtagcttgggctccaatcaagagtgtgggagcagtaaggaaggtggaaatcagaacaaagtcaagtccatggcgaatcagctgctggccaagtttgaggagagcactcggaacccctcactcatgaagcaggaacgccgtgtctcagggataggtaagccggtcctgtgctcttcctccggccctcctgttcactcttgctgccccaagccggaggaggccacacccagcccatcacctcctctgaaaaggcagttcccctctgtggtcgtgacggggcacgtgctcagagagctcaagcaagtgtctgctggcagtgagtgcctgagcagaccttggagagccagagccaagtctgacctacagctgggtgggacagaaaatttcgctaccctgccttctacccgcccgagggcgcaggctctttccggggtgctgtggcggctgcagcaagtggaggaaaagattctccagaagagggctcagaacttggccaacagggaatttcacacaaagaacattaaggagaaggcggctcaccttgcctccatgtttggacacggggatttcccgcagaataaactactctctaaaggcctgtctcatactcatcctccatctcctccctctcgccttccgtctcctgatccagctgcttcttcctctccatcaactgttgactctgcttctcctgccagaaagctgacggtagggaaagtgtccagcggaataggggctgcagctgaagtcctggtcaatctgtacatgaatgatcacagacctaaggcccaggccacctctccagacctggaatctatgcgaaagtcatttccccttaacctgggaggcagcgacacgtgttacttctgtaagaaacgtgtgtacgtgatggaacggctgagcgccgagggccacttcttccaccgggagtgtttccgctgcagcatctgtgccaccaccttgcgcctggccgcctacacctttgactgcgatgaaggcaaattttactgcaagcctcacttcattcactgtaaaaccaatagcaaacaacggaagagacgggcagagttgaagcaacaaagagaggaggaggcaacatggcaagagcaggaagcccctcggagagacactcccaccgaaagttcttgcgcagtggccgccattggcaccctggaaggcagccccccaggtatctccacctccttctttaggaaggtgctgggctggcccctcaggctgccgagggacctgtgtaactggatgcagggactcctgcaagctgctggcctccatatcagggacaatgcttacaactactgctacatgtacgagctcctgagcctggggctgccactcctctgggcgttctctgaggtcctggcagccatgtacagggaatctgagggctccctcgagagcatctgcaactgggtgctcaggtgcttcccagtcaagctccgctgacatggctggctgccccaaagtgccttcacatttccagggaggcttcagatggcagtgcgtttgcagtttgctcaggctctggccaggaagcctagcattctctaagcaattagctcaaagccaaagaatttcacatgggccacctccgcctggccttatcagggtgaacatctactcacggtgctagggccagggatgatatgaaggatcttttctatagctttgtgagccatacttctgggtttacatttcaatttttttaattttaattagcccagagaaagcatttttttctatgagtgtcaatttttctaaacatgggtttgaagcttataaccagttttataaaccccttgaacactgcagtgagttatcaaagccactgcctgcaaagtggatgatttaagattttacacgcatgaaaatgagtgtgccatctcctgaccagtgccttttgacttaggtacccagatgccacttgtcagcagcaggatactttttacaacacgaaagcataattattttagaagaagagagtagaagggcagaatagaattcaacttacagaagcacggagtagtgtgtggttggctgttatctgtccccctgggaggaggactgttttgctcccttgttttgatgttaaacagtagcttaaaggctttcccccccataccaactcacagccaaatgacaaagaaccgtggggtttcaacagattctacaaacatgcattttcccttcccactaatgggcactgcagggaaagcccattggcatttgaccatggagctgatgcagtgccaaagatgagctctttcaactgatggcattttagcccctgtggctcccagcggatcccccagcccgggctgcaggctgagccaaggctgtgcagggtccatattggtcaggccaagtggagtggaagactctgtccacttatgtggtgtcctttgggactgagggggtttgttagcacatcaggctattgctgggaagcgtggcctgcccagtgagcattgcctgtggacatcctgactgcttagctgctccgctgccacacatatgtggtcaaaacagaaaccaatttcacactgccctgggaaaggaatgggtctgacctccaggggaagctctaccatatcttgactggcagggaaggctgggagtggaagctatttatggactgatccaaaggacatatgcatgagtaagggtaaaaatgagcatgcaggtccacctgtgttcttactctgggtatctagaagagtcctcagctctccctactccacgctgcctagacatacacagctgcagggtctggctgaacaatcaaggggccgccagagaaaggccatctacggtgcgcagtgtatctggagttgctgggcccaagatagctctgtggagttatcactagagatgcctctggattaactaagaggtgtgcctgggtgtgggtgaggagtcagaacctttgagagctttgagatgacagtttctatggggcgggaagaaggaggtgcatttctacaaacacttccctgaaatccttgggaaaaacagaggcatggccgtggccaactctgtgggaactggcgcctctgtccttgttggcactgttctcagtccgatgacttgcattgtgttttctccaatttttgctgggattttaatgttcagcatggtgggaggaacccttgattccttttgtttgagtatagaaagtaaatttttgaggtcatgatgtgaacggccatgttattgtgattatcttcagctcaggataggctgagatgctttgtggagtgttccatgaagcccgagtcggaatctctgactgtcgtgtacagccataaggagactggtttgaattactgtggcgagacagggcgtgcctgtcagaaatctgagatgtttgtacgctctgagatgttgaacctttctggtgggcagcaccgacacccaggggtggacccccgaggatgaatgcctctaggcctccgcaacatattcaagaatgaatgggagacgctagagtaaaatgggggcagagaggatatcagggagcaagatgcaaactgtgtgcatccactctcgtaaacaagtagctggtcacaaccagaaaggttcatctctcctaagcaaacagcgactctttcagaggaagtttccctctttcaatcgtggccttattttcaactccggtgccttctcgtgatgttaatcatttccttttttccccacactaagctctcttttctatctttctctctctttccaatcttacgccatggccatcagttcatttcagccttccagtgctacacccacttcttggctgacacacttctgctctaaggtgactggttttcttgccaattttcaaagagtggtactaacccccaacccgctttccgcaccccgtcctctccgccagcagtactggttgcactaactgtgagtgtcttgcatactgatggactcatttggtggcatggttggctaacagcatggcggggggtgttcagcttgagacccatgcctgtgttcatttcccatggagctggcagcctggtctaccccaagtgcatgccccgcctctcctctctcccttgggtctgcctgcgtgcatgcttctccagttgcgtctgcgaagctacctactttcttgggagggtcgaccttgatcatgaaacaataccatgagggggcctctgtcacctttgaaaagaacactttttgagcagcctcaaaaagctcatacataccagcgccttcttaaattggctctaatgtaaagattgttaatgtcatttatcaaaaccataggtgattatttggagggatttaaaaaacttaattactctcaggcctcatcccaagcttgacacatgctctgtaggttgaacacataatcacaaatattctagcaaatgctgccttggttgcagcctgcactgtagacccaagggttttgctgtggctcttcttatctcccttggctcataaagccccagatgatgccagagcttcaattagagccatcatcatcccaggcagggatatctttgagaaatgactcagttcagccccaggcccctgtgactctgcttaaagcacacatttctgctgactcttgtacctggggcagcaggataatcaccaacacactcttaacgagaaacaacacaccaagcacagtggagctgtcctaggcaacactcgcggtctcaggctgcggtgggcgtctgtcctgcatgtggcccagaccaccctgacccccgggcctgcctgcctggccctgcatgctgcacgctcactgtatttgtgcagatcctggccagtacaaagtcgttgctcttgtcttatcttctcttacagagtctccctccctttatagaatgtcaaccaaagagtgccctcctcccctctcagcctcctctttagctagcctccccatctcatcacaacgcatgtctgtgacctttggtaatcatttacagtgccacacggaaccctgtattttgcacacagcaaaacaaacaatgtttagctttatttatggtatttgatgctgtaaatggaaataaatattgttctttataaagcaaaaaaagta

SEQ ID NO: 435033 - DNA, 6722 bp, Homo sapiens
aggcgctcggctggctaagcctgcgccgggccgcctcgctcgctcccagctctgtcagtggcccgcggggcccgatcgctgcgcccgcggccagggccgaggcaggcctgacccggggccgggcagcccgcgcgactttcggaacatggcaacccgtgtgtgtctcatcccagaaagagaagactttaaccactgtgatgcctgagaatccagtgtgacgtttctccagatacttcatgctgttcacctgtgtcctcgccgcaccactgccgcacacgactcctgaaccatgggggaaaacgaggatgagaagcaggcccaggcggggcaggtttttgagaactttgtccaggcatccacgtgcaaaggtaccctccaggccttcaacattctcacacgacacctggacctagaccctctggaccacagaaacttttattccaagctcaagtccaaggtgaccacctggaaagccaaagccctgtggtacaaattggataagcgtggttcccacaaagagtataagcgagggaagtcgtgcacgaacaccaagtgtctcatagttgggggaggaccctgtggcttgcgcactgccattgaacttgcctacctgggagccaaagtggtcgtggtggagaagagggactccttctcccggaacaacgtgctacacctctggcctttcaccatccatgaccttcgtggcctgggagccaagaagttctatgggaagttctgtgctggctccatcgaccatatcagtattcgccaactacagctcatcctattcaaggtggccctgatgctgggagttgaaatccatgtgaatgtggagttcgtgaaggttctagagcctcctgaagatcaagaaaatcaaaaaattggctggcgggcagaatttctccctacagaccattctctgtcggagtttgagtttgacgtcatcattggtgccgatggccgcaggaacaccctggaagggttcagaagaaaagaattccgtgggaagctggcgattgccatcaccgccaacttcataaacagaaacagcacagcggaagccaaggtggaagagattagtggtgtggctttcatcttcaatcagaaattttttcaggaccttaaagaagaaacaggcatagatcttgagaacattgtttactacaaggactgcacccactattttgtaatgacagccaagaagcagagcctgctcgacaaaggtgtcatcattaacgactacatcgacacagagatgctgctgtgtgcggagaacgtgaaccaagacaacctgctatcctatgcccgggaagctgcagactttgccaccaactaccagctgccatccttagactttgccatgaaccactatgggcagcctgatgtggccatgtttgactttacctgcatgtatgcctcagagaacgcggccctggtgcgggagcggcaggcgcaccagctgctcgtggcccttgtgggtgacagcttgcttgagccattttggcccatgggtacaggctgtgcccgtggcttcctggcagcctttgacacggcatggatggtgaagagctggaaccagggcacccctcccctggagctgctggctgaaagggaaagtctctaccggctgttacctcagacaaccccggagaacatcaacaagaactttgagcagtacacgttggacccagggacacggtacccaaacctcaactcacactgtgtcaggccccatcaggtgaagcatttgtatatcactaaggagctggagcactaccctctcgagagactgggctcggtgaggagatctgtcaacctctccaggaaggagtcagatatccggcccagcaagctcctgacctggtgccagcagcagacagagggctaccagcatgtcaacgtcaccgacctgaccacatcctggcgcagtgggttggccctgtgtgccatcatccaccgcttccggcctgagctcatcaactttgactctttgaatgaagatgatgctgtggagaacaaccagctcgcatttgatgtggccgagcgagagtttgggatccctccagtgaccacgggcaaagagatggcatctgcccaggagcctgacaagctcagcatggtcatgtacctctccaagttctacgagctcttccggggcaccccactgaggcccgtggattcttggcgcaaaaactatggagaaaatgctgacctcagcttggccaaatcatccatttctaataactatctcaacctcacatttccaaggaagaggactccacgggtggatggtcaaaccggagagaatgacatgaacaaacggagacggaagggcttcaccaacctggacgagccttcaaacttttccagccgtagcttgggctccaatcaagagtgtgggagcagtaaggaaggtggaaatcagaacaaagtcaagtccatggcgaatcagctgctggccaagtttgaggagagcactcggaacccctcactcatgaagcaggaacgccgtgtctcagggataggtaagccggtcctgtgctcttcctccggccctcctgttcactcttgctgccccaagccggaggaggccacacccagcccatcacctcctctgaaaaggcagttcccctctgtggtcgtgacggggcacgtgctcagagagctcaagcaagtgtctgctggcagtgagtgcctgagcagaccttggagagccagagccaagtctgacctacagctgggtgggacagaaaatttcgctaccctgccttctacccgcccgagggcgcaggctctttccggggtgctgtggcggctgcagcaagtggaggaaaagattctccagaagagggctcagaacttggccaacagggaatttcacacaaagaacattaaggagaaggcggctcaccttgcctccatgtttggacacggggatttcccgcagaataaactactctctaaaggcctgtctcatactcatcctccatctcctccctctcgccttccgtctcctgatccagctgcttcttcctctccatcaactgttgactctgcttctcctgccagaaagctgacggtagggaaagtgtccagcggaataggggctgcagctgaagtcctggtcaatctgtacatgaatgatcacagacctaaggcccaggccacctctccagacctggaatctatgcgaaagtcatttccccttaacctgggaggcagcgacacgtgttacttctgtaagaaacgtgtgtacgtgatggaacggctgagcgccgagggccacttcttccaccgggagtgtttccgctgcagcatctgtgccaccaccttgcgcctggccgcctacacctttgactgcgatgaaggcaaattttactgcaagcctcacttcattcactgtaaaaccaatagcaaacaacggaagagacgggcagagttgaagcaacaaagagaggaggaggcaacatggcaagagcaggaagcccctcggagagacactcccaccgaaagttcttgcgcagtggccgccattggcaccctggaaggcagccccccaggtacccagatgccacttgtcagcagcaggatactttttacaacacgaaagcataattattttagaagaagagagtagaagggcagaatagaattcaacttacagaagcacggagtagtgtgtggttggctgttatctgtccccctgggaggaggactgttttgctcccttgttttgatgttaaacagtagcttaaaggctttcccccccataccaactcacagccaaatgacaaagaaccgtggggtttcaacagattctacaaacatgcattttcccttcccactaatgggcactgcagggaaagcccattggcatttgaccatggagctgatgcagtgccaaagatgagctctttcaactgatggcattttagcccctgtggctcccagcggatcccccagcccgggctgcaggctgagccaaggctgtgcagggtccatattggtcaggccaagtggagtggaagactctgtccacttatgtggtgtcctttgggactgagggggtttgttagcacatcaggctattgctgggaagcgtggcctgcccagtgagcattgcctgtggacatcctgactgcttagctgctccgctgccacacatatgtggtcaaaacagaaaccaatttcacactgccctgggaaaggaatgggtctgacctccaggggaagctctaccatatcttgactggcagggaaggctgggagtggaagctatttatggactgatccaaaggacatatgcatgagtaagggtaaaaatgagcatgcaggtccacctgtgttcttactctgggtatctagaagagtcctcagctctccctactccacgctgcctagacatacacagctgcagggtctggctgaacaatcaaggggccgccagagaaaggccatctacggtgcgcagtgtatctggagttgctgggcccaagatagctctgtggagttatcactagagatgcctctggattaactaagaggtgtgcctgggtgtgggtgaggagtcagaacctttgagagctttgagatgacagtttctatggggcgggaagaaggaggtgcatttctacaaacacttccctgaaatccttgggaaaaacagaggcatggccgtggccaactctgtgggaactggcgcctctgtccttgttggcactgttctcagtccgatgacttgcattgtgttttctccaatttttgctgggattttaatgttcagcatggtgggaggaacccttgattccttttgtttgagtatagaaagtaaatttttgaggtcatgatgtgaacggccatgttattgtgattatcttcagctcaggataggctgagatgctttgtggagtgttccatgaagcccgagtcggaatctctgactgtcgtgtacagccataaggagactggtttgaattactgtggcgagacagggcgtgcctgtcagaaatctgagatgtttgtacgctctgagatgttgaacctttctggtgggcagcaccgacacccaggggtggacccccgaggatgaatgcctctaggcctccgcaacatattcaagaatgaatgggagacgctagagtaaaatgggggcagagaggatatcagggagcaagatgcaaactgtgtgcatccactctcgtaaacaagtagctggtcacaaccagaaaggttcatctctcctaagcaaacagcgactctttcagaggaagtttccctctttcaatcgtggccttattttcaactccggtgccttctcgtgatgttaatcatttccttttttccccacactaagctctcttttctatctttctctctctttccaatcttacgccatggccatcagttcatttcagccttccagtgctacacccacttcttggctgacacacttctgctctaaggtgactggttttcttgccaattttcaaagagtggtactaacccccaacccgctttccgcaccccgtcctctccgccagcagtactggttgcactaactgtgagtgtcttgcatactgatggactcatttggtggcatggttggctaacagcatggcggggggtgttcagcttgagacccatgcctgtgttcatttcccatggagctggcagcctggtctaccccaagtgcatgccccgcctctcctctctcccttgggtctgcctgcgtgcatgcttctccagttgcgtctgcgaagctacctactttcttgggagggtcgaccttgatcatgaaacaataccatgagggggcctctgtcacctttgaaaagaacactttttgagcagcctcaaaaagctcatacataccagcgccttcttaaattggctctaatgtaaagattgttaatgtcatttatcaaaaccataggtgattatttggagggatttaaaaaacttaattactctcaggcctcatcccaagcttgacacatgctctgtaggttgaacacataatcacaaatattctagcaaatgctgccttggttgcagcctgcactgtagacccaagggttttgctgtggctcttcttatctcccttggctcataaagccccagatgatgccagagcttcaattagagccatcatcatcccaggcagggatatctttgagaaatgactcagttcagccccaggcccctgtgactctgcttaaagcacacatttctgctgactcttgtacctggggcagcaggataatcaccaacacactcttaacgagaaacaacacaccaagcacagtggagctgtcctaggcaacactcgcggtctcaggctgcggtgggcgtctgtcctgcatgtggcccagaccaccctgacccccgggcctgcctgcctggccctgcatgctgcacgctcactgtatttgtgcagatcctggccagtacaaagtcgttgctcttgtcttatcttctcttacagagtctccctccctttatagaatgtcaaccaaagagtgccctcctcccctctcagcctcctctttagctagcctccccatctcatcacaacgcatgtctgtgacctttggtaatcatttacagtgccacacggaaccctgtattttgcacacagcaaaacaaacaatgtttagctttatttatggtatttgatgctgtaaatggaaataaatattgttctttataaagcaaaaaaagta

SEQ ID NO: 435034 - DNA, 6782 bp, Homo sapiens
aggcgctcggctggctaagcctgcgccgggccgcctcgctcgctcccagctctgtcagtggcccgcggggcccgatcgctgcgcccgcggccagggccgaggcaggcctgacccggggccgggcagcccgcgcgactttcggaacatggcaacccgtgtgtgtctcatcccagaaagagaagactttaaccactgtgatgcctgagaatccagtgtgacgtttctccagatacttcatgctgttcacctgtgtcctcgccgcaccactgccgcacacgactcctgaaccatgggggaaaacgaggatgagaagcaggcccaggcggggcaggtttttgagaactttgtccaggcatccacgtgcaaaggtaccctccaggccttcaacattctcacacgacacctggacctagaccctctggaccacagaaacttttattccaagctcaagtccaaggtgaccacctggaaagccaaagccctgtggtacaaattggataagcgtggttcccacaaagagtataagcgagggaagtcgtgcacgaacaccaagtgtctcatagttgggggaggaccctgtggcttgcgcactgccattgaacttgcctacctgggagccaaagtggtcgtggtggagaagagggactccttctcccggaacaacgtgctacacctctggcctttcaccatccatgaccttcgtggcctgggagccaagaagttctatgggaagttctgtgctggctccatcgaccatatcagtattcgccaactacagctcatcctattcaaggtggccctgatgctgggagttgaaatccatgtgaatgtggagttcgtgaaggttctagagcctcctgaagatcaagaaaatcaaaaaattggctggcgggcagaatttctccctacagaccattctctgtcggagtttgagtttgacgtcatcattggtgccgatggccgcaggaacaccctggaagggttcagaagaaaagaattccgtgggaagctggcgattgccatcaccgccaacttcataaacagaaacagcacagcggaagccaaggtggaagagattagtggtgtggctttcatcttcaatcagaaattttttcaggaccttaaagaagaaacaggcatagatcttgagaacattgtttactacaaggactgcacccactattttgtaatgacagccaagaagcagagcctgctcgacaaaggtgtcatcattaacgactacatcgacacagagatgctgctgtgtgcggagaacgtgaaccaagacaacctgctatcctatgcccgggaagctgcagactttgccaccaactaccagctgccatccttagactttgccatgaaccactatgggcagcctgatgtggccatgtttgactttacctgcatgtatgcctcagagaacgcggccctggtgcgggagcggcaggcgcaccagctgctcgtggcccttgtgggtgacagcttgcttgagccattttggcccatgggtacaggctgtgcccgtggcttcctggcagcctttgacacggcatggatggtgaagagctggaaccagggcacccctcccctggagctgctggctgaaagggaaagtctctaccggctgttacctcagacaaccccggagaacatcaacaagaactttgagcagtacacgttggacccagggacacggtacccaaacctcaactcacactgtgtcaggccccatcaggtgaagcatttgtatatcactaaggagctggagcactaccctctcgagagactgggctcggtgaggagatctgtcaacctctccaggaaggagtcagatatccggcccagcaagctcctgacctggtgccagcagcagacagagggctaccagcatgtcaacgtcaccgacctgaccacatcctggcgcagtgggttggccctgtgtgccatcatccaccgcttccggcctgagctcatcaactttgactctttgaatgaagatgatgctgtggagaacaaccagctcgcatttgatgtggccgagcgagagtttgggatccctccagtgaccacgggcaaagagatggcatctgcccaggagcctgacaagctcagcatggtcatgtacctctccaagttctacgagctcttccggggcaccccactgaggcccgtggattcttggcgcaaaaactatggagaaaatgctgacctcagcttggccaaatcatccatttctaataactatctcaacctcacatttccaaggaagaggactccacgggtggatggtcaaaccggagagaatgacatgaacaaacggagacggaagggcttcaccaacctggacgagccttcaaacttttccagccgtagcttgggctccaatcaagagtgtgggagcagtaaggaaggtggaaatcagaacaaagtcaagtccatggcgaatcagctgctggccaagtttgaggagagcactcggaacccctcactcatgaagcaggaatctatgcgaaagtcatttccccttaacctgggaggcagcgacacgtgttacttctgtaagaaacgtgtgtacgtgatggaacggctgagcgccgagggccacttcttccaccgggagtgtttccgctgcagcatctgtgccaccaccttgcgcctggccgcctacacctttgactgcgatgaaggcaaattttactgcaagcctcacttcattcactgtaaaaccaatagcaaacaacggaagagacgggcagagttgaagcaacaaagagaggaggaggcaacatggcaagagcaggaagcccctcggagagacactcccaccgaaagttcttgcgcagtggccgccattggcaccctggaaggcagccccccaggtatctccacctccttctttaggaaggtgctgggctggcccctcaggctgccgagggacctgtgtaactggatgcagggactcctgcaagctgctggcctccatatcagggacaatgcttacaactactgctacatgtacgagctcctgagcctggggctgccactcctctgggcgttctctgaggtcctggcagccatgtacagggaatctgagggctccctcgagagcatctgcaactgggtgctcaggtgcttcccagtcaagctccgctgacatggctggctgccccaaagtgccttcacatttccagggaggcttcagatggcagtgcgtttgcagtttgctcaggctctggccaggaagcctagcattctctaagcaattagctcaaagccaaagaatttcacatgggccacctccgcctggccttatcagggtgaacatctactcacggtgctagggccagggatgatatgaaggatcttttctatagctttgtgagccatacttctgggtttacatttcaatttttttaattttaattagcccagagaaagcatttttttctatgagtgtcaatttttctaaacatgggtttgaagcttataaccagttttataaaccccttgaacactgcagtgagttatcaaagccactgcctgcaaagtggatgatttaagattttacacgcatgaaaatgagtgtgccatctcctgaccagtgccttttgacttaggtacccagatgccacttgtcagcagcaggatactttttacaacacgaaagcataattattttagaagaagagagtagaagggcagaatagaattcaacttacagaagcacggagtagtgtgtggttggctgttatctgtccccctgggaggaggactgttttgctcccttgttttgatgttaaacagtagcttaaaggctttcccccccataccaactcacagccaaatgacaaagaaccgtggggtttcaacagattctacaaacatgcattttcccttcccactaatgggcactgcagggaaagcccattggcatttgaccatggagctgatgcagtgccaaagatgagctctttcaactgatggcattttagcccctgtggctcccagcggatcccccagcccgggctgcaggctgagccaaggctgtgcagggtccatattggtcaggccaagtggagtggaagactctgtccacttatgtggtgtcctttgggactgagggggtttgttagcacatcaggctattgctgggaagcgtggcctgcccagtgagcattgcctgtggacatcctgactgcttagctgctccgctgccacacatatgtggtcaaaacagaaaccaatttcacactgccctgggaaaggaatgggtctgacctccaggggaagctctaccatatcttgactggcagggaaggctgggagtggaagctatttatggactgatccaaaggacatatgcatgagtaagggtaaaaatgagcatgcaggtccacctgtgttcttactctgggtatctagaagagtcctcagctctccctactccacgctgcctagacatacacagctgcagggtctggctgaacaatcaaggggccgccagagaaaggccatctacggtgcgcagtgtatctggagttgctgggcccaagatagctctgtggagttatcactagagatgcctctggattaactaagaggtgtgcctgggtgtgggtgaggagtcagaacctttgagagctttgagatgacagtttctatggggcgggaagaaggaggtgcatttctacaaacacttccctgaaatccttgggaaaaacagaggcatggccgtggccaactctgtgggaactggcgcctctgtccttgttggcactgttctcagtccgatgacttgcattgtgttttctccaatttttgctgggattttaatgttcagcatggtgggaggaacccttgattccttttgtttgagtatagaaagtaaatttttgaggtcatgatgtgaacggccatgttattgtgattatcttcagctcaggataggctgagatgctttgtggagtgttccatgaagcccgagtcggaatctctgactgtcgtgtacagccataaggagactggtttgaattactgtggcgagacagggcgtgcctgtcagaaatctgagatgtttgtacgctctgagatgttgaacctttctggtgggcagcaccgacacccaggggtggacccccgaggatgaatgcctctaggcctccgcaacatattcaagaatgaatgggagacgctagagtaaaatgggggcagagaggatatcagggagcaagatgcaaactgtgtgcatccactctcgtaaacaagtagctggtcacaaccagaaaggttcatctctcctaagcaaacagcgactctttcagaggaagtttccctctttcaatcgtggccttattttcaactccggtgccttctcgtgatgttaatcatttccttttttccccacactaagctctcttttctatctttctctctctttccaatcttacgccatggccatcagttcatttcagccttccagtgctacacccacttcttggctgacacacttctgctctaaggtgactggttttcttgccaattttcaaagagtggtactaacccccaacccgctttccgcaccccgtcctctccgccagcagtactggttgcactaactgtgagtgtcttgcatactgatggactcatttggtggcatggttggctaacagcatggcggggggtgttcagcttgagacccatgcctgtgttcatttcccatggagctggcagcctggtctaccccaagtgcatgccccgcctctcctctctcccttgggtctgcctgcgtgcatgcttctccagttgcgtctgcgaagctacctactttcttgggagggtcgaccttgatcatgaaacaataccatgagggggcctctgtcacctttgaaaagaacactttttgagcagcctcaaaaagctcatacataccagcgccttcttaaattggctctaatgtaaagattgttaatgtcatttatcaaaaccataggtgattatttggagggatttaaaaaacttaattactctcaggcctcatcccaagcttgacacatgctctgtaggttgaacacataatcacaaatattctagcaaatgctgccttggttgcagcctgcactgtagacccaagggttttgctgtggctcttcttatctcccttggctcataaagccccagatgatgccagagcttcaattagagccatcatcatcccaggcagggatatctttgagaaatgactcagttcagccccaggcccctgtgactctgcttaaagcacacatttctgctgactcttgtacctggggcagcaggataatcaccaacacactcttaacgagaaacaacacaccaagcacagtggagctgtcctaggcaacactcgcggtctcaggctgcggtgggcgtctgtcctgcatgtggcccagaccaccctgacccccgggcctgcctgcctggccctgcatgctgcacgctcactgtatttgtgcagatcctggccagtacaaagtcgttgctcttgtcttatcttctcttacagagtctccctccctttatagaatgtcaaccaaagagtgccctcctcccctctcagcctcctctttagctagcctccccatctcatcacaacgcatgtctgtgacctttggtaatcatttacagtgccacacggaaccctgtattttgcacacagcaaaacaaacaatgtttagctttatttatggtatttgatgctgtaaatggaaataaatattgttctttataaagcaaaaaaagta

SEQ ID NO: 435035 - DNA, 5881 bp, Homo sapiens
aacacagtaggtcttaggaactctgctggaagagaacatgcttcctctcccctcctgccacactcctgaccaggcccccaagcagcagtcctcagggagctgcacccgtgccagtggccccctgccctggccccttgccttggggccgctcgtcctggtccccagccatggtggcaatgagaagggagcgccagggcagaccgtgtgagattcctgcagagcctcactgcctgcgctctccttcttgcagagtcagatatccggcccagcaagctcctgacctggtgccagcagcagacagagggctaccagcatgtcaacgtcaccgacctgaccacatcctggcgcagtgggttggccctgtgtgccatcatccaccgcttccggcctgagctcatcaactttgactctttgaatgaagatgatgctgtggagaacaaccagctcgcatttgatgtggccgagcgagagtttgggatccctccagtgaccacgggcaaagagatggcatctgcccaggagcctgacaagctcagcatggtcatgtacctctccaagttctacgagctcttccggggcaccccactgaggcccgtggattcttggcgcaaaaactatggagaaaatgctgacctcagcttggccaaatcatccatttctaataactatctcaacctcacatttccaaggaagaggactccacgggtggatggtcaaaccggagagaatgacatgaacaaacggagacggaagggcttcaccaacctggacgagccttcaaacttttccagccgtagcttgggctccaatcaagagtgtgggagcagtaaggaaggtggaaatcagaacaaagtcaagtccatggcgaatcagctgctggccaagtttgaggagagcactcggaacccctcactcatgaagcaggaacgccgtgtctcagggataggtaagccggtcctgtgctcttcctccggccctcctgttcactcttgctgccccaagccggaggaggccacacccagcccatcacctcctctgaaaaggcagttcccctctgtggtcgtgacggggcacgtgctcagagagctcaagcaagtgtctgctggcagtgagtgcctgagcagaccttggagagccagagccaagtctgacctacagctgggtgggacagaaaatttcgctaccctgccttctacccgcccgagggcgcaggctctttccggggtgctgtggcggctgcagcaagtggaggaaaagattctccagaagagggctcagaacttggccaacagggaatttcacacaaagaacattaaggagaaggcggctcaccttgcctccatgtttggacacggggatttcccgcagaataaactactctctaaaggcctgtctcatactcatcctccatctcctccctctcgccttccgtctcctgatccagctgcttcttcctctccatcaactgttgactctgcttctcctgccagaaagctgacggtagggaaagtgtccagcggaataggggctgcagctgaagtcctggtcaatctgtacatgaatgatcacagacctaaggcccaggccacctctccagacctggaatctatgcgaaagtcatttccccttaacctgggaggcagcgacacgtgttacttctgtaagaaacgtgtgtacgtgatggaacggctgagcgccgagggccacttcttccaccgggagtgtttccgctgcagcatctgtgccaccaccttgcgcctggccgcctacacctttgactgcgatgaaggcaaattttactgcaagcctcacttcattcactgtaaaaccaatagcaaacaacggaagagacgggcagagttgaagcaacaaagagaggaggaggcaacatggcaagagcaggaagcccctcggagagacactcccaccgaaagttcttgcgcagtggccgccattggcaccctggaaggcagccccccaggtatctccacctccttctttaggaaggtgctgggctggcccctcaggctgccgagggacctgtgtaactggatgcagggactcctgcaagctgctggcctccatatcagggacaatgcttacaactactgctacatgtacgagctcctgagcctggggctgccactcctctgggcgttctctgaggtcctggcagccatgtacagggaatctgagggctccctcgagagcatctgcaactgggtgctcaggtgcttcccagtcaagctccgctgacatggctggctgccccaaagtgccttcacatttccagggaggcttcagatggcagtgcgtttgcagtttgctcaggctctggccaggaagcctagcattctctaagcaattagctcaaagccaaagaatttcacatgggccacctccgcctggccttatcagggtgaacatctactcacggtgctagggccagggatgatatgaaggatcttttctatagctttgtgagccatacttctgggtttacatttcaatttttttaattttaattagcccagagaaagcatttttttctatgagtgtcaatttttctaaacatgggtttgaagcttataaccagttttataaaccccttgaacactgcagtgagttatcaaagccactgcctgcaaagtggatgatttaagattttacacgcatgaaaatgagtgtgccatctcctgaccagtgccttttgacttaggtacccagatgccacttgtcagcagcaggatactttttacaacacgaaagcataattattttagaagaagagagtagaagggcagaatagaattcaacttacagaagcacggagtagtgtgtggttggctgttatctgtccccctgggaggaggactgttttgctcccttgttttgatgttaaacagtagcttaaaggctttcccccccataccaactcacagccaaatgacaaagaaccgtggggtttcaacagattctacaaacatgcattttcccttcccactaatgggcactgcagggaaagcccattggcatttgaccatggagctgatgcagtgccaaagatgagctctttcaactgatggcattttagcccctgtggctcccagcggatcccccagcccgggctgcaggctgagccaaggctgtgcagggtccatattggtcaggccaagtggagtggaagactctgtccacttatgtggtgtcctttgggactgagggggtttgttagcacatcaggctattgctgggaagcgtggcctgcccagtgagcattgcctgtggacatcctgactgcttagctgctccgctgccacacatatgtggtcaaaacagaaaccaatttcacactgccctgggaaaggaatgggtctgacctccaggggaagctctaccatatcttgactggcagggaaggctgggagtggaagctatttatggactgatccaaaggacatatgcatgagtaagggtaaaaatgagcatgcaggtccacctgtgttcttactctgggtatctagaagagtcctcagctctccctactccacgctgcctagacatacacagctgcagggtctggctgaacaatcaaggggccgccagagaaaggccatctacggtgcgcagtgtatctggagttgctgggcccaagatagctctgtggagttatcactagagatgcctctggattaactaagaggtgtgcctgggtgtgggtgaggagtcagaacctttgagagctttgagatgacagtttctatggggcgggaagaaggaggtgcatttctacaaacacttccctgaaatccttgggaaaaacagaggcatggccgtggccaactctgtgggaactggcgcctctgtccttgttggcactgttctcagtccgatgacttgcattgtgttttctccaatttttgctgggattttaatgttcagcatggtgggaggaacccttgattccttttgtttgagtatagaaagtaaatttttgaggtcatgatgtgaacggccatgttattgtgattatcttcagctcaggataggctgagatgctttgtggagtgttccatgaagcccgagtcggaatctctgactgtcgtgtacagccataaggagactggtttgaattactgtggcgagacagggcgtgcctgtcagaaatctgagatgtttgtacgctctgagatgttgaacctttctggtgggcagcaccgacacccaggggtggacccccgaggatgaatgcctctaggcctccgcaacatattcaagaatgaatgggagacgctagagtaaaatgggggcagagaggatatcagggagcaagatgcaaactgtgtgcatccactctcgtaaacaagtagctggtcacaaccagaaaggttcatctctcctaagcaaacagcgactctttcagaggaagtttccctctttcaatcgtggccttattttcaactccggtgccttctcgtgatgttaatcatttccttttttccccacactaagctctcttttctatctttctctctctttccaatcttacgccatggccatcagttcatttcagccttccagtgctacacccacttcttggctgacacacttctgctctaaggtgactggttttcttgccaattttcaaagagtggtactaacccccaacccgctttccgcaccccgtcctctccgccagcagtactggttgcactaactgtgagtgtcttgcatactgatggactcatttggtggcatggttggctaacagcatggcggggggtgttcagcttgagacccatgcctgtgttcatttcccatggagctggcagcctggtctaccccaagtgcatgccccgcctctcctctctcccttgggtctgcctgcgtgcatgcttctccagttgcgtctgcgaagctacctactttcttgggagggtcgaccttgatcatgaaacaataccatgagggggcctctgtcacctttgaaaagaacactttttgagcagcctcaaaaagctcatacataccagcgccttcttaaattggctctaatgtaaagattgttaatgtcatttatcaaaaccataggtgattatttggagggatttaaaaaacttaattactctcaggcctcatcccaagcttgacacatgctctgtaggttgaacacataatcacaaatattctagcaaatgctgccttggttgcagcctgcactgtagacccaagggttttgctgtggctcttcttatctcccttggctcataaagccccagatgatgccagagcttcaattagagccatcatcatcccaggcagggatatctttgagaaatgactcagttcagccccaggcccctgtgactctgcttaaagcacacatttctgctgactcttgtacctggggcagcaggataatcaccaacacactcttaacgagaaacaacacaccaagcacagtggagctgtcctaggcaacactcgcggtctcaggctgcggtgggcgtctgtcctgcatgtggcccagaccaccctgacccccgggcctgcctgcctggccctgcatgctgcacgctcactgtatttgtgcagatcctggccagtacaaagtcgttgctcttgtcttatcttctcttacagagtctccctccctttatagaatgtcaaccaaagagtgccctcctcccctctcagcctcctctttagctagcctccccatctcatcacaacgcatgtctgtgacctttggtaatcatttacagtgccacacggaaccctgtattttgcacacagcaaaacaaacaatgtttagctttatttatggtatttgatgctgtaaatggaaataaatattgttctttataaagcaaaaaaagta

SEQ ID NO: 435036 - DNA, 5665 bp, Homo sapiens
aggttcaagcaattctcctgcctcagtctcctgagtagctgggattacaggtgcccaccaccacacccggctaatttttgtatttttagtagagatagagttttgccatgttggccagcctggtctcgaactgagctcaagtgatctgcccgcctctgcctcccaaactgctgggattatagcaactttgactctttgaatgaagatgatgctgtggagaacaaccagctcgcatttgatgtggccgagcgagagtttgggatccctccagtgaccacgggcaaagagatggcatctgcccaggagcctgacaagctcagcatggtcatgtacctctccaagttctacgagctcttccggggcaccccactgaggcccgtggattcttggcgcaaaaactatggagaaaatgctgacctcagcttggccaaatcatccatttctaataactatctcaacctcacatttccaaggaagaggactccacgggtggatggtcaaaccggagagaatgacatgaacaaacggagacggaagggcttcaccaacctggacgagccttcaaacttttccagccgtagcttgggctccaatcaagagtgtgggagcagtaaggaaggtggaaatcagaacaaagtcaagtccatggcgaatcagctgctggccaagtttgaggagagcactcggaacccctcactcatgaagcaggaacgccgtgtctcagggataggtaagccggtcctgtgctcttcctccggccctcctgttcactcttgctgccccaagccggaggaggccacacccagcccatcacctcctctgaaaaggcagttcccctctgtggtcgtgacggggcacgtgctcagagagctcaagcaagtgtctgctggcagtgagtgcctgagcagaccttggagagccagagccaagtctgacctacagctgggtgggacagaaaatttcgctaccctgccttctacccgcccgagggcgcaggctctttccggggtgctgtggcggctgcagcaagtggaggaaaagattctccagaagagggctcagaacttggccaacagggaatttcacacaaagaacattaaggagaaggcggctcaccttgcctccatgtttggacacggggatttcccgcagaataaactactctctaaaggcctgtctcatactcatcctccatctcctccctctcgccttccgtctcctgatccagctgcttcttcctctccatcaactgttgactctgcttctcctgccagaaagctgacggtagggaaagtgtccagcggaataggggctgcagctgaagtcctggtcaatctgtacatgaatgatcacagacctaaggcccaggccacctctccagacctggaatctatgcgaaagtcatttccccttaacctgggaggcagcgacacgtgttacttctgtaagaaacgtgtgtacgtgatggaacggctgagcgccgagggccacttcttccaccgggagtgtttccgctgcagcatctgtgccaccaccttgcgcctggccgcctacacctttgactgcgatgaaggcaaattttactgcaagcctcacttcattcactgtaaaaccaatagcaaacaacggaagagacgggcagagttgaagcaacaaagagaggaggaggcaacatggcaagagcaggaagcccctcggagagacactcccaccgaaagttcttgcgcagtggccgccattggcaccctggaaggcagccccccaggtatctccacctccttctttaggaaggtgctgggctggcccctcaggctgccgagggacctgtgtaactggatgcagggactcctgcaagctgctggcctccatatcagggacaatgcttacaactactgctacatgtacgagctcctgagcctggggctgccactcctctgggcgttctctgaggtcctggcagccatgtacagggaatctgagggctccctcgagagcatctgcaactgggtgctcaggtgcttcccagtcaagctccgctgacatggctggctgccccaaagtgccttcacatttccagggaggcttcagatggcagtgcgtttgcagtttgctcaggctctggccaggaagcctagcattctctaagcaattagctcaaagccaaagaatttcacatgggccacctccgcctggccttatcagggtgaacatctactcacggtgctagggccagggatgatatgaaggatcttttctatagctttgtgagccatacttctgggtttacatttcaatttttttaattttaattagcccagagaaagcatttttttctatgagtgtcaatttttctaaacatgggtttgaagcttataaccagttttataaaccccttgaacactgcagtgagttatcaaagccactgcctgcaaagtggatgatttaagattttacacgcatgaaaatgagtgtgccatctcctgaccagtgccttttgacttaggtacccagatgccacttgtcagcagcaggatactttttacaacacgaaagcataattattttagaagaagagagtagaagggcagaatagaattcaacttacagaagcacggagtagtgtgtggttggctgttatctgtccccctgggaggaggactgttttgctcccttgttttgatgttaaacagtagcttaaaggctttcccccccataccaactcacagccaaatgacaaagaaccgtggggtttcaacagattctacaaacatgcattttcccttcccactaatgggcactgcagggaaagcccattggcatttgaccatggagctgatgcagtgccaaagatgagctctttcaactgatggcattttagcccctgtggctcccagcggatcccccagcccgggctgcaggctgagccaaggctgtgcagggtccatattggtcaggccaagtggagtggaagactctgtccacttatgtggtgtcctttgggactgagggggtttgttagcacatcaggctattgctgggaagcgtggcctgcccagtgagcattgcctgtggacatcctgactgcttagctgctccgctgccacacatatgtggtcaaaacagaaaccaatttcacactgccctgggaaaggaatgggtctgacctccaggggaagctctaccatatcttgactggcagggaaggctgggagtggaagctatttatggactgatccaaaggacatatgcatgagtaagggtaaaaatgagcatgcaggtccacctgtgttcttactctgggtatctagaagagtcctcagctctccctactccacgctgcctagacatacacagctgcagggtctggctgaacaatcaaggggccgccagagaaaggccatctacggtgcgcagtgtatctggagttgctgggcccaagatagctctgtggagttatcactagagatgcctctggattaactaagaggtgtgcctgggtgtgggtgaggagtcagaacctttgagagctttgagatgacagtttctatggggcgggaagaaggaggtgcatttctacaaacacttccctgaaatccttgggaaaaacagaggcatggccgtggccaactctgtgggaactggcgcctctgtccttgttggcactgttctcagtccgatgacttgcattgtgttttctccaatttttgctgggattttaatgttcagcatggtgggaggaacccttgattccttttgtttgagtatagaaagtaaatttttgaggtcatgatgtgaacggccatgttattgtgattatcttcagctcaggataggctgagatgctttgtggagtgttccatgaagcccgagtcggaatctctgactgtcgtgtacagccataaggagactggtttgaattactgtggcgagacagggcgtgcctgtcagaaatctgagatgtttgtacgctctgagatgttgaacctttctggtgggcagcaccgacacccaggggtggacccccgaggatgaatgcctctaggcctccgcaacatattcaagaatgaatgggagacgctagagtaaaatgggggcagagaggatatcagggagcaagatgcaaactgtgtgcatccactctcgtaaacaagtagctggtcacaaccagaaaggttcatctctcctaagcaaacagcgactctttcagaggaagtttccctctttcaatcgtggccttattttcaactccggtgccttctcgtgatgttaatcatttccttttttccccacactaagctctcttttctatctttctctctctttccaatcttacgccatggccatcagttcatttcagccttccagtgctacacccacttcttggctgacacacttctgctctaaggtgactggttttcttgccaattttcaaagagtggtactaacccccaacccgctttccgcaccccgtcctctccgccagcagtactggttgcactaactgtgagtgtcttgcatactgatggactcatttggtggcatggttggctaacagcatggcggggggtgttcagcttgagacccatgcctgtgttcatttcccatggagctggcagcctggtctaccccaagtgcatgccccgcctctcctctctcccttgggtctgcctgcgtgcatgcttctccagttgcgtctgcgaagctacctactttcttgggagggtcgaccttgatcatgaaacaataccatgagggggcctctgtcacctttgaaaagaacactttttgagcagcctcaaaaagctcatacataccagcgccttcttaaattggctctaatgtaaagattgttaatgtcatttatcaaaaccataggtgattatttggagggatttaaaaaacttaattactctcaggcctcatcccaagcttgacacatgctctgtaggttgaacacataatcacaaatattctagcaaatgctgccttggttgcagcctgcactgtagacccaagggttttgctgtggctcttcttatctcccttggctcataaagccccagatgatgccagagcttcaattagagccatcatcatcccaggcagggatatctttgagaaatgactcagttcagccccaggcccctgtgactctgcttaaagcacacatttctgctgactcttgtacctggggcagcaggataatcaccaacacactcttaacgagaaacaacacaccaagcacagtggagctgtcctaggcaacactcgcggtctcaggctgcggtgggcgtctgtcctgcatgtggcccagaccaccctgacccccgggcctgcctgcctggccctgcatgctgcacgctcactgtatttgtgcagatcctggccagtacaaagtcgttgctcttgtcttatcttctcttacagagtctccctccctttatagaatgtcaaccaaagagtgccctcctcccctctcagcctcctctttagctagcctccccatctcatcacaacgcatgtctgtgacctttggtaatcatttacagtgccacacggaaccctgtattttgcacacagcaaaacaaacaatgtttagctttatttatggtatttgatgctgtaaatggaaataaatattgttctttataaagcaaaaaaagta

SEQ ID NO: 435037 - DNA, 5177 bp, Homo sapiens
tccccaagtctgctttctgatatccagattccaggatccaaccatcagtgtcccgtttcaacctttgcagccttcaaacttttccagccgtagcttgggctccaatcaagagtgtgggagcagtaaggaaggtggaaatcagaacaaagtcaagtccatggcgaatcagctgctggccaagtttgaggagagcactcggaacccctcactcatgaagcaggaacgccgtgtctcagggataggtaagccggtcctgtgctcttcctccggccctcctgttcactcttgctgccccaagccggaggaggccacacccagcccatcacctcctctgaaaaggcagttcccctctgtggtcgtgacggggcacgtgctcagagagctcaagcaagtgtctgctggcagtgagtgcctgagcagaccttggagagccagagccaagtctgacctacagctgggtgggacagaaaatttcgctaccctgccttctacccgcccgagggcgcaggctctttccggggtgctgtggcggctgcagcaagtggaggaaaagattctccagaagagggctcagaacttggccaacagggaatttcacacaaagaacattaaggagaaggcggctcaccttgcctccatgtttggacacggggatttcccgcagaataaactactctctaaaggcctgtctcatactcatcctccatctcctccctctcgccttccgtctcctgatccagctgcttcttcctctccatcaactgttgactctgcttctcctgccagaaagctgacggtagggaaagtgtccagcggaataggggctgcagctgaagtcctggtcaatctgtacatgaatgatcacagacctaaggcccaggccacctctccagacctggaatctatgcgaaagtcatttccccttaacctgggaggcagcgacacgtgttacttctgtaagaaacgtgtgtacgtgatggaacggctgagcgccgagggccacttcttccaccgggagtgtttccgctgcagcatctgtgccaccaccttgcgcctggccgcctacacctttgactgcgatgaaggcaaattttactgcaagcctcacttcattcactgtaaaaccaatagcaaacaacggaagagacgggcagagttgaagcaacaaagagaggaggaggcaacatggcaagagcaggaagcccctcggagagacactcccaccgaaagttcttgcgcagtggccgccattggcaccctggaaggcagccccccaggtatctccacctccttctttaggaaggtgctgggctggcccctcaggctgccgagggacctgtgtaactggatgcagggactcctgcaagctgctggcctccatatcagggacaatgcttacaactactgctacatgtacgagctcctgagcctggggctgccactcctctgggcgttctctgaggtcctggcagccatgtacagggaatctgagggctccctcgagagcatctgcaactgggtgctcaggtgcttcccagtcaagctccgctgacatggctggctgccccaaagtgccttcacatttccagggaggcttcagatggcagtgcgtttgcagtttgctcaggctctggccaggaagcctagcattctctaagcaattagctcaaagccaaagaatttcacatgggccacctccgcctggccttatcagggtgaacatctactcacggtgctagggccagggatgatatgaaggatcttttctatagctttgtgagccatacttctgggtttacatttcaatttttttaattttaattagcccagagaaagcatttttttctatgagtgtcaatttttctaaacatgggtttgaagcttataaccagttttataaaccccttgaacactgcagtgagttatcaaagccactgcctgcaaagtggatgatttaagattttacacgcatgaaaatgagtgtgccatctcctgaccagtgccttttgacttaggtacccagatgccacttgtcagcagcaggatactttttacaacacgaaagcataattattttagaagaagagagtagaagggcagaatagaattcaacttacagaagcacggagtagtgtgtggttggctgttatctgtccccctgggaggaggactgttttgctcccttgttttgatgttaaacagtagcttaaaggctttcccccccataccaactcacagccaaatgacaaagaaccgtggggtttcaacagattctacaaacatgcattttcccttcccactaatgggcactgcagggaaagcccattggcatttgaccatggagctgatgcagtgccaaagatgagctctttcaactgatggcattttagcccctgtggctcccagcggatcccccagcccgggctgcaggctgagccaaggctgtgcagggtccatattggtcaggccaagtggagtggaagactctgtccacttatgtggtgtcctttgggactgagggggtttgttagcacatcaggctattgctgggaagcgtggcctgcccagtgagcattgcctgtggacatcctgactgcttagctgctccgctgccacacatatgtggtcaaaacagaaaccaatttcacactgccctgggaaaggaatgggtctgacctccaggggaagctctaccatatcttgactggcagggaaggctgggagtggaagctatttatggactgatccaaaggacatatgcatgagtaagggtaaaaatgagcatgcaggtccacctgtgttcttactctgggtatctagaagagtcctcagctctccctactccacgctgcctagacatacacagctgcagggtctggctgaacaatcaaggggccgccagagaaaggccatctacggtgcgcagtgtatctggagttgctgggcccaagatagctctgtggagttatcactagagatgcctctggattaactaagaggtgtgcctgggtgtgggtgaggagtcagaacctttgagagctttgagatgacagtttctatggggcgggaagaaggaggtgcatttctacaaacacttccctgaaatccttgggaaaaacagaggcatggccgtggccaactctgtgggaactggcgcctctgtccttgttggcactgttctcagtccgatgacttgcattgtgttttctccaatttttgctgggattttaatgttcagcatggtgggaggaacccttgattccttttgtttgagtatagaaagtaaatttttgaggtcatgatgtgaacggccatgttattgtgattatcttcagctcaggataggctgagatgctttgtggagtgttccatgaagcccgagtcggaatctctgactgtcgtgtacagccataaggagactggtttgaattactgtggcgagacagggcgtgcctgtcagaaatctgagatgtttgtacgctctgagatgttgaacctttctggtgggcagcaccgacacccaggggtggacccccgaggatgaatgcctctaggcctccgcaacatattcaagaatgaatgggagacgctagagtaaaatgggggcagagaggatatcagggagcaagatgcaaactgtgtgcatccactctcgtaaacaagtagctggtcacaaccagaaaggttcatctctcctaagcaaacagcgactctttcagaggaagtttccctctttcaatcgtggccttattttcaactccggtgccttctcgtgatgttaatcatttccttttttccccacactaagctctcttttctatctttctctctctttccaatcttacgccatggccatcagttcatttcagccttccagtgctacacccacttcttggctgacacacttctgctctaaggtgactggttttcttgccaattttcaaagagtggtactaacccccaacccgctttccgcaccccgtcctctccgccagcagtactggttgcactaactgtgagtgtcttgcatactgatggactcatttggtggcatggttggctaacagcatggcggggggtgttcagcttgagacccatgcctgtgttcatttcccatggagctggcagcctggtctaccccaagtgcatgccccgcctctcctctctcccttgggtctgcctgcgtgcatgcttctccagttgcgtctgcgaagctacctactttcttgggagggtcgaccttgatcatgaaacaataccatgagggggcctctgtcacctttgaaaagaacactttttgagcagcctcaaaaagctcatacataccagcgccttcttaaattggctctaatgtaaagattgttaatgtcatttatcaaaaccataggtgattatttggagggatttaaaaaacttaattactctcaggcctcatcccaagcttgacacatgctctgtaggttgaacacataatcacaaatattctagcaaatgctgccttggttgcagcctgcactgtagacccaagggttttgctgtggctcttcttatctcccttggctcataaagccccagatgatgccagagcttcaattagagccatcatcatcccaggcagggatatctttgagaaatgactcagttcagccccaggcccctgtgactctgcttaaagcacacatttctgctgactcttgtacctggggcagcaggataatcaccaacacactcttaacgagaaacaacacaccaagcacagtggagctgtcctaggcaacactcgcggtctcaggctgcggtgggcgtctgtcctgcatgtggcccagaccaccctgacccccgggcctgcctgcctggccctgcatgctgcacgctcactgtatttgtgcagatcctggccagtacaaagtcgttgctcttgtcttatcttctcttacagagtctccctccctttatagaatgtcaaccaaagagtgccctcctcccctctcagcctcctctttagctagcctccccatctcatcacaacgcatgtctgtgacctttggtaatcatttacagtgccacacggaaccctgtattttgcacacagcaaaacaaacaatgtttagctttatttatggtatttgatgctgtaaatggaaataaatattgttctttataaagcaaaaaaagta

SEQ ID NO: 435038 - DNA, 4626 bp, Homo sapiens
aacctataaagtggagaggacagcaactactcttgagggtaactggaatactgcaatgtcctaacctatgcaaaatgcctgaagtatcctgtaaagcttctctttccccagtggaagagaattcggaaagaaagcttatttacctaaaatgcatgttgatccctctctttctaaaggaaaagaagtcaccttcagggttccattttcatcccagccatttgagaacagtgcatcctcagctgacggtagggaaagtgtccagcggaataggggctgcagctgaagtcctggtcaatctgtacatgaatgatcacagacctaaggcccaggccacctctccagacctggaatctatgcgaaagtcatttccccttaacctgggaggcagcgacacgtgttacttctgtaagaaacgtgtgtacgtgatggaacggctgagcgccgagggccacttcttccaccgggagtgtttccgctgcagcatctgtgccaccaccttgcgcctggccgcctacacctttgactgcgatgaaggcaaattttactgcaagcctcacttcattcactgtaaaaccaatagcaaacaacggaagagacgggcagagttgaagcaacaaagagaggaggaggcaacatggcaagagcaggaagcccctcggagagacactcccaccgaaagttcttgcgcagtggccgccattggcaccctggaaggcagccccccaggtatctccacctccttctttaggaaggtgctgggctggcccctcaggctgccgagggacctgtgtaactggatgcagggactcctgcaagctgctggcctccatatcagggacaatgcttacaactactgctacatgtacgagctcctgagcctggggctgccactcctctgggcgttctctgaggtcctggcagccatgtacagggaatctgagggctccctcgagagcatctgcaactgggtgctcaggtgcttcccagtcaagctccgctgacatggctggctgccccaaagtgccttcacatttccagggaggcttcagatggcagtgcgtttgcagtttgctcaggctctggccaggaagcctagcattctctaagcaattagctcaaagccaaagaatttcacatgggccacctccgcctggccttatcagggtgaacatctactcacggtgctagggccagggatgatatgaaggatcttttctatagctttgtgagccatacttctgggtttacatttcaatttttttaattttaattagcccagagaaagcatttttttctatgagtgtcaatttttctaaacatgggtttgaagcttataaccagttttataaaccccttgaacactgcagtgagttatcaaagccactgcctgcaaagtggatgatttaagattttacacgcatgaaaatgagtgtgccatctcctgaccagtgccttttgacttaggtacccagatgccacttgtcagcagcaggatactttttacaacacgaaagcataattattttagaagaagagagtagaagggcagaatagaattcaacttacagaagcacggagtagtgtgtggttggctgttatctgtccccctgggaggaggactgttttgctcccttgttttgatgttaaacagtagcttaaaggctttcccccccataccaactcacagccaaatgacaaagaaccgtggggtttcaacagattctacaaacatgcattttcccttcccactaatgggcactgcagggaaagcccattggcatttgaccatggagctgatgcagtgccaaagatgagctctttcaactgatggcattttagcccctgtggctcccagcggatcccccagcccgggctgcaggctgagccaaggctgtgcagggtccatattggtcaggccaagtggagtggaagactctgtccacttatgtggtgtcctttgggactgagggggtttgttagcacatcaggctattgctgggaagcgtggcctgcccagtgagcattgcctgtggacatcctgactgcttagctgctccgctgccacacatatgtggtcaaaacagaaaccaatttcacactgccctgggaaaggaatgggtctgacctccaggggaagctctaccatatcttgactggcagggaaggctgggagtggaagctatttatggactgatccaaaggacatatgcatgagtaagggtaaaaatgagcatgcaggtccacctgtgttcttactctgggtatctagaagagtcctcagctctccctactccacgctgcctagacatacacagctgcagggtctggctgaacaatcaaggggccgccagagaaaggccatctacggtgcgcagtgtatctggagttgctgggcccaagatagctctgtggagttatcactagagatgcctctggattaactaagaggtgtgcctgggtgtgggtgaggagtcagaacctttgagagctttgagatgacagtttctatggggcgggaagaaggaggtgcatttctacaaacacttccctgaaatccttgggaaaaacagaggcatggccgtggccaactctgtgggaactggcgcctctgtccttgttggcactgttctcagtccgatgacttgcattgtgttttctccaatttttgctgggattttaatgttcagcatggtgggaggaacccttgattccttttgtttgagtatagaaagtaaatttttgaggtcatgatgtgaacggccatgttattgtgattatcttcagctcaggataggctgagatgctttgtggagtgttccatgaagcccgagtcggaatctctgactgtcgtgtacagccataaggagactggtttgaattactgtggcgagacagggcgtgcctgtcagaaatctgagatgtttgtacgctctgagatgttgaacctttctggtgggcagcaccgacacccaggggtggacccccgaggatgaatgcctctaggcctccgcaacatattcaagaatgaatgggagacgctagagtaaaatgggggcagagaggatatcagggagcaagatgcaaactgtgtgcatccactctcgtaaacaagtagctggtcacaaccagaaaggttcatctctcctaagcaaacagcgactctttcagaggaagtttccctctttcaatcgtggccttattttcaactccggtgccttctcgtgatgttaatcatttccttttttccccacactaagctctcttttctatctttctctctctttccaatcttacgccatggccatcagttcatttcagccttccagtgctacacccacttcttggctgacacacttctgctctaaggtgactggttttcttgccaattttcaaagagtggtactaacccccaacccgctttccgcaccccgtcctctccgccagcagtactggttgcactaactgtgagtgtcttgcatactgatggactcatttggtggcatggttggctaacagcatggcggggggtgttcagcttgagacccatgcctgtgttcatttcccatggagctggcagcctggtctaccccaagtgcatgccccgcctctcctctctcccttgggtctgcctgcgtgcatgcttctccagttgcgtctgcgaagctacctactttcttgggagggtcgaccttgatcatgaaacaataccatgagggggcctctgtcacctttgaaaagaacactttttgagcagcctcaaaaagctcatacataccagcgccttcttaaattggctctaatgtaaagattgttaatgtcatttatcaaaaccataggtgattatttggagggatttaaaaaacttaattactctcaggcctcatcccaagcttgacacatgctctgtaggttgaacacataatcacaaatattctagcaaatgctgccttggttgcagcctgcactgtagacccaagggttttgctgtggctcttcttatctcccttggctcataaagccccagatgatgccagagcttcaattagagccatcatcatcccaggcagggatatctttgagaaatgactcagttcagccccaggcccctgtgactctgcttaaagcacacatttctgctgactcttgtacctggggcagcaggataatcaccaacacactcttaacgagaaacaacacaccaagcacagtggagctgtcctaggcaacactcgcggtctcaggctgcggtgggcgtctgtcctgcatgtggcccagaccaccctgacccccgggcctgcctgcctggccctgcatgctgcacgctcactgtatttgtgcagatcctggccagtacaaagtcgttgctcttgtcttatcttctcttacagagtctccctccctttatagaatgtcaaccaaagagtgccctcctcccctctcagcctcctctttagctagcctccccatctcatcacaacgcatgtctgtgacctttggtaatcatttacagtgccacacggaaccctgtattttgcacacagcaaaacaaacaatgtttagctttatttatggtatttgatgctgtaaatggaaataaatattgttctttataaagcaaaaaaagta

SEQ ID NO: 435039 - DNA, 6212 bp, Homo sapiens
aggcgctcggctggctaagcctgcgccgggccgcctcgctcgctcccagctctgtcagtggcccgcggggcccgatcgctgcgcccgcggccagggccgaggcaggcctgacccggggccgggcagcccgcgcgactttcggaacatggcaacccgtgtgtgtctcatcccagaaagagaagactttaaccactgtgatgcctgagaatccagtgtgacgtttctccagatacttcatgctgttcacctgtgtcctcgccgcaccactgccgcacacgactcctgaaccatgggggaaaacgaggatgagaagcaggcccaggcggggcaggtttttgagaactttgtccaggcatccacgtgcaaaggtaccctccaggccttcaacattctcacacgacacctggacctagaccctctggaccacagaaacttttattccaagctcaagtccaaggtgaccacctggaaagccaaagccctgtggtacaaattggataagcgtggttcccacaaagagtataagcgagggaagtcgtgcacgaacaccaagtgtctcatagttgggggaggaccctgtggcttgcgcactgccattgaacttgcctacctgggagccaaagtggtcgtggtggagaagagggactccttctcccggaacaacgtgctacacctctggcctttcaccatccatgaccttcgtggcctgggagccaagaagttctatgggaagttctgtgctggctccatcgaccatatcagtattcgccaactacagctcatcctattcaaggtggccctgatgctgggagttgaaatccatgtgaatgtggagttcgtgaaggttctagagcctcctgaagatcaagaaaatcaaaaaattggctggcgggcagaatttctccctacagaccattctctgtcggagtttgagtttgacgtcatcattggtgccgatggccgcaggaacaccctggaagggttcagaagaaaagaattccgtgggaagctggcgattgccatcaccgccaacttcataaacagaaacagcacagcggaagccaaggtggaagagattagtggtgtggctttcatcttcaatcagaaattttttcaggaccttaaagaagaaacaggcatagatcttgagaacattgtttactacaaggactgcacccactattttgtaatgacagccaagaagcagagcctgctcgacaaaggtgtcatcattaacgactacatcgacacagagatgctgctgtgtgcggagaacgtgaaccaagacaacctgctatcctatgcccgggaagctgcagactttgccaccaactaccagctgccatccttagactttgccatgaaccactatgggcagcctgatgtggccatgtttgactttacctgcatgtatgcctcagagaacgcggccctggtgcgggagcggcaggcgcaccagctgctcgtggcccttgtgggtgacagcttgcttgagccattttggcccatgggtacaggctgtgcccgtggcttcctggcagcctttgacacggcatggatggtgaagagctggaaccagggcacccctcccctggagctgctggctgaaagggaaagtctctaccggctgttacctcagacaaccccggagaacatcaacaagaactttgagcagtacacgttggacccagggacacggtacccaaacctcaactcacactgtgtcaggccccatcaggtgaagcatttgtatatcactaaggagctggagcactaccctctcgagagactgggctcggtgaggagatctgtcaacctctccaggaaggagtcagatatccggcccagcaagctcctgacctggtgccagcagcagacagagggctaccagcatgtcaacgtcaccgacctgaccacatcctggcgcagtgggttggccctgtgtgccatcatccaccgcttccggcctgagctcatcaactttgactctttgaatgaagatgatgctgtggagaacaaccagctcgcatttgatgtggccgagcgagagtttgggatccctccagtgaccacgggcaaagagatggcatctgcccaggagcctgacaagctcagcatggtcatgtacctctccaagttctacgagctcttccggggcaccccactgaggcccgtggattcttggcgcaaaaactatggagaaaatgctgacctcagcttggccaaatcatccatttctaataactatctcaacctcacatttccaaggaagaggactccacgggtggatggtcaaaccggagagaatgacatgaacaaacggagacggaagggcttcaccaacctggacgagccttcaaacttttccagccgtagcttgggctccaatcaagagtgtgggagcagtaaggaaggtggaaatcagaacaaagtcaagtccatggcgaatcagctgctggccaagtttgaggagagcactcggaacccctcactcatgaagcaggaacgccgtgtctcagggataggtaagccggtcctgtgctcttcctccggccctcctgttcactcttgctgccccaagccggaggaggccacacccagcccatcacctcctctgaaaaggcagttcccctctgtggtcgtgacggggcacgtgctcagagagctcaagcaagtgtctgctggcagtgagtgcctgagcagaccttggagagccagagccaagtctgacctacagctgggtgggacagaaaatttcgctaccctgccttctacccgcccgagggcgcaggctctttccggggtgctgtggcggctgcagcaagtggaggaaaagattctccagaagagggctcagaacttggccaacagggaatttcacacaaagaacattaaggagaaggcggctcaccttgcctccatgtttggacacggggatttcccgcagaataaactactctctaaaggcctgtctcatactcatcctccatctcctccctctcgccttccgtctcctgatccagctgcttcttcctctccatcaactgttgactctgcttctcctgccagaaagctgacggtagggaaagtgtccagcggaataggggctgcagctgaagtcctggtcaatctgtacatgaatgatcacagacctaaggcccaggccacctctccagacctggaatctatgcgaaagtcatttccccttaacctgggaggcagcgacacgtgttacttctgtaagaaacgtgtgtacgtgatggaacggctgagcgccgagggccacttcttccaccgggagtgtttccgctgcagcatctgtgccaccaccttgcgcctggccgcctacacctttgactgcgatgaaggcaaattttactgcaagcctcacttcattcactgtaaaaccaatagcaaacaacggaagagacgggcagagttgaagcaacaaagagaggaggaggcaacatggcaagagcaggaagcccctcggagagacactcccaccgaaagttcttgcgcagtggccgccattggcaccctggaaggcagccccccaggtatctccacctccttctttaggaaggtgctgggctggcccctcaggctgccgagggacctgtgtaactggatgcagggactcctgcaagctgctggcctccatatcagggacaatgcttacaactactgctacatgtacgagctcctgagcctggggctgccactcctctgggcgttctctgaggtcctggcagccatgtacagggaatctgagggctccctcgagagcatctgcaactgggtgctcaggtgcttcccagtcaagctccgctgacatggctggctgccccaaagtgccttcacatttccagggaggcttcagatggcagtgcgtttgcagtttgctcaggctctggccaggaagcctagcattctctaagcaattagctcaaagccaaagaatttcacatgggccacctccgcctggccttatcagggtgaacatctactcacggtgctagggccagggatgatatgaaggatcttttctatagctttgtgagccatacttctgggtttacatttcaatttttttaattttaattagcccagagaaagcatttttttctatgagtgtcaatttttctaaacatgggtttgaagcttataaccagttttataaaccccttgaacactgcagtgagttatcaaagccactgcctgcaaagtggatgatttaagattttacacgcatgaaaatgagtgtgccatctcctgaccagtgccttttgacttaggtacccagatgccacttgtcagcagcaggatactttttacaacacgaaagcataattattttagaagaagagagtagaagggcagaatagaattcaacttacagaagcacggagtagtgtgtggttggctgttatctgtccccctgggaggaggactgttttgctcccttgttttgatgttaaacagtagcttaaaggctttcccccccataccaactcacagccaaatgacaaagaaccgtggggtttcaacagattctacaaacatgcattttcccttcccactaatgggcactgcagggaaagcccattggcatttgaccatggagctgatgcagtgccaaagatgagctctttcaactgatggcattttagcccctgtggctcccagcggatcccccagcccgggctgcaggctgagccaaggctgtgcagggtccatattggtcaggccaagtggagtggaagactctgtccacttatgtggtgtcctttgggactgagggggtttgttagcacatcaggctattgctgggaagcgtggcctgcccagtgagcattgcctgtggacatcctgactgcttagctgctccgctgccacacatatgtggtcaaaacagaaaccaatttcacactgccctgggaaaggaatgggtctgacctccaggggaagctctaccatatcttgactggcagggaaggctgggagtggaagctatttatggactgatccaaaggacatatgcatgagtaagggtaaaaatgagcatgcaggtccacctgtgttcttactctgggtatctagaagagtcctcagctctccctactccacgctgcctgtgttcatttcccatggagctggcagcctggtctaccccaagtgcatgccccgcctctcctctctcccttgggtctgcctgcgtgcatgcttctccagttgcgtctgcgaagctacctactttcttgggagggtcgaccttgatcatgaaacaataccatgagggggcctctgtcacctttgaaaagaacactttttgagcagcctcaaaaagctcatacataccagcgccttcttaaattggctctaatgtaaagattgttaatgtcatttatcaaaaccataggtgattatttggagggatttaaaaaacttaattactctcaggcctcatcccaagcttgacacatgctctgtaggttgaacacataatcacaaatattctagcaaatgctgccttggttgcagcctgcactgtagacccaagggttttgctgtggctcttcttatctcccttggctcataaagccccagatgatgccagagcttcaattagagccatcatcatcccaggcagggatatctttgagaaatgactcagttcagccccaggcccctgtgactctgcttaaagcacacatttctgctgactcttgtacctggggcagcaggataatcaccaacacactcttaacgagaaacaacacaccaagcacagtggagctgtcctaggcaacactcgcggtctcaggctgcggtgggcgtctgtcctgcatgtggcccagaccaccctgacccccgggcctgcctgcctggccctgcatgctgcacgctcactgtatttgtgcagatcctggccagtacaaagtcgttgctcttgtcttatcttctcttacagagtctccctccctttatagaatgtcaaccaaagagtgccctcctcccctctcagcctcctctttagctagcctccccatctcatcacaacgcatgtctgtgacctttggtaatcatttacagtgccacacggaaccctgtattttgcacacagcaaaacaaacaatgtttagctttatttatggtatttgatgctgtaaatggaaataaatattgttctttataaagcaaaaaaagta

SEQ ID NO: 435040 - DNA, 4878 bp, Homo sapiens
aggcgctcggctggctaagcctgcgccgggccgcctcgctcgctcccagctctgtcagtggcccgcggggcccgatcgctgcgcccgcggccagggccgaggcaggcctgacccggggccgggcagcccgcgcgactttcggaacatggcaacccgtgtgtgtctcatcccagaaagagaagactttaaccactgtgatgcctgagaatccagtgtgacgtttctccagatacttcatgctgttcacctgtgtcctcgccgcaccactgccgcacacgactcctgaaccatgggggaaaacgaggatgagaagcaggcccaggcggggcaggtttttgagaactttgtccaggcatccacgtgcaaaggtaccctccaggccttcaacattctcacacgacacctggacctagaccctctggaccacagaaacttttattccaagctcaagtccaaggtgaccacctggaaagccaaagccctgtggtacaaattggataagcgtggttcccacaaagagtataagcgagggaagtcgtgcacgaacaccaagtgtctcatagttgggggaggaccctgtggcttgcgcactgccattgaacttgcctacctgggagccaaagtggtcgtggtggagaagagggactccttctcccggaacaacgtgctacacctctggcctttcaccatccatgaccttcgtggcctgggagccaagaagttctatgggaagttctgtgctggctccatcgaccatatcagtattcgccaactacagctcatcctattcaaggtggccctgatgctgggagttgaaatccatgtgaatgtggagttcgtgaaggttctagagcctcctgaagatcaagaaaatcaaaaaattggctggcgggcagaatttctccctacagaccattctctgtcggagtttgagtttgacgtcatcattggtgccgatggccgcaggaacaccctggaagggttcagaagaaaagaattccgtgggaagctggcgattgccatcaccgccaacttcataaacagaaacagcacagcggaagccaaggtggaagagattagtggtgtggctttcatcttcaatcagaaattttttcaggaccttaaagaagaaacaggcatagatcttgagaacattgtttactacaaggactgcacccactattttgtaatgacagccaagaagcagagcctgctcgacaaaggtgtcatcattaacgactacatcgacacagagatgctgctgtgtgcggagaacgtgaaccaagacaacctgctatcctatgcccgggaagctgcagactttgccaccaactaccagctgccatccttagactttgccatgaaccactatgggcagcctgatgtggccatgtttgactttacctgcatgtatgcctcagagaacgcggccctggtgcgggagcggcaggcgcaccagctgctcgtggcccttgtgggtgacagcttgcttgagccattttggcccatgggtacaggctgtgcccgtggcttcctggcagcctttgacacggcatggatggtgaagagctggaaccagggcacccctcccctggagctgctggctgaaagggaaagtctctaccggctgttacctcagacaaccccggagaacatcaacaagaactttgagcagtacacgttggacccagggacacggtacccaaacctcaactcacactgtgtcaggccccatcaggtgaagcatttgtatatcactaaggagctggagcactaccctctcgagagactgggctcggtgaggagatctgtcaacctctccaggaaggagtcagatatccggcccagcaagctcctgacctggtgccagcagcagacagagggctaccagcatgtcaacgtcaccgacctgaccacatcctggcgcagtgggttggccctgtgtgccatcatccaccgcttccggcctgagctcatcaactttgactctttgaatgaagatgatgctgtggagaacaaccagctcgcatttgatgtggccgagcgagagtttgggatccctccagtgaccacgggcaaagagatggcatctgcccaggagcctgacaagctcagcatggtcatgtacctctccaagttctacgagctcttccggggcaccccactgaggcccgtggattcttggcgcaaaaactatggagaaaatgctgacctcagcttggccaaatcatccatttctaataactatctcaacctcacatttccaaggaagaggactccacgggtggatggtcaaaccggagagaatgacatgaacaaacggagacggaagggcttcaccaacctggacgagccttcaaacttttccagccgtagcttgggctccaatcaagagtgtgggagcagtaaggaaggtggaaatcagaacaaagtcaagtccatggcgaatcagctgctggccaagtttgaggagagcactcggaacccctcactcatgaagcaggaacgccgtgtctcagggataggtaagccggtcctgtgctcttcctccggccctcctgttcactcttgctgccccaagccggaggaggccacacccagcccatcacctcctctgaaaaggcagttcccctctgtggtcgtgacggggcacgtgctcagagagctcaagcaagtgtctgctggcagtgagtgcctgagcagaccttggagagccagagccaagtctgacctacagctgggtgggacagaaaatttcgctaccctgccttctacccgcccgagggcgcaggctctttccggggtgctgtggcggctgcagcaagtggaggaaaagattctccagaagagggctcagaacttggccaacagggaatttcacacaaagaacattaaggagaaggcggctcaccttgcctccatgtttggacacggggatttcccgcagaataaactactctctaaaggcctgtctcatactcatcctccatctcctccctctcgccttccgtctcctgatccagctgcttcttcctctccatcaactgttgactctgcttctcctgccagaaagctgacggtagggaaagtgtccagcggaataggggctgcagctgaagtcctggtcaatctgtacatgaatgatcacagacctaaggcccaggccacctctccagacctggaatctatgcgaaagtcatttccccttaacctgggaggcagcgacacgtgttacttctgtaagaaacgtgtgtacgtgatggaacggctgagcgccgagggccacttcttccaccgggagtgtttccgctgcagcatctgtgccaccaccttgcgcctggccgcctacacctttgactgcgatgaaggcaaattttactgcaagcctcacttcattcactgtaaaaccaatagcaaacaacggaagagacgggcagagttgaagcaacaaagagaggaggaggcaacatggcaagagcaggaagcccctcggagagacactcccaccgaaagttcttgcgcagtggccgccattggcaccctggaaggcagccccccagttcatttcagccttccagtgctacacccacttcttggctgacacacttctgctctaaggtgactggttttcttgccaattttcaaagagtggtactaacccccaacccgctttccgcaccccgtcctctccgccagcagtactggttgcactaactgtgagtgtcttgcatactgatggactcatttggtggcatggttggctaacagcatggcggggggtgttcagcttgagacccatgcctgtgttcatttcccatggagctggcagcctggtctaccccaagtgcatgccccgcctctcctctctcccttgggtctgcctgcgtgcatgcttctccagttgcgtctgcgaagctacctactttcttgggagggtcgaccttgatcatgaaacaataccatgagggggcctctgtcacctttgaaaagaacactttttgagcagcctcaaaaagctcatacataccagcgccttcttaaattggctctaatgtaaagattgttaatgtcatttatcaaaaccataggtgattatttggagggatttaaaaaacttaattactctcaggcctcatcccaagcttgacacatgctctgtaggttgaacacataatcacaaatattctagcaaatgctgccttggttgcagcctgcactgtagacccaagggttttgctgtggctcttcttatctcccttggctcataaagccccagatgatgccagagcttcaattagagccatcatcatcccaggcagggatatctttgagaaatgactcagttcagccccaggcccctgtgactctgcttaaagcacacatttctgctgactcttgtacctggggcagcaggataatcaccaacacactcttaacgagaaacaacacaccaagcacagtggagctgtcctaggcaacactcgcggtctcaggctgcggtgggcgtctgtcctgcatgtggcccagaccaccctgacccccgggcctgcctgcctggccctgcatgctgcacgctcactgtatttgtgcagatcctggccagtacaaagtcgttgctcttgtcttatcttctcttacagagtctccctccctttatagaatgtcaaccaaagagtgccctcctcccctctcagcctcctctttagctagcctccccatctcatcacaacgcatgtctgtgacctttggtaatcatttacagtgccacacggaaccctgtattttgcacacagcaaaacaaacaatgtttagctttatttatggtatttgatgctgtaaatggaaataaatattgttctttataaagcaaaaaaagta

SEQ ID NO: 435041 - DNA, 6536 bp, Homo sapiens
aggcgctcggctggctaagcctgcgccgggccgcctcgctcgctcccagctctgtcagtggcccgcggggcccgatcgctgcgcccgcggccagggccgaggcaggcctgacccggggccgggcagcccgcgcgactttcggaacatggcaacccgtgtgtgtctcatcccagaaagagaagactttaaccactgtgatgcctgagaatccagtgtgacgtttctccagatacttcatgctgttcacctgtgtcctcgccgcaccactgccgcacacgactcctgaaccatgggggaaaacgaggatgagaagcaggcccaggcggggcaggtttttgagaactttgtccaggcatccacgtgcaaaggtaccctccaggccttcaacattctcacacgacacctggacctagaccctctggaccacagaaacttttattccaagctcaagtccaaggtgaccacctggaaagccaaagccctgtggtacaaattggataagcgtggttcccacaaagagtataagcgagggaagtcgtgcacgaacaccaagtgtctcatagttgggggaggaccctgtggcttgcgcactgccattgaacttgcctacctgggagccaaagtggtcgtggtggagaagagggactccttctcccggaacaacgtgctacacctctggcctttcaccatccatgaccttcgtggcctgggagccaagaagttctatgggaagttctgtgctggctccatcgaccatatcagtattcgccaactacagctcatcctattcaaggtggccctgatgctgggagttgaaatccatgtgaatgtggagttcgtgaaggttctagagcctcctgaagatcaagaaaatcaaaaaattggctggcgggcagaatttctccctacagaccattctctgtcggagtttgagtttgacgtcatcattggtgccgatggccgcaggaacaccctggaagggttcagaagaaaagaattccgtgggaagctggcgattgccatcaccgccaacttcataaacagaaacagcacagcggaagccaaggtggaagagattagtggtgtggctttcatcttcaatcagaaattttttcaggaccttaaagaagaaacaggcatagatcttgagaacattgtttactacaaggactgcacccactattttgtaatgacagccaagaagcagagcctgctcgacaaaggtgtcatcattaacgactacatcgacacagagatgctgctgtgtgcggagaacgtgaaccaagacaacctgctatcctatgcccgggaagctgcagactttgccaccaactaccagctgccatccttagactttgccatgaaccactatgggcagcctgatgtggccatgtttgactttacctgcatgtatgcctcagagaacgcggccctggtgcgggagcggcaggcgcaccagctgctcgtggcccttgtgggtgacagcttgcttgagccattttggcccatgggtacaggctgtgcccgtggcttcctggcagcctttgacacggcatggatggtgaagagctggaaccagggcacccctcccctggagctgctggctgaaagggaaagtctctaccggctgttacctcagacaaccccggagaacatcaacaagaactttgagcagtacacgttggacccagggacacggtacccaaacctcaactcacactgtgtcaggccccatcaggtgaagcatttgtatatcactaaggagctggagcactaccctctcgagagactgggctcggtgaggagatctgtcaacctctccaggaaggagtcagatatccggcccagcaagctcctgacctggtgccagcagcagacagagggctaccagcatgtcaacgtcaccgacctgaccacatcctggcgcagtgggttggccctgtgtgccatcatccaccgcttccggcctgagctcatcaactttgactctttgaatgaagatgatgctgtggagaacaaccagctcgcatttgatgtggccgagcgagagtttgggatccctccagtgaccacgggcaaagagatggcatctgcccaggagcctgacaagctcagcatggtcatgtacctctccaagttctacgagctcttccggggcaccccactgaggcccgtggattcttggcgcaaaaactatggagaaaatgctgacctcagcttggccaaatcatccatttctaataactatctcaacctcacatttccaaggaagaggactccacgggtggatggtcaaaccggagagaatgacatgaacaaacggagacggaagggcttcaccaacctggacgagccttcaaacttttccagccgtagcttgggctccaatcaagagtgtgggagcagtaaggaaggtggaaatcagaacaaagtcaagtccatggcgaatcagctgctggccaagtttgaggagagcactcggaacccctcactcatgaagcaggaacgccgtgtctcagggataggtaagccggtcctgtgctcttcctccggccctcctgttcactcttgctgccccaagccggaggaggccacacccagcccatcacctcctctgaaaaggcagttcccctctgtggtcgtgacggggcacgtgctcagagagctcaagcaagtgtctgctggcagtgagtgcctgagcagaccttggagagccagagccaagtctgacctacagctgggtgggacagaaaatttcgctaccctgccttctacccgcccgagggcgcaggctctttccggggtgctgtggcggctgcagcaagtggaggaaaagattctccagaagagggctcagaacttggccaacagggaatttcacacaaagaacattaaggagaaggcggctcaccttgcctccatgtttggacacggggatttcccgcagaataaactactctctaaaggcctgtctcatactcatcctccatctcctccctctcgccttccgtctcctgatccagctgcttcttcctctccatcaactgttgactctgcttctcctgccagaaagctgacggtagggaaagtgtccagcggaataggggctgcagctgaagtcctggtcaatctgtacatgaatgatcacagacctaaggcccaggccacctctccagacctggaatctatgcgaaagtcatttccccttaacctgggaggcagcgacacgtgttacttctgtaagaaacgtgtgtacgtgatggaacggctgagcgccgagggccacttcttccaccgggagtgtttccgctgcagcatctgtgccaccaccttgcgcctggccgcctacacctttgactgcgatgaaggcaaattttactgcaagcctcacttcattcactgtaaaaccaatagcaaacaacggaagagacgggcagagttgaagcaacaaagagaggaggaggcaacatggcaagagcaggaagcccctcggagagacactcccaccgaaagttcttgcgcagtggccgccattggcaccctggaaggcagccccccaggtatctccacctccttctttaggaaggtgctgggctggcccctcaggctgccgagggacctgtgtaactggatgcagggactcctgcaagctgctggcctccatatcagggacaatgcttacaactactgctacatgtacgagctcctgagcctggggctgccactcctctgggcgttctctgaggtcctggcagccatgtacagggaatctgagggctccctcgagagcatctgcaactgggtgctcaggtgcttcccagtcaagctccgctgacatggctggctgccccaaagtgccttcacatttccagggaggcttcagatggcagtgcgtttgcagtttgctcaggctctggccaggaagcctagcattctctaagcaattagctcaaagccaaagaatttcacatgggccacctccgcctggccttatcagggtgaacatctactcacggtgctagggccagggatgatatgaaggatcttttctatagctttgtgagccatacttctgggtttacatttcaatttttttaattttaattagcccagagaaagcatttttttctatgagtgtcaatttttctaaacatgggtttgaagcttataaccagttttataaaccccttgaacactgcagtgagttatcaaagccactgcctgcaaagtggatgatttaagattttacacgcatgaaaatgagtgtgccatctcctgaccagtgccttttgacttaggtacccagatgccacttgtcagcagcaggatactttttacaacacgaaagcataattattttagaagaagagagtagaagggcagaatagaattcaacttacagaagcacggagtagtgtgtggttggctgttatctgtccccctgggaggaggactgttttgctcccttgttttgatgttaaacagtagcttaaaggctttcccccccataccaactcacagccaaatgacaaagaaccgtggggtttcaacagattctacaaacatgcattttcccttcccactaatgggcactgcagggaaagcccattggcatttgaccatggagctgatgcagtgccaaagatgagctctttcaactgatggcattttagcccctgtggctcccagcggatcccccagcccgggctgcaggctgagccaaggctgtgcagggtccatattggtcaggccaagtggagtggaagactctgtccacttatgtggtgtcctttgggactgagggggtttgttagcacatcaggctattgctgggaagcgtggcctgcccagtgagcattgcctgtggacatcctgactgcttagctgctccgctgccacacatatgtggtcaaaacagaaaccaatttcacactgccctgggaaaggaatgggtctgacctccaggggaagctctaccatatcttgactggcagggaaggctgggagtggaagctatttatggactgatccaaaggacatatgcatgagtaagggtaaaaatgagcatgcaggtccacctgtgttcttactctgggtatctagaagagtcctcagctctccctactccacgctgcctagacatacacagctgcagggtctggctgaacaatcaaggggccgccagagaaaggccatctacggtgcgcagtgtatctggagttgctgggcccaagatagctctgtggagttatcactagagatgcctctggattaactaagaggtgtgcctgggtgtgggtgaggagtcagaacctttgagagctttgagatgacagtttctatggggcgggaagaaggaggtgcatttctacaaacacttccctgaaatccttgggaaaaacagaggcatggccgtggccaactctgtgggaactggcgcctctgtccttgttggcactgttctcagtccgatgacttgcattgtgttttctccaatttttgctgggattttaatgttcagcatggtgggaggaacccttgattccttttgtttgagtatagaaagtaaatttttgaggtcatgatgtgaacggccatgttattgtgattatcttcagctcaggataggctgagatgctttgtggagtgttccatgaagcccgagtcggaatctctgactgtcgtgtacagccataaggagactggtttgaattactgtggcgagacagggcgtgcctgtcagaaatctgagatgtttgtacgctctgagatgttgaacctttctggtgggcagcaccgacacccaggggtggacccccgaggatgaatgcctctaggcctccgcaacatattcaagaatgaatgggagacgctagagtaaaatgggggcagagaggatatcagggagcaagatgcaaactgtgtgcatccactctcgtaaacaagtagctggtcacaaccagaaaggttcatctctcctaagcaaacagcgactctttcagaggaagtttccctctttcaatcgtggccttattttcaactccggtgccttctcgtgatgttaatcatttccttttttccccacactaagctctcttttctatctttctctctctttccaatcttacgccatggccatcagttcatttcagccttccagtgctacacccacttcttggctgacacacttctgctctaaggtgactggttttcttgccaattttcaaagagtggtactaacccccaacccgctttccgcaccccgtcctctccgccagcagtactggttgcactaactagtctccctccctttatagaatgtcaaccaaagagtgccctcctcccctctcagcctcctctttagctagcctccccatctcatcacaacgcatgtctgtgacctttggtaatcatttacagtgccacacggaaccctgtattttgcacacagcaaaacaaacaatgtttagctttatttatggtatttgatgctgtaaatggaaataaatattgttctttataaagcaaaaaaagta

SEQ ID NO: 435042 - DNA, 6514 bp, Homo sapiens
aggcgctcggctggctaagcctgcgccgggccgcctcgctcgctcccagctctgtcagtggcccgcggggcccgatcgctgcgcccgcggccagggccgaggcaggcctgacccggggccgggcagcccgcgcgactttcggaacatggcaacccgtgtgtgtctcatcccagaaagagaagactttaaccactgtgatgcctgagaatccagtgtgacgtttctccagatacttcatgctgttcacctgtgtcctcgccgcaccactgccgcacacgactcctgaaccatgggggaaaacgaggatgagaagcaggcccaggcggggcaggtttttgagaactttgtccaggcatccacgtgcaaaggtaccctccaggccttcaacattctcacacgacacctggacctagaccctctggaccacagaaacttttattccaagctcaagtccaaggtgaccacctggaaagccaaagccctgtggtacaaattggataagcgtggttcccacaaagagtataagcgagggaagtcgtgcacgaacaccaagtgtctcatagttgggggaggaccctgtggcttgcgcactgccattgaacttgcctacctgggagccaaagtggtcgtggtggagaagagggactccttctcccggaacaacgtgctacacctctggcctttcaccatccatgaccttcgtggcctgggagccaagaagttctatgggaagttctgtgctggctccatcgaccatatcagtattcgccaactacagctcatcctattcaaggtggccctgatgctgggagttgaaatccatgtgaatgtggagttcgtgaaggttctagagcctcctgaagatcaagaaaatcaaaaaattggctggcgggcagaatttctccctacagaccattctctgtcggagtttgagtttgacgtcatcattggtgccgatggccgcaggaacaccctggaagggttcagaagaaaagaattccgtgggaagctggcgattgccatcaccgccaacttcataaacagaaacagcacagcggaagccaaggtggaagagattagtggtgtggctttcatcttcaatcagaaattttttcaggaccttaaagaagaaacaggcatagatcttgagaacattgtttactacaaggactgcacccactattttgtaatgacagccaagaagcagagcctgctcgacaaaggtgtcatcattaacgactacatcgacacagagatgctgctgtgtgcggagaacgtgaaccaagacaacctgctatcctatgcccgggaagctgcagactttgccaccaactaccagctgccatccttagactttgccatgaaccactatgggcagcctgatgtggccatgtttgactttacctgcatgtatgcctcagagaacgcggccctggtgcgggagcggcaggcgcaccagctgctcgtggcccttgtgggtgacagcttgcttgagccattttggcccatgggtacaggctgtgcccgtggcttcctggcagcctttgacacggcatggatggtgaagagctggaaccagggcacccctcccctggagctgctggctgaaagggaaagtctctaccggctgttacctcagacaaccccggagaacatcaacaagaactttgagcagtacacgttggacccagggacacggtacccaaacctcaactcacactgtgtcaggccccatcaggtgaagcatttgtatatcactaaggagctggagcactaccctctcgagagactgggctcggtgaggagatctgtcaacctctccaggaaggagtcagatatccggcccagcaagctcctgacctggtgccagcagcagacagagggctaccagcatgtcaacgtcaccgacctgaccacatcctggcgcagtgggttggccctgtgtgccatcatccaccgcttccggcctgagctcatcaactttgactctttgaatgaagatgatgctgtggagaacaaccagctcgcatttgatgtggccgagcgagagtttgggatccctccagtgaccacgggcaaagagatggcatctgcccaggagcctgacaagctcagcatggtcatgtacctctccaagttctacgagctcttccggggcaccccactgaggcccgtggattcttggcgcaaaaactatggagaaaatgctgacctcagcttggccaaatcatccatttctaataactatctcaacctcacatttccaaggaagaggactccacgggtggatggtcaaaccggagagaatgacatgaacaaacggagacggaagggcttcaccaacctggacgagccttcaaacttttccagccgtagcttgggctccaatcaagagtgtgggagcagtaaggaaggtggaaatcagaacaaagtcaagtccatggcgaatcagctgctggccaagtttgaggagagcactcggaacccctcactcatgaagcaggaacgccgtgtctcagggataggtaagccggtcctgtgctcttcctccggccctcctgttcactcttgctgccccaagccggaggaggccacacccagcccatcacctcctctgaaaaggcagttcccctctgtggtcgtgacggggcacgtgctcagagagctcaagcaagtgtctgctggcagtgagtgcctgagcagaccttggagagccagagccaagtctgacctacagctgggtgggacagaaaatttcgctaccctgccttctacccgcccgagggcgcaggctctttccggggtgctgtggcggctgcagcaagtggaggaaaagattctccagaagagggctcagaacttggccaacagggaatttcacacaaagaacattaaggagaaggcggctcaccttgcctccatgtttggacacggggatttcccgcagaataaactactctctaaaggcctgtctcatactcatcctccatctcctccctctcgccttccgtctcctgatccagctgcttcttcctctccatcaactgttgactctgcttctcctgccagaaagctgacggtagggaaagtgtccagcggaataggggctgcagctgaagtcctggtcaatctgtacatgaatgatcacagacctaaggcccaggccacctctccagacctggaatctatgcgaaagtcatttccccttaacctgggaggcagcgacacgtgttacttctgtaagaaacgtgtgtacgtgatggaacggctgagcgccgagggccacttcttccaccgggagtgtttccgctgcagcatctgtgccaccaccttgcgcctggccgcctacacctttgactgcgatgaaggcaaattttactgcaagcctcacttcattcactgtaaaaccaatagcaaacaacggaagagacgggcagagttgaagcaacaaagagaggaggaggcaacatggcaagagcaggaagcccctcggagagacactcccaccgaaagttcttgcgcagtggccgccattggcaccctggaaggcagccccccaggtatctccacctccttctttaggaaggtgctgggctggcccctcaggctgccgagggacctgtgtaactggatgcagggactcctgcaagctgctggcctccatatcagggacaatgcttacaactactgctacatgtacgagctcctgagcctggggctgccactcctctgggcgttctctgaggtcctggcagccatgtacagggaatctgagggctccctcgagagcatctgcaactgggtgctcaggtgcttcccagtcaagctccgctgacatggctggctgccccaaagtgccttcacatttccagggaggcttcagatggcagtgcgtttgcagtttgctcaggctctggccaggaagcctagcattctctaagcaattagctcaaagccaaagaatttcacatgggccacctccgcctggccttatcagggtgaacatctactcacggtgctagggccagggatgatatgaaggatcttttctatagctttgtgagccatacttctgggtttacatttcaatttttttaattttaattagcccagagaaagcatttttttctatgagtgtcaatttttctaaacatgggtttgaagcttataaccagttttataaaccccttgaacactgcagtgagttatcaaagccactgcctgcaaagtggatgatttaagattttacacgcatgaaaatgagtgtgccatctcctgaccagtgccttttgacttaggtacccagatgccacttgtcagcagcaggatactttttacaacacgaaagcataattattttagaagaagagagtagaagggcagaatagaattcaacttacagaagcacggagtagtgtgtggttggctgttatctgtccccctgggaggaggactgttttgctcccttgttttgatgttaaacagtagcttaaaggctttcccccccataccaactcacagccaaatgacaaagaaccgtggggtttcaacagattctacaaacatgcattttcccttcccactaatgggcactgcagggaaagcccattggcatttgaccatggagctgatgcagtgccaaagatgagctctttcaactgatggcattttagcccctgtggctcccagcggatcccccagcccgggctgcaggctgagccaaggctgtgcagggtccatattggtcaggccaagtggagtggaagactctgtccacttatgtggtgtcctttgggactgagggggtttgttagcacatcaggctattgctgggaagcgtggcctgcccagtgagcattgcctgtggacatcctgactgcttagctgctccgctgccacacatatgtggtcaaaacagaaaccaatttcacactgccctgggaaaggaatgggtctgacctccaggggaagctctaccatatcttgactggcagggaaggctgggagtggaagctatttatggactgatccaaaggacatatgcatgagtaagggtaaaaatgagcatgcaggtccacctgtgttcttactctgggtatctagaagagtcctcagctctccctactccacgctgcctagacatacacagctgcagggtctggctgaacaatcaaggggccgccagagaaaggccatctacggtgcgcagtgtatctggagttgctgggcccaagatagctctgtggagttatcactagagatgcctctggattaactaagaggtgtgcctgggtgtgggtgaggagtcagaacctttgagagctttgagatgacagtttctatggggcgggaagaaggaggtgcatttctacaaacacttccctgaaatccttgggaaaaacagaggcatggccgtggccaactctgtgggaactggcgcctctgtccttgttggcactgttctcagtccgatgacttgcattgtgttttctccaatttttgctgggattttaatgttcagcatggtgggaggaacccttgattccttttgtttgagtatagaaagtaaatttttgaggtcatgatgtgaacggccatgttattgtgattatcttcagctcaggataggctgagatgctttgtggagtgttccatgaagcccgagtcggaatctctgactgtcgtgtacagccataaggagactggtttgaattactgtggcgagacagggcgtgcctgtcagaaatctgagatgtttgtacgctctgagatgttgaacctttctggtgggcagcaccgacacccaggggtggacccccgaggatgaatgcctctaggcctccgcaacatattcaagaatgaatgggagacgctagagtaaaatgggggcagagaggatatcagggagcaagatgcaaactgtgtgcatccactctcgtaaacaagtagctggtcacaaccagaaaggttcatctctcctaagcaaacagcgactctttcagaggaagtttccctctttcaatcgtggccttattttcaactccggtgccttctcgtgatgttaatcatttccttttttccccacactaagctctcttttctatctttctctctctttccaatcttacgccatggccatcagttcatttcagccttccagtgctacacccacttcttggctgacacacttctgctctaaggtgactggttttcttgccaattttcaaagagtggtactaacccccaacccgctttccgcaccccgtcctctctgcgtttgcaaacgcagagaggacaggagggagttcatggccgaggactggttggagccggggatgttcatgggagaaggggtcagagatctctgcttgacacacctggttgatgtttcttactgtctcagagacacgctactggtgagtgatgtctgaagactcggacctcttcaactgcagctccttgcgcatcggtccctcaatatctgctgcccaggaatccatgcgaagcacgccca
